United States Patent Application Publication US 2011/0014706 A2 - sequence listing, part 28

SEQ ID NO: 60301 - DNA, 289 bp, Arabidopsis thaliana landsberg
tgttgaaattgagatcgacgaaaagaaattgttctggatacagatgtgtagaaccagaaacaatctaggtcaaagaaaaagaatgcttcaagagagggaagtacgaagacggaagaagatcaatcacagcgattcagaaccaaaaacgatgaacaaagattcgatgatgcttcggaagctccattaaagaagacttttgagctcaatcgaagaagaatcgaacgaaagcgacgttgatttgaaggaaaagcttgaatgaaaaacatggcgggaagaagtttgttagagc

SEQ ID NO: 60302 - DNA, 833 bp, Arabidopsis thaliana landsberg
caaaacataatcgcgaccttcctgaagtgtttcaataatctcactggtattactcgggtcctccagcgaagaatcatagatcaaatcagagttatcaatcctagaaggcttctttagagtgcttgaaccaggagagtcgcaatgctctgacagtgaagacccatcatttgtgttacatggttggtcttgattcacatactcaatccattcttgccaccatctggacagaaaagagagagaatgttctcagcagaagtaccataagagaaaattcaaactttatcacaatggttgtaatctaatacaatacccataaacatgagtcaataaaagacagttctttggaaaaggttatgaaatgctcaaactaatctcatcaactactacagataacccaatccctaatcgtaactctaaccctaaccaagtccgaaaccaaggcaaccaaacaagacgaacagatagatataactcttgggaatttgataaattcaagctacaagtgaccatagggagcaaaaatcaaagctttataaacctctgagtgatgagataaaatgtatcgccttctttactattagcctcagcagcaatagcaatgtctctgatgaaaactcgctcttcctcgggagacagatccgtgctgctactgctgcttcccatcgatacctccgccatatctcgaaaattaggagaaattcgtttcacctaaagtcagctttcgcgaattctagctatgaagagaagaatctaaagctgacacaaccccgaacaaccgtgcttcgccgtaaaactccagcgagagtaaagcaaggcggtgcctatgataaacc

SEQ ID NO: 60303 - DNA, 1138 bp, Arabidopsis thaliana landsberg
  unsure (1)..(1138): unsure at all n locations
gctagtgaattttcttgttcttctctaactcttgtttctgcttattgaactctgactgcttagtagccttcaataagtaacagagacagatgaatatatctacataggatagtacttcttcaacatgtaaaagctaaaatgaactcagcgagatagttctcaattctcattctacctgtgcttgctgagcatcatctaacctcttctccctctcactcagatcttttttgcagttagttagctccttctccaaaagagatatcttattctgcttctccaacagaagtttcttacaatcttcagcatgagcatcttttgctttcagtttctcctaaaaaccatatcatggcgtcacaattgatataagaacttagaggaaaagcagggctaaagaccagtgggacgcccagaattcaaattcaacaaattatcgaaaccaaaatgacacaatattaacaaatatcactaagacttcaccaaaaattctcatcagcaaaattgagaattaccgtacactagaattctatatgcgattaatgatcaataatgcaactgtggaaatcaacatatagttggggtgttccagcgagatggaggaaatttaaagagtaggttacaagatagggagtagtcccaaactaggagacaaagaggctctctcaaagggcatcccacacatggttcattgaccatcccaatatcaaatagataaagcaccttatgttctttaaccagtagggatcaaggagcaagaactaaccaccttcagcagacatggtatcatctccattaacattgtaactaatttcacgacaacaaatatagtgaaagggtagggatatcatatccatgcacacccttggaaaacacccactattgcagaaatttagacaacgtcatattatctttataagcatacctctaattgccgcacttcatctttgaggcggttgtagtcagcaatatcaatgtttctgtatgtctcccgcaacttcacaaagcatcaagtaattgtaagtatgaaccagtaacaaaaagtaattgtaagtatgagcctataaatatatgacgtacctcatcaaccctctntttgtgaagatctgtctccatccttagcttttccatctctttcatacac

SEQ ID NO: 60304 - DNA, 916 bp, Arabidopsis thaliana landsberg
  unsure (1)..(916): unsure at all n locations
agtataataaaatcgtgggtcgagaagcataagctcgaaagacttccgcttgttgcgttaggggcttcatctggtggctactntgtctcggctcttgcaacagaaatgcagtttagtagcattgtgcttatgattgctgaaggagtctttgatcaaattagtatcagtaaacagtatccgcctactctgtttgtgcacatgcctaaagatgtgtatagacaacaaaagattagagagttcttagaaggtcttagaatggaaggtattgatgctgcagagattgaatgcttggatttgccgatttctccggatttcttggcagataggattccaggtcttgattcagatgtctcggccaaactgtttaagttgtttcgagacaagggatttgttgatgagaagggatacatgaaacgtgatggacggagaacaccgtggaaacaagctcttagtggctacaaaatatcactggagcaaagtttgattactcctgttgaggaagaactgaatcttgcatatgcatatcatgagatgacgagcttgcagtctgatcaaatattcagctggtttgaatcgcatatgagctaattggctgtcagattttcatgtaacaagatcattctttgaaagctgtaagatgtattgcacaggacaatctatttgactccaatggaacatgcctaaacagtcgatttacttacgatttgagtctgaaaagatcatggtcactctggttgctgtgatttagagttaagaatagaattttggttagtgtaactaaactctccgtttaaattcagcagagtttcgtaaggccagctgctttttgattctcatttgtagttaactaagaccgctaagtctgttgtggttttggaatctgtaacaacttttaattctggaagggtggagggta

SEQ ID NO: 60305 - DNA, 499 bp, Arabidopsis thaliana landsberg
aataattactttttaattctgactcgtgaattttggaaacctttttttcttttgtcaaccaaagcaatctttaaattgtgtaaactcccccaaaaagaggtaataaagaggcacattgtcacatttaaagggaaaaacttgttaacagttgaaccaataaattgggaagaaagaagagaaaaagagacaattatttgttggcaccatgaaagagagacctgcgcggcccaaagtgggtccgacatagactgggtcgaagaggagacaagtggagggtccgaccataccctaaccacgtgcatcaccggcccagagggctggtctcgtggtccacttctgcaccttaatccctatcctaacagttcccatctgccactagataaacattggcattgcaaaacaaaacaaagaaactaacaaaaataacttaacataccatgactttaattgattgcttttacgttgtctagctgatacgtttgcagtttacttcataata

SEQ ID NO: 60306 - DNA, 983 bp, Arabidopsis thaliana landsberg
gtcataattaaaaagttattattacttaagtcatatagatgatcgatgactaaaatatactatttgtcattgtttttcataaagtatataatctgtataagcattgtggaattttgctattgagagtactgtgtcactaatcacttaatcagtagtcaccaccattaccaaaatttttgttttgtcacactatgtcaagtttcatatccaacggtttgtaaagtgcttaaatgatgatgatgaaccatctatatacgaatacgagtgtcttacttagacgtaaactcgttcgaatgtcgttgtagatatagatactcggttaagaaaccacagctttcaagaaaagaatttgataaattacaagaaaatattcgtttataatattataattgtttgcattgtgactacaagtctacaaatagtagttctatatgttaaaaaaaaaaaaaaaaaagttggacgtataagtattttgaagtgtgtcaacccatgcatgctgcatctaatacatgattttaatttaatataagtccaaggaacatacattcgcacacgagttatacacgttgtcatgtaaacttggaaatgtctttacaaaataaattgaaatcaattagactgataatcatttataaagaataataatcgtatgattaatgcataatagacaatgagtttggtggaaatcacctaacaagcttaatcaaaggttaattgggggaaaaacaccacatttacccaatttattcgtgacactcaacatccaacttttaattctttgttttttttttttgtttaataaatcaaactttagttctatgtattgtcaaaacttttctttaatgcgctattattaacgttattatgattgtatatatgtggccccaaagcattcgtagccactatttgcaaatctcaagcttaccttccaaaaaaatatcctgcctaaattgccccttgtatcaaggtctctaaacccactt

SEQ ID NO: 60307 - DNA, 170 bp, Arabidopsis thaliana landsberg
taaagtatgaggggggggtaaaactgtagaaactgttactattatctttacaatatatattttagaattgtgaattatttgaaaatgagttttgcgataatatactaacaaaattaatttattataagctttttaaaaattcacaataacataaatagattaatacactc

SEQ ID NO: 60308 - DNA, 1402 bp, Arabidopsis thaliana landsberg
  unsure (1)..(1402): unsure at all n locations
gaaaattttgtgagggggcatttttaaaaatcacaaatttgaataaccagtgatttaaagaaaaaaaaaaaccaaaaccttcaaaatcctagttccaaagtctatataacaaattttaatacttttctactaaataaacataagaagaaatagtattgttaattagtcacaatccaaatttacagaaccaaatacaacaacttcgtaatttcttaatgtattaaaaattttaaaaatttccattagagatagattctgatatataaaacttggataaaataaatatcataaaattcacaagtgcataacacgaacacttgcctagttttcagttaatatacatatgttgaccaaaaaaataagtcttaaaaaaaagaaaaagtaatagtttatacctttattggcttaccaaataacgtctgacgtgtaatcttgactcttgaccttaacttaaatttagatttcatttgatactaattaaactattccctaaattaccaggaagtaaccaaattgtggagagaacaaaaacaccaattcgatattttcattcatggcttagaaaataagaatcctctaagttctcctctctattgaaaacccaaaacaaaagttgagaacttttcatatttcagatgggcaacaagaaactgttgactggtgggtcaagcaaaactcatggtagtggtagtagctacagagatcctctgttgcagaatcaggtctgtttcattaaccattcttgtgtcttactctcatgtctgatgattcttgcttgtaaattttcgttatcgatgtaaagtttcgacctttactcagaaacttgagggaatttatcagaaatttcttatttaagaagaattgtggtgtcatgtgacttgaaattacttgtttaattcgaagagtctggttagtttttgaagcatagagttctcatttgacatgtaatcatttgattcgaactactggattgttacaacagaagaaatgttcttaaagtttgattcttgattcttgattttgccaatttatgagttttctaattgttagtttgtttattctnnnnnnnnnnnnnnnnnnnnnnnnnnnaaccgaaagcgaatggaagcgagaatggtttgaatgatcttgagcatggtgtagttgaggtatttgtttgtgctgtttgttttacagaaacttttcatttctagaagtgatgttgtcttaattggtttttttttcaggcggcaaatgttggatttggcagagtctttgcgttggtgagtgtttctttgtattataattgtatatcattcttgtgtaaagatatgccaatactcgagtattatggtttcgcaggcaaagcccgatgcgggaaagctagtgattggtaccattgctttgtgataggttcaacact

SEQ ID NO: 60309 - DNA, 915 bp, Arabidopsis thaliana landsberg
agataacccacttcataaccaatgcaattgaaaaggttcggggacaaagataaaccttgaaatcttactagggaaaacaccaaagacaatctccatttcaatggatcaaatttgttttgaaaaatgtatccaaaagtcataagtttatataaatcgacctttcaacttgacaaatcagtactatatagccagcgattaatgtaaagaataggttttctataacaatcagtacagagatttttaaaataattaacagaaagtggcaaagtttgtgtagtttaatctacaataatatgtgaaaaaatctctgtaaatttaaatattttttttaaaaacataaataaataaattctttcatacgtaagggtaaaaaggtaaaatgagtaaattccttccccgaatttctctttgactccggtggtcaacgtcgagccgagacggcaaacttgaatcaattttaaaacagagcttccgacgctgaaattgcaaaatcaaaatctctccaatcttcgaaactgagcagttgagagagagagagagatagatggtggcgaagacgatgaggaaggcggaggagctggtggagaaggcgatgaaaggaaacgatgcttctcatgacgcctggcacgtgtggagggtccgagaccttgctctctccattgctcgcgaggaaggtctctcttccaattctgactccatggaaattgtgagtttgaaaaatccctaaatctcaaagttctagttcagctgagcctgatgaaccttcttctagttagttcttctagttagctatagctgtttattgtcaaatttcagctcttttactttagagtgaaccatttctgttgatactttgcaggtggagcttgcagctcttctccatgatataggtacttggttttattttcatttctg

SEQ ID NO: 60310 - DNA, 1821 bp, Arabidopsis thaliana landsberg
acgttgttcatgaagatgtcgcgagtaaatgtgtaatctttttttttgttatttagtttgtttataaattgatttcatttccaaaattagtttggtcaatgactttttttttggtgttttgcattttatagctttaaatgttattcaaagatttttcaccattttcccccaattatgttatttactaattaaattatttttttcctttaagttaagattttaatatatgacattaatagtatttcacacgtgttttcgcatttgactattttagtcgttgtaagctttttttttgtcgtctataaattttacttatgttcatgggtaacattaactgaaatttaaagactgacaaaaaaaatatcataacatctaaattagtcaattgcgacactggtgagtggtgactaattaaatgtttgaaatagagtaatggaagtataacacaatgtatctatctattgacgagtaaatcacataaatatttactataattggcgtgtcaatattattttattgatatataaccttttcacatttgagaaggtggcaaataataaattatatatcttgtaacccaaatataacaaatttgctcaccataacttattaatggattaatatgtaatattagttaggttatatatttacgtattgttaggtacaagaacgagcgtatcaatgggaagaaggtgtgaggcacacgtgcaaagagagtgtttaataaagtaataagtttataattagtatttcgctatatatatatatatatttattatcttaggtcttattaaatgtaaatatattagttatggttagaactagtataacaaacttatggaaatgcgtacattgcgtctgaaaccattaattagcgatatatacatttgagatttataatcataaaaatctagagtccttttgcttatacaagacgaacacttataaacgtttccaaaggggggaactttcgaaagttgttgaaatgagagatatacaattgcgaagtatagagaaataaacttcaggacattgacaataatatgaaatgaagtacacgatttagttgataagaaaagaaaagaaaaaaagtatacacgattaatttccttttagaaaaaccaatcatacatcgatttgatgtttaagtctagaatatgtgatgcaatttaaattatctgtttttgttttccctgagtacccaagaatattgggcggagcagattgatgccaatatcaatatgtaatcagtacatgcatgcatgtggtatatatagagagaaaattgtatgtttttgcttacataacttaaatcaaccagacaaccagtgatgcatgcatgtattataacgaaattcacattaatgttctttatcttaaggaaaaaaggaagagaaatcagacgaaagttaattgtctcaaaaggtaaaacaaatgtacgatacaatgattaataacaaattgtatagtatagctcgctaccataatctaagtatcgtattcgtacttaatttcgtatggatagagaagtaagtatatatgtgagagtgtctgagagagaagaggcacgagaatcgtgttgaccgtttcgtgtggagttctttagtaagctaaccaaccttcatgtctgtcgtgctccttttcttcacaacattaatcctcccttttctttttccgtcctttgccattttcaaaattacttttatttcccgaaattcttagtatttcatgacttcattttggtgggttcaaattcgtgaaaaacttctaaatttcccccattccttctccaaatcagtagagccgctatgaataattcct

SEQ ID NO: 60311 - DNA, 547 bp, Arabidopsis thaliana landsberg
ctttttttggtgatggggtatcgataggtggttagatgattcacatgctttcacatcttcactaaaccctattccctaagaatattccaaaatttggtcctaataattaacactaattattactaaattgatttagtattggataggtttttggtgaaccaaacaaatataaatgtcatacgtccatatccatatagtctttaaaaatatgcatgtcacgtcttatcttacatttaatgttgatttaaacaacttctaccgttaaattttaacttccgataatgctaagtgctaacacagagtaagctattgtgagattcttcatagatttgatattcatatatcacgagaatttcatcacaactcctactttatccgtaatcaaatttatagaatataatatgatacaaaatttcaaaactcacttattgtaataagtacataatagttttaaactatttcctaattcgcgtgaaaatgctaaaatgatacttatattaaaacaaaatttaagtattcattttctagaagccacataacattatgt

SEQ ID NO: 60312 - DNA, 720 bp, Arabidopsis thaliana landsberg
gacaacatactcataccataacagagagtcaaacctcaaatcatattgtataacatgtgtagaagcattatattttatatttaagtaaagacccaatgtaacaatgacgaaatctaagcgacatcagattccgatttgggccaattctgatatcacacagagagtggaaagaatcttgaaacaaaagccaaactctctcttcatatcgtctgaatttccattaaagttcataattttttttattttttttgcataatcttattgacgatagtccacgaaattgtttgtttttcaacgaaacaattgaatctttaggctgtacaaaataacaggcccattttgaaagttatataatgggctaatgataaatgctaggctgactaaataaaataatatacagaattacttcggctgctatggttacgaagaaaattattcggcctatcttagacgtctctgactttcaacgggactcaattaattgaaattttgaaaaatacaaaaacaaaaaaaaagtacaacattacatattgatggaatgttaacgtttgttttctgtaatgatgaaattggaaaattccaaacgagaaaatataaataaatggaacgttgggactcgattcgactcttgatgagaatccagtctgtaaaaattatgtcaacacacatagtaaatatatcataatcaataggataacctggtgtttttaaaaatggaat

SEQ ID NO: 60313 - DNA, 490 bp, Arabidopsis thaliana landsberg
  unsure (1)..(490): unsure at all n locations
ttatattcagataaaaaattgcataaaaaagcgttcggaaacacatcaaatatttgttggtgacgaatctaacgaacaaattgcgtacgttatgctcaaattggacctcgctcttatgtacattttgaatgttctcacattggacttctnnnnnnnnnnnnnnnnnnnnnnnnnnntaataacaatagcacatgtaatgaatcatttcgcaagttttctctcttggagaaagtggattccagattgagaattacgcctacaaatctcttaacaaaagaggcaaaattagtcgaagcagttggttataagatgacttcattattaacccaaaaaatacataatatagaatattcgtgggattcgaacgttggagaaaaataccctatttcttgtaaaataagcaacatgattctactttttatcatttcaagatccaagaatatttaggagacaaactaaccaatatattaggaatatagatttgatcaag

SEQ ID NO: 60314 - DNA, 1196 bp, Arabidopsis thaliana landsberg
tgttgttttcttattaggggaaattagggaacttggtatacagagaaagacaggatatgcctgtaaaaacagtttaaggcacaataactgtataattgttttctcgtttatttactagtacacatagattaacatttcaagtttcaaaattggctttttttttgcctaaatcctttgaaatcagacaataaaaacagaacataaagtgagcttaaagttttttttagttttatttaagaaaagtccaacgaaaaatttgcatatgaatcccaatcaaaaatcagtagcatagtgcgtgatccaataaattcattttgtacagaatccaagaataatttgtttcctccaatcaccaaacgccattctattcgaccataagtcttatttatctcagttttcatggccgtataaaaatattcctaggcaccaagctataggtgcgtaacgtttctaataaacgattggttttggtattattgttggttccacgaacggataattatgaaacttgtttggacatttaaaaactatatagtagcttcgtgtaatagtcaaagctattcttaccaagtaagtggaggaagcttgacgaagaagagtagtgcgcattttaatcgaatctacctttcgaagatgtcggcgcaggttaagctctactactatttttcttatttatttataaactgtggaaactattttttattattattattttatttatcggatgtttacgaggtacgcattatttatttctctataattaattttgctttgtgacaatattcacaattattttttttaaagaaaaaactaccaaaaaaaaaaaaatagcgaaaggaagcttcatttgttagagagataaactggagatttttagagagagaaagaaatagagagagcgatcagttcgtcgttgacgatcgatgtcgaagatgaagcatcttctacggaagctccacatcggcggaagtagtggcgtcggcggcggatttgctgaccatcacaggttagacgactcgactagacctatgatcgatcctagccctattcttagtactagcccttgccctgcatcgacttcttccggctcttcctctggttttggtaatgcttccacgacaatgccgagactggatacatttgagcctgttggccgtgatctgacggctgttgatggtgttgatttcaatttgatg

SEQ ID NO: 60315 - DNA, 338 bp, Arabidopsis thaliana landsberg
tgggtaccatttctttcgagtaattattaggaaacaaaaatgtttcggttcttctttagttcggggtatattatacccgaattaccaaaacatattggatatgtttgggtattttctgtatttttggatacttttctattatttttaggtatgtaacatattttaggtctattcggttggtttcttatggtaatttttgggtatcttcggtattttgggtattagggcattttttgattatttgagtatattttgtttattcagtctaaaagtaactagatatatattgtatgtttaattggtttttaatttacttccaaatatttcggttagtttct

SEQ ID NO: 60316 - DNA, 134 bp, Arabidopsis thaliana landsberg
taaataaggccgcctataaattgccaataaaaggaatcgcttaccttcaaaccagcactttttagatatgctcctactaagaaggcaatcggaaggactgcactctgctaggaaagaaagagaaccaaacatca

SEQ ID NO: 60317 - DNA, 516 bp, Arabidopsis thaliana landsberg
cgcctatatactcaatgtatattaggcataactcgtctctattttcgatacccaaatttgctcgaaccccagtttctcgtaaacaagacataattccacttttatacaagacataattactgaacaagatattgaaaaagtaaattctcgtaagcatatttatatctattgccacttttcttttatattttgaaggccacgtagtgttggaagtcaaatgaaaatcctttgtttttttggtttcaaatgaattatctttattgatcaaacactttatatattcattactgaacaagtaatattaaaggactttcaaaaaataatcatcaatagactataatcatgaggaattctcaaataaaactaattaagttttaagttttaggtttatatactgtgtgaactaaatgaagaaattaatcatgtaattaggtaaatttaagttatgatcaggtgttatagtcgtatgtaatatataaaaggcagaatcccagatgaaaatcttcatatttagac

SEQ ID NO: 60318 - DNA, 896 bp, Arabidopsis thaliana landsberg
gaaagaaagctaatgagagaaatacataaatcgacaaaaacaaaccgtcttctcatctctgcctctggatttaactctcccttcacagttgcatagaatcttcttctctgctcatattttgaagaaatctccaggtggttttgcattttcctggaaacgtatctctgtaattcctagacttgagtagtgttcttcttcttcttcaagcattttccatttttttttttggtaattttgttatagtatatagaaatccgtgaagagaaaaagtatatcggttgtcttcttcattgccatcatgtgagcattccaatattgtttcctctctctctctccatttttttaatttacttaaaagttttctgtgattttcaatgtcttttttcttccacttgacttgactctcggcggaggagtttgtcgccggcgaattgttcaaatcgtcggaggttgaaactgttcatatttgtgctacttttactttctggtctttgaattttactctttcgctttcgtcagcttcaagtctttcaaagacaaatcatctttagggattttttttaaaaaattttgtttgctttattggtgttgaagatctttgacgtagaaagcctatagacctggagaatctctttgattggtatcttatggactctctttttctctttgttgcttttgttgtcgcagtcgaagaaactgctccctcttttagtcaattctcgcttcactccctcaatataatgcgatttctcaaccggaatatctgaatctctcggtggttacctctgatatatcgccaggaactgaactcctactcgatctctatcaacaatgccgtccttgtagaactttggatccaactctctgattccggcatttccattaatatcagctca

SEQ ID NO: 60319 - DNA, 524 bp, Arabidopsis thaliana landsberg
ttcttattattttaatatagagttatagcgataattaacaatttaaaaaattagtataaatttcttttggaaaaatctctgaactttatttcactttcatataataattttacataaaatcatacaagttagcatgaaattatttctcaaattaatttttgtttagatatatattatattataaatataatataatattttaatatttatatacaaataaattcaatatggtaatgtatgctaggcgtgttaggctggtttcacaggcatatctagctttggctggattacatgttagatctgtcgagcccaatatgacctcatgagtcatgagccattcacaattggaccattaccttttttttcgctagtttccttggaaagtaattaatgaatcggaatattctaccatattcattacgtagtctttagactatcctcaacgccgggccctatgaaaatcccttaaaaaccagaaaataatatattttaatcttataactatattataacttttttaatat

SEQ ID NO: 60320 - DNA, 1168 bp, Arabidopsis thaliana landsberg
gtgtttattgacgccagcataagtccatgaagagatcacgcgcgcgccttacgtaatcaaaacggatgtcaattcgaccaagtcaaatcgtttggagtctacagaacacgatttgccgtttgatttaatgggcctatgtctttgtcaaggcccaacttataccgtattatgcaagttgtcagatacacgagaaaatttgttactgtatggatttatgtaaactcatgacatttgcgtcagcaataatcgtggctttgcataagatgaaaatattctcagatgcatagtattattaggatcaaagttctataattatttccttgttcttccatgacaatgtcacttattttattcaaaggttgataataccaatcagatgtctgcaaaataaagggaagattataaaacttttaaatcaagatttaagagtgtttgtctacctctctctattgaaaacaaaaggtacaaactttgtctttgcactgtgaagcacagatgtgcataataaatgtgaaagattttactgtctcatcgaaattgacagcagtatcttttaattattccactaaacaaaaatacttttaccataatatttttaattaggaaagaaaactttcaaatgaaatcatctttatttacccccaattataaataaaatggtaacgaaccaatcatttttttgcatagaagctttctcacctttataaaatagaaaatggaaaacagctacaccgttgatggtcaccgtcttcaatattccgttccgttaagctccatgcatgaaaccagtcaaaactccgaaacttacggattatccaaagagacaccattggtctgcatgcccttgttcgaaaccaacactactacttcgttcgatatctcttctcttttctcgtttaacccaaaaccagaaaccgaaaacaagcatcagcatcgtgtcatggacgattccatcgccgccgtcgtgggcgaaaacgttcttttcgggtgttaaaaacaaagtctctgatcacttgaccaaagatgctggtgtgaagcgggggcggaagatgccgcagaagaccggaggattcatgggagtgagaaaacggccgtgggggagatggtcggcggagataagagacaggatagggcggtgcagacactggttaggaacgttcgacaggga

SEQ ID NO: 60321 - DNA, 466 bp, Arabidopsis thaliana landsberg
tatgtatatagaaagaaaatataaaatcattctcttcagtcagtggtcataaattagcatatgttacgtaaaatcagaatcgagtttgcagaagctagcaattagaagtatatataagttttcgaagattgaaaattaggctctataaacgtcaagctacaaattgcatgataattacataaatcatccaattaatgttgtatagggagaaatacatatcttagaaaatcatattataaacaacaaaaataatcatatttcacattataaaacagtgtttagaatatactgaagatatagtttattgaataattatactatataacaacgtaataagtatgctatcagaaaaattagaagataatatatattgtttgaaatgcctaacggtaacaattcaaatcaaaacaatttacatgcaattcgttagaaaacggccttggtgcatgaatttttggtgacatga

SEQ ID NO: 60322 - DNA, 221 bp, Arabidopsis thaliana landsberg
  unsure (1)..(221): unsure at all n locations
nnnnnnnnnnnnnnnnnnnnnnnnnnnnnnnnnnnnnnnnnnnnnnnnnnnnnnnnnnnnnnnnnnnnnnnnnnnnnnnnnnnnnnnnnnccactgagattaaacttccgatttaaaggatcatgatggggacatacggtcctgagacgtgaacgaatgagagtcgatatttgctaccagaccaggcttatgtcaagcgatacatgattctatcctatctg

SEQ ID NO: 60323 - DNA, 461 bp, Arabidopsis thaliana landsberg
attaatcgacattgatgggtgcaactagagttatcgcccagtttaattaattgactacactaacaactttcagttatataagtattaaataacgtagcgactacaagcgagacaaagacggacagacaaaaaccacgcgcgaaacagccggagacgcctatagtacacgtacaacacacgtacgggcgcggcgacacacatgcgaagactataatagatagaaaattaaactaaacaattaataataaagaatatttcagtaagattaaccatgttggcgttaattataaaatgcaaatcgaattcctaatagatttaattgaacgacgtctataaccatggcaacaatattaaataataaataatatgtcaacacagagaaaatctctaactaagatatttatatgatcaacgcaactgacgattgaatgatttaacgcaaagtatgcgtttaatggact

SEQ ID NO: 60324 - DNA, 1410 bp, Arabidopsis thaliana landsberg
gcgagagaaagagccggctcaccaacgctcataagcctctggaataaaggagaatcattgcgtgtaagcagttctttcagaagattcttgttcccaaaactgtaattcaagatcttctccactgcttccactgaagaatccatctctgagctgaagagcaatggattattcttctcatctgaactttttggtttttgtaaattgcttatgacaagactcattagaaaagattccaaggctcttatcatgtggtaggctgaggagttttctgcttgctttttctttgattttacatctcccttcatgtgaaaggttccttctatatttgggatctcaatctttactgaacaaacaaatttgggctcattttttggtcctttttcttcctgaacactggaaagagttaaaacacaataacaaaagtgttcaaattaatatgacacattcgtgcttgttgagccgcacaaagtaaaacatagctatctaacattgatcttacaagaatagttttttcgagtatatatgtgactgctctacccaagattgtaacaatttaaccacggattcgcaatcacagtatccttttctgagactataagagtctagactactcaaagatatttgtgtgactttgaatcatggttcttgttaagtagtaagtagtaattagcaaagaaaaatgtaggaataagatatacctgaaaatcggcatccaccacttatttttggtgcaaatctcaatcaactcccctctcccatttacgggttccacatgtagactatccttatcaacaaccatttgttttgtagtcatttcataggttaaagggtttccagaggaaccagtctgtatttggagctttctcgtataggaaatctcaaacaacttccctttcacatcttcaggttcaacatttggactatcctcatcaataaccacctcttcttgtgacatttcatcagctaaagagttctcagaggcagtggacagagaagataattcagactgtacttggagattttccctggagcaaatctcaaacgacttcgctatcacatcttcaggtacaacatttggactatcttcatgaatactatttccaaagggcatacattctgacagcttttgaatcgcttcctcagcagcaaacaacttagcgacatctatacgtttagcacatccagaagctaaaagtatatcatcaagatatacctctgcaatattttagttgctgacgtcatctttcgaatacctgaagtcgattcgtttgccgtgtttatcagctaagcgaaaaagcgtaagaaatggtggtttaggttgcagcagtaaatcatccggtgtatatattggctccaaaagacttctaaagatctgcaaaatttcctctctttttttattaataacttgag

SEQ ID NO: 60325 - DNA, 507 bp, Arabidopsis thaliana landsberg
tcctttgtattcagatgcggttgaggatgtagggcgcgggaccatcgtctctccccagaagacagccgccattcctctctgcttgaggagagcccgagccatccccacaaccgtctgcgtgcgccgctcgacgatgccgttctgctgcgggttgtacagcgcggagtagtggcgctgaacgccctcatccgcgcagtacgacgcgaactcagccgccgttgtcggtgcgcagcacgcgtagcttgcggccgcactccgccttcgcagcgacctgcacacgcctgatggcgttcgcagcctctcccttgctgccaaggatcatcaccccacatgtagcgggagagatcgtcgacgagcagcatgaagtagcgtcgtcctcctggtgtggctggcgtcactgggccacacaagtccccatgcacgagctcgagcctctccttggctcggaagcttcactgctggtgaaaggggagccgtctctgctttgtcaacacgcagacattgcag

SEQ ID NO: 60326 - DNA, 1332 bp, Arabidopsis thaliana landsberg
ggcctatgagattacttggactatgaacgtaagtgtatgaaacatctgattgctcatgataggaatcacatattcaccgctaacacaacctaattttacttagaggatcgagataaaatgtgccacatagcaagaaattggagaaattcttacagcagactaaatgataattaaaatatttacatattattagattggatagaatccctcatttgtaagcaactagctaacaaggaataaatatgtgacaaagcgttgaacggaccaagaatccttcaaatgaaatgtgtcaaacctcagtgggccaagcaaacttaaccactctggaagacccctcaaaatttcaagatcaaccgaaagatggtgataccgaaaactttaccctaacacaaatactaattaaacaaaaacaaattttttttgctaattactatggtttcatttaaaaagtacgtacacatggaaaatgaaaacaaacaatacccaaaattaccaatcttttatttcacaaagagataccaaagaaacaattgatagaagaccccaaaaaatgaagatttgaacgcaaacaataacaaatactctataacaaagatgaatacagacatcacataacaactaaacagaagcagacaagcttgggacaaaagagaaccaacgaaacccacaactccatttctccggcaacgaaggacatttaggaacccaatgccatgtccttcttccaacatgaaaaaacagaatctcaggccaattgtaacaacacacacaaatcatctccttatgccacagacaatacacatgctcgtagttatggtaacaaaccgaagtaaacttcctacaaacaatgtccggtaatgtttctacttcgatccaactctctgtttcttctttaaattcccaaatcttgatactcctacaaatcccattgctcccaattcctccaaccatgtaaagtatcttcttctctggatcacttactaatctagcaaacgtgatctcatcatccgccggaaaaacaccgtctccggtggctgttgtccattttccgtcgttgagatcaacgctcacgattagaaaaggctcggatctagcgaaatagagtgacccattgtaaaagactccatcttggttaaacccacgaggtaaaacttgatcaacgccgccgaattttctccacgagcggtcaccggaatcgtagagacaaaacggatcttgaagaagcggcggaggaagatgaacaaagagtgaagattttgtagccttgaggggaggtaacaagagagagaagctcaaagggaaaagggtaacaaggtaatttgatagatcttg

SEQ ID NO: 60327 - DNA, 1198 bp, Arabidopsis thaliana landsberg
agagagtcacaattgacccgttatctcgatctgtaacacttctaactctttcctctattgaaataccatcttaaggtattagtacacttacttttaatctcctatatcattctggatttttcaggtaagacacagattgaggagaaaacacggcattgaaggaggcattcctgttgtgttttccctggaaaaaccaaaagcaaagctgcttccctttgaggggacaaatggggaagacgagaatcctttagattatcaagtaactaattttagttcttgaaacactgaatatttacttccaatatttacatcagtcatttatcttatagcttgtgtgtgattacaggttgttcctggctttcgtgttcggataattcctgttctcggaaccatcccggctatttttggacaaatcatggcctcctatgttataacacaacttgcaggtgtgcaagttcagatggagccaatagtgaatctagatttggatcattaccgattgcttcatcaacgccttattgagcatgaggagacagtttatggcacatctgcagaagtcgaggtattcagattagtctcactgataatatagtttctataacttgttaagaaaaagactaatagaaaaagagatggtatctgagatatatgagacacttgaaactgcttgtgaagttaaaagcaggttcttgagaattcttctaaacttttgtccatttcctgaaattgattaaaagtttgtatctccttttgttttctgtaggtggatgttgaggaagtgatgtacatagtgaaagagttgtggcacggacgaagtgctagagatgagactgcaaaagatgttggcagagggatgtggcgagccatgaatgagttgatgctcgtgaggtacgttgattcactccttttactaagctcaatggaaatctgacaaaaaaataatgtgaagttatgattaatcagatgggatgcaaagaagccagcaacagtctcaaacttggttcttttgaagattaaagaggtttggttttgctcaatgataatcattacatgacctttatcgatttgttccggttttgttacattttgagatatgatgtatgttgttataggcggatgaacatgagactaagactcttgaggaagtgaaggaagtgaaaaagagttctttgaagagttcatgcgtactgaaaaagca

SEQ ID NO: 60328 - DNA, 858 bp, Arabidopsis thaliana landsberg
cttctctagggttcatttctgacgaatcattagagtttccaaaatctaacctttcaacagccgtgcagagattcctcagaaattgatggatccttttctcgttggctatggagagtagtgaagaactctttctggggaacaatgataacttcgtatacatcagaagagcagagaccaaagtgataacagaatcccagtttggtcggaacttgtgttggtgtttcgttttgacggcgacaaacttgaataatccgaccgagaacttagcatcgacgctcgagggtaaagttgtaatttatgataatgggctttatatgggcttgaataaaatacagtggactaaaaagcaactttagctaagcctagttgaaggtttctttcaaaattctctccggttaggtttcttctccggctaaatcatgtttcgtcgtttaattctccggcaagcagccgccgtcgccgcggaatcgaagattgcttgtcatcatactgttcatggattcgaacagcgagtatgacattttcctttttgtggatttcgattggaaatgagtttgtttcggttctgtgatttacgtttgtggtgtttatggtttgaatcagagaggattacacagtaggaataagaaggcaatggagtatgtagccaaaggatggagcgcgattaaagaagtagagagagttatcgattactgtgaactcaatgatcgtcgtcttattcctctcctcagggtataacacttatgtatgccataagtgtttgaatgtagtgctttgtatcggtggtgtttatttctaaatataaattttttttctggtatagggagctaaagagaactttgaactgctctggagctg

SEQ ID NO: 60329 - DNA, 541 bp, Arabidopsis thaliana landsberg
gacgctagacgacgcgctgcacctggatcgaggcgatgctgcggatctgcttgctgccaagcgtatggaacaccacggctacgtcgatgcggttgatgaactctgggcggaagtggctgccgacgatgcccattaccgattccttgatcgctgcgtagacgcctcgtgtggcgctgatgaccaacatttcctggatgactggtgagccgaggtaggaggttatcatcagcacggtgttgcgaaagtccacactgcgccctaggccgtcggacaggcgaccgtcgtccagcacttgcagcagcacgttgaagacatccgggtgtgccttctcgactgcatcaagcaggatcacggagtatggacgacggcgcacggctttcgagagcgtgccgccctcttcataacccacgtagccaggcggcgcgccgaacggagtgccacgctgtgacgctccatgaatccgctgatgtcgatgcgcaccactgcttcctgcgtgtcgaacatgaaggtcgccagggccttgcacagctgggattgccga

SEQ ID NO: 60330 - DNA, 788 bp, Arabidopsis thaliana landsberg
ccgtcataatttatgtgtgttatatatataatcgtcaaaccatggtaaataactaaacgcatagtagacaaaaaatttgtaatcatagatgtagacgacggtaatcatcatttagatttgaatttttaatggaacgtggtggctaacgtcgaatacatttttggtgtatttcttaaatataatatcccatgcattgacccaagaaactacttattaatcagttaatctatattcacattgttattgaccggcagatcgaaagagagttcttttttcttttgcatattgcatatcacgtgtggacaaaagccccatttggaatcttttatgatattatattgttatgttacacattaatttgttatctcaccaagacttctattttcattttgtatccggtaagagtcactcttttgagttttgacttttgactcttcaaaatgtataattggttctcccatgaggattaagtatgtcatataaattccgtttcccaatatatataacttctattttcattgagatatagtataatattattcgtatagaaaattactcaaatcataatgaactatgcatgagtgcatgcatgtgataccttgttttaatataatggaaattcgatatttcaaacttttctcgctatgttgacgttattgtcacatttactttaagatatatcatattttgttttagtaatcttaacaatgggtcatcactaaattttaatcaattaaatcatgttggcaactttcctccatttgtgtatatacgccttttttctttca

SEQ ID NO: 60331 - DNA, 1710 bp, Arabidopsis thaliana landsberg
tgaaagaaccatttatcaactatcattatggttttggttgttttaagattaacacaattgagcgagtaaattgtacatgcatataattttggattcgtacataaccaaatgttctaattacttatgagtcatattttcatatttgagattagatatcaatctaataaagtcaaacaccaacagcaatttcctcatttggtggaactgtgttctcgtataaacttgcttttattgtcaaccaactatgttctcatataagctggtccagatcatcaataagtttaaaaaaaagagagtaaaatacaggaaagaacttcgattatgatagtgtattaaaacaactttgaagtataaatccatattcattggttctttcttttttcgttttcatgtgaattaatgtaactcaatagaggtatacccaactattagatatgctatataaagaaaagaaaaactattagatatgctaatattggaagattacggatcggatgaccaaatgtgtagaagtaatatattatttatgtagaaactgtaatagcttaaccatttaaataatactgaaatggaatcgtattattccagtaaccaaaggcttagtttttgtgcgccagatttggaatgtaatctccataacacgtaaattaattattacaaattatggagatctcatgcaactagagcagttcatactgattttgtgtgtaaaatgtaaaacagagttaactgtccatcatgaatgtgatccgaataaaaccgtatagcgtagatcattacaatggaactattcctttgaaccgcttactgtgtttctaagtgttgtaacgagtatatctccttcgatattaaggtcttaagtatttggcacatttgatgcagtatgaaaatggtacatcacattaacaacatgacacattagacttgtaccacaaatagattagtcttattttacgtccaaaagaatactagatttagtcattgaaaagttgcacaaattaatagaaactagtcaataatttgtagtattttgcttaaataaaattttcaactacataacttagataaattataaagcaaaaacatatacacacacacatattttgagcattccattgctaatccaaaatgcaaacgagaggaaggagaagggcacgtggagaagggaagagcatgagagccgacaaagagcatcttttaagacatgggtttgcgtccacaagagtcatgccattgcctctccgatccttctctctctctctttgcacattcaattcaacaatctcttgtctctctctctctcgtgctttctccctttgggtttgagatttgtcagcgccttcttcgcgtcttcttactacttcactctctccaatgccatatccccacattgcatcctctatcttttttttcttcttaatatagtatattataccacacaatttatctactttattgctcatgcgcctgaaattcattagtttttgttaaaacaagtatatatctcacttctttgtacttagttgccctagaagttagaagattcttatttttatagagaaaaccaattacatgtgcgtacatatatatatatatatatatatgtatgcgcgcaacatatacttaatgtatacgtatttaaatatatgatgttaggagtacttatttactattcagcattcatacaccgttgcgggaaaattacaaaat

SEQ ID NO: 60332 - DNA, 1945 bp, Arabidopsis thaliana landsberg
ctcatcacgatggttcgcgtattgaagcatattttcgaaactcgaatcaaaattcaaatggcgggctaaacttcgattcagtctctctctttctctctttggtgatggaacaaattagcaacatcgctggtggagacacaacgaaagagactatggcgtctctgggtctcatctgtgagaaagacattcatgacagcgtctaaatcgattcttcatcgcttctcctttccggagatcgatgaactctttagtggagcgagctcaagccactgctcaaagccaaggtaaaatttaaaattcgcatagtaccactcagttccgtatgacccagatcgtaaatttcacacttttttacggtttaggctctgtctctctgaaattagggttttaaaatttcgacatcagactggtaaaattgagcggttctgtgaaatgtttctttgattttacagtggaactaatgaatttgaaagcggatctgagagaagcagaggatgagctagaaaaagtgttggcaggtattattacctcaaaagcttgaaactttgaacttagtttcttaaatcataagattctccttggtgttattttcatgcttacatacattgttttgctgagtttggatatcttactgtctttgggatgttatatgtttgatgtttagtgaaaacccgtaaagaggcacggcaaatggggataagagattccatttctgcaacacaatctaggattgaagtacttagaagaaatttgcagctacagaagtcaaagaaggatgattctgtgagaattatctcccaacagttgcaaggtatcgttatataattctgaagttcattatacatacaagtttcatgagtcagctacatgctttgggattttgtaaagtgaagatatctataaaaagtactctgcttgtttcaataagagatcacatgaatcactgaagaccaagctaacatatttcttccaataaagccttgtcaacatcgaaggacaacgctggtaaagtcaccgaagacaaagcagatattcatgaagcaatctcttggtataatcatgctctcggttttcacgttgaagctggacatggtaatagagacattttgagtttgtaacaatcttagttctatattactaaaccttagccctaaaagagctttgttgttttaacttctcttacaggagttaaattcacattcaccaacattgatgcaaaaaggccgacccgcgaattttcgttcacagttcactatggaaatgacatctacacacgtgagtatatatatgtcttcttgaagcaagcatcaactacattataatgtttacaaaaaaacctagtaatatgaactgtttacaatcgtttacttatatgatcatcagtattggatagcgatctgcaattggattacatcaacgagatggttcaagaattgaataaaaccaatgaccttttcagatttgttcgtctgatgagggagcagtttctgaaatccactttatctggtaaattgtctcaagcctatccttttataacctctatctccataagtgagaaatcttattttcgatatatataaaagttgaatatgaccaagacttgtgttttattggattttgtcagagctgccaacacattcaggacaactgcaacaggaaacgtctgccatatctgcttcagctccagctatatcattttccactgatacaaacatgtcaactccagaaaacaaaagatctaaggttcaagtgaatcggcgacaaaaaagaggtagcgaatcaccactcctagctccggtatccacatctgccactcgccgttcttctcgctttaaggtactggatactcattgtgttcttaaatgtcacaacaccaaaccaaattcaaaatatttgttaaatactatagtttccaaaagtaggataccagaacctatttgcataa

SEQ ID NO: 60333 - DNA, 551 bp, Arabidopsis thaliana landsberg
gggcaaacttatgggacacaaatgcacgagcctctttccatcggattgatcttaggtgcgttagactcgtacacgtactctttattcctgaaatggtcaccaaactctacctgaagtctttctcacgttggttggagtcaccttgtattacattggaacgcaccttcagatagagtaacccgaaagctagcaatatgtgtcagaagatgtatactccctctacctttaagtgtgagtaataataacattggcctaaatcttaacgttacacgatatattgaaaaatatgcaattatatcacctcaccttgagaaggccttgatgcacacgtcctttaatcctcacaagctcttccaagcaccattttgattgcgtgtacctgctggaaaacacaactatggcaatcccagaatcgccgatcctcttgaaaagactgttgaggtctacacctctatgctcctgattgtctatgaagacgataatctcacttctccgaagtgcatcgacgagatagctgacgaaactgtagcgcaactgacctgcgcggaaat

SEQ ID NO: 60334 - DNA, 450 bp, Arabidopsis thaliana landsberg
ccgtccatgatcaggtaagaaagctggcccgtgccggtgctgttgcgcaaggcgccggtgttgttgaagccggttccctggatcttgaaacgctcgcggtccgggctgctgtcatcattcagattcgtcgcgttgttgcgcagatcgacggtggcgccggccgcgacaaccgtttcgttgcccgcaccgaaggcgccgagggcgcgcgtattgccaacgtataggatgcctccgttgactttgatctggccaaacaacgaggcgtccttgttgatgccggtgtacccatcataaacgttcgtgaagttgttcgcgctgacctgcaggatgccgttgccggtcttggtgaagccgttgttgccgtaaatgatgccggtgatgttgagaccggtattggtcaccgtgctgccggcggggatatcaaaggtgagtccctcaccgcggtgttgt

SEQ ID NO: 60335 - DNA, 1608 bp, Arabidopsis thaliana landsberg
tatatataattttagcgtggatcagggatatgatatcaccatactacgcaggacgcataacttcaattatgtgcaagttgcttgctgtttaatattgtatatattggaaagacaaaatgttttctgtttttatatagtctgatctgaaatcttggaatggtgtaaaaagcgataaatattgattgaggaaccttcccatgaagattggacttatttatatatatatattcaaaggtggcaatctcatccctttatccttcggcttacctaatctttttgtcccatgaattgcatcacattccatggatatattgataatctatcatatttttatttttctcatattttcattctattattttattactttttctgcgattcattcaaaatatatttgttcacaccgtcttggtcacaaataaaaccctcggataaatttgtttttatacaatataactagtttactacataaaaaaatatatgtcatcatgcactcttattaaatgattgaccaaaattatctttgatttcacattaggcatgactcacgaagtttcagtttcctgatattatatttttgttagattgtcgatgtaaatttataaaaagtactatgaatcaacttgagttacgttgttacttgcaacaacaagtacatcaaattaatttaatcgatcgactttatgaaaaataaaagtaataattaatctattacaattggaaagaacgaaatgatagacagtatagcaatatacaacatccgactagctctcgatcttgtctgtattatcgatacgtaaacgagtggtctttctacggtattacctttgcacataaacatttggtttctttatcaatgaatttaacatttctaagaaaattaattatccatttatgaaattgtcatatttacctgcgacagatgttgtattcgaacagatcagtcaaaatgcatcgtccgaaaccaattggaatttataagtattaaataatgataataaaaagccatgactaattaatttatttataactatatatataagaaaagtagacacgagtgtactctcttcgtttgccaccattgcatgaatacatcctaaaagacaattctaatgtgatatttgacttatttgtaactggcctatagaggttttaaaagacaattttttcttatgctaacaacatgcattatgcatatttatatttacaaggtgatgtattaaaaatactaggaccaactaaactatgggaaactatgtagtaatttgtaagctataaattgtatgattttttcacatttttatttgaaaaactgtgtgtttggtggatagttttatgaactatgaagtaaccattttttaagtaaaactatcatttacttttgcttttaccattttgaccgttttcaactcgtaagaactagctagccatacgttattaattttataatttatacccggaaacggtccgctgagaatgagatgattcgcctaatttgggcttagtttgggcttaagctcaaaatttctgcaattaaaacaaacccgtttagaccacccgaaccgccataatcactggtacgaattcagctgaatagagagagtcgag

SEQ ID NO: 60336 - DNA, 1583 bp, Arabidopsis thaliana landsberg
caaaaagggtatatcttcctactgtttgaagagccccctaaggcttggctggtccttgtagggtgtattaaatgttgttgtcaacattgattggttaccgatgtggtagtgtatgttttcttttggtttaggtttgttcttgttcctgaatccatcttctctctcgcttcttttaccttgagcccctcctccactaagtacggcactgcctttgctcgttgtgactttggaggaagcgcatccgataacatcatctatcaatgcttctctcctctttgtactagacactgcacctacaaaacccaaataactcatcaaattttccgtcaaaaagatttaaagtataaccactgtcaaactattttatcaaggatgtgctctcgcattaatctgaaataatcttatcgatgttgtcatacaccatagaagaagaaactatagaaaaatcaattatagaatcaacatctaaagttcagattttgggtacctgaacccttggcctcagcctgatgattagaaggttcattgagcgtgttactggctgttccagagccgccattttctgatgattttgcatcgttgctgggagaactaagcaagatatcttgaagtgcgggatcagaaaaacagctaaacccagtttcttcgaacttacgacacctagcaactgtccgcctaatgaacgccagcgccacttgtcttgtaaccttgttgactttagctgctttacttccacggcatgcctgttttcagagcaatatcatataattaagaaccccatttctcattccacaatcattcatccaaattaattttcgtttattaccattcttttcttgtgggctgtttccacaagttggtccatagcaagatgctcaattttcctgcaggtaaacctcaaatcttagcgaaaataaaggtgtaacttggaagatatgaatctaaaaaagccaaagctaaccttttctcaacatctttccccttctggatggtaatgataagcttctccagctttttcttcttgtttaggatctagtattggtcagaaatggaatatgagaaaggttactatgcgtcaaagacgaaagtttaatgacgatctgacaaaaagtcttcctcgtaaagcatgaaatatttgttttgcgtttacctcctgataaatgccttccttcaactccataacatcagtgctcatagtttcttcagccagatcaggctgtgataaaaataaaaactggaaatcagtgaccaagctagagtaacaagtttttttttattcagctcaagttctttaaagattaaatgactggatgcaaaacctaccattgtctcaggaaacacaccaatgctctgtagttccagaagaagtcgctcatccaaagacataagctgataccgggtgggcagaaaccgggaagttgggaatgggcacttccctagcctgcaattgacccacactatttgaatatgtctcattaccgagtgcaacgcctgaagggaaaaaacatcatcccaatccaccggtcattgtatgcacagatatgacatgcccccttttttgaaaggtagaaacaacactccta

SEQ ID NO: 60337 - DNA, 1040 bp, Arabidopsis thaliana landsberg
gattaatattggataatcactagtagactggtagtattaaaatatttagtatgtcaaatccctatcttctacagttctactcacgtccgtacagactacagacactatgctataattttgtgttgaattctacaaagtacaaattcgtctttcggtgccaataacaaataaacataatctcaaattacatttgtctaaattgtattttattcggtataaatgtaaggctatgttgggaatcatatgatacatctagattaagacttcttattttattattatttttgtatatataaaatataatatccaaccataaagtttttttaccgatcgatgataatgtgaatccaaatattttaacaggatgataaataattgatgtggctcttctaaccgcagcaattctggcgtgactctctccgcagcatttatttttctctctataaattaaaaacattacttactctttctctcttccacttaactcatatcaaccttcgccggaaataatggctttcccgcgatttctttctctcctcgccgtcgtcactctctctcttttcctcaccaccactgatgcttcctctcgctctctatccactccacctaaaacgaacgtactcgacgtcgtttcatctctccagcaaacacaaactatcctctcactcgacccgactcgttcctcactcaccaccaccaaacccgagtccctatccgacccggttttcttcaattcatcttcaccactatctctagagcttcactctcgagacactttcgtcgcgtcacagcacaaagactacaaaagcttaacactcagtcgactcgagcgcgactcatcccgagtcgccggaatcatcgcgaagatccgtttcgccgtcgaaggagtcgatagatccgatctcaaacccgtttacaacgaagatacacgataccaaaccgaggatctaacgacacctgttgtctccggagcctctcaaggaagcggcgagtatttctcaagaatcggtgtcggaactccggcgcaacacatgtacttg

SEQ ID NO: 60338 - DNA, 151 bp, Arabidopsis thaliana landsberg
tatagaaaaaacaaaaaaaaaaaaaaaaaaaacaaaaaaaaaaaaaaaaaacaaaaaaagaaaaaaacaaaacaacacatacaacaacaaaacaaaacaacaacaacaaaagaacagataaaaaaaaaacatcagatatagaaaaataaga

SEQ ID NO: 60339 - DNA, 465 bp, Arabidopsis thaliana landsberg
  unsure (1)..(465): unsure at all n locations
taacgggtaaaaattgatctgaattctagagtattcatcaaattaaatcttatcgaaatattgttgtcgatctcaattttgttctatccttgattacatcttttagaccctaattttataacattaaaatatctgccttttgcttttgtaaaaaagagtaaaagtgagaaagaaagaaacggaataaaaatcaaacgttgctttttcttatctttatctctatctacacgttgggatattctccttgggataatcaaannnnnnnnnnnnnnnnnnnnnnnnnnnnnnnnnnnnnnnnnnnnnnnnnnnnnnnnnnnnnnnnnnnnnnnnnnnnnnnnnnnnnnnnnnnnnnnnnnngcttacatgcgctcgcccttggcgcgtgtctttctcctccctcctctgccagcaccggcctcgccctggctatggtccgaccaacacctctgcgttgtctctgtgtct

SEQ ID NO: 60340 - DNA, 187 bp, Arabidopsis thaliana landsberg
gaaagaaaagagagaagaacaaaaaccgccacgggttccttatcaagagcccaaaacggacaggaccgggggggaggaaggagcgaaccagccggaaccccaccaaccaccaagaggactagggacacgaccgcccaaacaccacccggactcaaaggagaaaacccgggagccggagccccgagaa

SEQ ID NO: 60341 - DNA, 341 bp, Arabidopsis thaliana landsberg
tctcactgatggctcgggcccccatggatgggggcgaacttcgaccatccctacactgcggcggacctttctctcggaactctcaggcagcgccgtagctgcataagacacttccgttcagcggatagttacaacgctcttcacagacatgtctattgtacgcgcacctgtatacgggctagacagtgagatcgttacgcctttcgtgcggttcgaaacatacccgacaaggaatttcgctaccttaggaccgctatagcaccggacgccgttcaccggagcataagagccggctcccctgtaatcatggatccaacttcctgaaatagagccatctgggc

SEQ ID NO: 60342 - DNA, 257 bp, Arabidopsis thaliana landsberg
ttttatttcttgagacaaattcacattaactccgcgatacggtggttaattcaagagaattcgtcacaaaaactttcatccacatattggcgactatcactatcaacccctatcaccgcctacatgccctatacccccagtcattaccaataacacttgcccctcccgctttaccgaagatgctggcacgggataaacaaagactcggtactaaaatcctgcgatgatcgctcacaccactaaagagctctacacgc

SEQ ID NO: 60343 - DNA, 482 bp, Arabidopsis thaliana landsberg
  unsure (1)..(482): unsure at all n locations
atattttcacaataattgtgcgccgtcatgtgcgttagaatgcacatcgtttactacaatcggtgtgtttatttcattttagtcgttaaattatcaaatatataaactaaaactctattttaatttctatattaaataatttatatgataaaatataataaatagagagacgaaaacatagttcttaaaaatcaaacaccaccattactaatggtacaattgtcgacctaccctacctctccactcncaggcggtggtttcctgtcaccgggccggcccgaccgacctcgatcgcgggatcgttttcccacatgtgcgtatttaatctgtcgtatcttctcagcggtggggggcattttaacgcgcgaaagcgaggctgccggtgtggatggacggtgagcgtccccgccacgccgcggccgaggtggacgacggcgaaatcgcaacgggttcaccagtgacgcggcggcattgctgtccgc

SEQ ID NO: 60344 - DNA, 518 bp, Arabidopsis thaliana landsberg
  unsure (1)..(518): unsure at all n locations
tcatatttgtattttagttattaattacaattttttaaaaaataaaattttgaccaaaaatataaacatattgttttttaaataaatacctaaacttttcattgaagaatagtcctaggcgttaagattcggttcggttccactcagttttgattcttttcagttgtagattttatgatctattagaatattttaatattttagttcggttttggttcagttcaggttttttggttttaaattttggtattgattcggtattttgatttgaatagttttagatattttggttatttttggatattttcatacatatatattcggttatttttaagtattttttcgcttttatatatttttgcatatttttgattatttcatctataaataactaatattttcgatatacaattgtcttttcaaatattattaaggttcgtgaataatatcattcagctctttttgctaatttattataggttgataaaannaacttacaataagaaaaaaaaattctt

SEQ ID NO: 60345 - DNA, 614 bp, Arabidopsis thaliana landsberg
  unsure (1)..(614): unsure at all n locations
cgaaaaaaagacaaaggtatggagcaaacaacaactcaagataatacatagaaacaaggataagtcaaactcagagtaaaattattacaaaacctagatggaggtaagacttgagagtaataatcataaaagtatagtgagaacgaaaaaaggaaattaagaagagaaaaaataagttagtttcttgaaccatatctgaagatatcatcgatgaaaaattgctgattcgttgcctcgtcctcactctagtttttcaatccaaatttactttgcagctatgttcatgtagtttccgttagcgctttgagaatcaatggtagttttcctagttttggacacttctctacatgattttttctcaggtttggaaaagggagaggattccagtagacactcattaattcgttcaactcctgaaaaccagatagtttagtttttaaagggtataaatttttgatgatacacattcattaggacaagaactttcgctttcttaattattgnttctatctgcggagtcttcactacagtagatggtgagggtttgagcaaaaaccagccatgtcaaaaccttcaaactctacattctcttaagtcacaatagagagattatg

SEQ ID NO: 60346 - DNA, 1261 bp, Arabidopsis thaliana landsberg
ccacatgtgcccaaacatatatatacacatattttccaatatatatgtatggtttgttcactaataatctatattttttgttactaattccaagaacattaaatgtggtctaacattgacaattggtttatgtaactctaatcctaattaagaagtagtgagttaaaacttaaatctaatgtttttgccttttggagatgtgatagaatagttgaaaacccgacatttgtttgatatgaaacttgggacatgtctatggtatcaaattcattggatgatgaacacatttgacttttgtaaaatttagaaaattacttctatatctaatttccgcattatgggtggttgtcttttttttagtagatatatttaggtgagaaattagacagtttttgcattagagttgaaaaaaagttactaactaatatctcaaattcaaatttaaattttaaactttttagttaatgggactgagctacaatttaaaattgattatggaagaaaatctgaaaaggctctaacttttcccctcaaaacgggaagacaaatttttgtcttctaatccaaagttcatcaaaataataacccaaactaaaccgctaaccaatataaatcaaaccagaccaatattcacaattttatttaacttatacgcttttacaaataattaaccaaattagtaatgtgaatgaatgtaactatttttccattatcaggaatttattcattaagaagtggaaaaataaagataattaggataataaatcgtcaaaccggaaccgaaatctcggtttgctccggtcttcttaaaccgtaacgtcgtttacaaaaatttgatctttactttaagttttgtgccttttacttcatctctcatctcttcttctgctttgagaagaaggaacaataaatgcacttgaagtcacactctctctctctctccaagtcgctctctttcgaatccaccattgctgaaacttgatccttctctgtaagtcttcaaatctccagagtgggttttgcttccgggaaaagtactactcgctgaatcatcttccaagattcttcattttgttactcgatcgtttgatccgatttcctgtcatcggtattaagagaaggatctagatatagcctggtactaaagtagctagatattgaagtagcttcagcaatgtatttacattttgttcactgattttgttttgtttttgctgattcatgaaatggagtcaatttgagtaagaaagttgctaaattt

SEQ ID NO: 60347 - DNA, 645 bp, Arabidopsis thaliana landsberg
  unsure (1)..(645): unsure at all n locations
acttctagccacgtcacattcaggaaaatgggccacgggaaccaaatgttaaaacattaatatcgctgcaaaagtttccaaaacttgtaaatcggccatgattcagatctgcataacaatggcctatcaaattattgagccgcctctcatgacgcaggccatctagttgttactatcacattcaacacgtattggtatttcaattaggcgggacctaccatttcacagtgagcgttacttcctcctctccatcttcggtaattgaatgacacttatagttatagcttattattcgtctattccttgtggcaaaagtcaactatcagtatacatcatattaattcagcttcatcaacaatgacatttttatctatcacttataaaaggaaaaaacaaacagatatagatatgatttgccctttttcttttcttggtcgcattcgatcatcttaactcaacctcacgatctgcgatatactaaaaacaatatattgcttgactatttgcttatttcatttatctagctgcaaaaaaagtattgncgacaaacccatacactccacagtccacacattatccaacggatcaatgtatgtaacagatcataataaataatcccaaagaatctatttaatcactaagcat

SEQ ID NO: 60348 - DNA, 598 bp, Arabidopsis thaliana landsberg
atattacttttgtctttattgactgagcaagacacaacagcaactacgtcaagaaggagaagaagaacataatgatgggaagatgggaggaaggtcagcttccggattggaagaactcataatgggctgcacttcttctaccactcatcatgatgtaaaagatgtaagttattaatcccttttttgactcttaatttcatggaaaacccctctttttaaccatcatgagatattttttattcttttcaaaaaataatttacgagtatctatatgactatatgagacatatatttatcaccaaaaacaaatgtcatgcattaagtaagatgttgcttggtatcacgcacaagagaaagagacttaaatcgcgattataaataaatgttttaagataacaacgtagatttcatttgaatgaaagtgaagaatatttttaagaaaaacttttccttttaaaattattttttctttttcagttttgcatgggaaggatacttaagactacatatattccttctgcgtttattctttacttaattggatagagttaaaacagtgttaagtaaacaaaacccagaaagataaagaaagagagat

SEQ ID NO: 60349 - DNA, 344 bp, Arabidopsis thaliana landsberg
tatactgaagcaagctctattgtttagaatcgtttttatacatatgtgaaagagagcgacatgtacgatctttcaaaactgactctatgcccatgtattataggtgttacagaaatgtatggaatcctgtgattagctaaacaaactagtggatcggcacgaattgaacaatgcaagagtcgccaagactaccctttacaccactttgcggaaaatgagctgacatgaatatgcgacgatacctgagactcgattgtctaacgcgatacagactgtatttacaaaaaagcatgttcttttttaccaccgaacgaaaaaaatgcagtgctgtgaatgaacaagat

SEQ ID NO: 60350 - DNA, 604 bp, Arabidopsis thaliana landsberg
tagtggtatatataaaactaaatattaaatacgtatatatgtgtgtgaaatgtcatgataggttaataaccatttaaacgaacttatgaatagtaacaagacgaacttatgaaatgaacttgtgaaatgtcatgagaggttaataaccatttaaacgaacttatgaatagtaacaagacatgaaaagataagaattaatgtacactttatcaccaaaaaaaggaagataagattgtacgaaatcggacgtaataatgtaaggacatggaaatggcatgaccctcgggtgcacgaggcagttccacttcctgacgactctccattttacttggtttacttttatcttatctcttttcctttttaccttgcgaatcaaattgacctttcaacaaattcaattcctaagtgtttttgtacaatatttgtgaattataatgtgtagtgtatgtctatgcttgtttgattttctaacgcttgttggatataagaaacaattatcttgaaatctctacagtacttatcacatccaaacacactatataatatattggacaagcgatacactgtctttatacaaacaaaccaatcacaaacaaatagaaaa

SEQ ID NO: 60351 - DNA, 324 bp, Arabidopsis thaliana landsberg
tttaaaagattctaaaaaatttacattggttttttaaagggtttaaaagtgcttaaacctccataagggatttaaaaagatttacacgagaggtttaaagggcttaatccagccctaaacgcacgccacggtctctctaatcgactttaaccatttctttacaatcatgctccccctaacacgtcattgtcctcctatcccatttttttccctccacctattcaatcccttttggaggaatcctgaaccattacttgctagttcttagcccttcccactttcttagcttgagaactattcccccctttctatttccccaagcat

SEQ ID NO: 60352 - DNA, 1220 bp, Arabidopsis thaliana landsberg
catttattcttctattattgtatacacatcaccgacctaggaaaaacataacataatcttttccttttttttgtattattggtgtactaaaccaaaacaagtaatataagcgtctacacaaaccgtacattataatgtcgtagtgagttgctgaaagaaaaagagaatctcttaaaaatgatctcagatttcaacttggcaaaaaaaattgacttcaaaaactttgttcatgacttttccattttcttcattttcacctacaaacccaccatatgagcacataaatcccataaagtatactcaaatctcattcaaattatatgaggtaagaacacacattcttgatcatgatatcgtacaattctaataaacataaactaaataagtgaaagctaagaaggcacttacaaattcaaaagtgaccaaaaacctaccactttttatgaccggttttatgctacattggctcacaaaacatgtgagcttattcctcgagctaaggcactggcttttgacctcgatgaataggtggtgaatacgtctgtgacccactggattatcttatttcgacaatatgattgtttatctaatttttcgaatttttcttagagaaaattataagtatttaagaatttagtgggtcgctgccatcagagatagtggtaacatcttatgataagaaaacctaataatcctgtttaattataatgtactagttaggtaaagcaggcaatagataaaagattaattcgtaaagtaatcaattggaatgactttgtgtgtgtgtatttttttcaagcttaaacaagacatgttgagacgtactgtataagttattgaacttaccaaaagttactaaaaaggttatatccttattttgagattccattactacttttggttttaggtatcatttttgtccaacactaactaactccccctaaatcacgtgttttgtactaattaatctccattatctataatttctctacttatatatactaactctatcctaaggttaggaaaccatagagccaaacaagccaatacctctttttcatcgataaaccaagatggaaattccgaggcaagaaattcatatcgaaatcgataactcaataccgagtagtaaagagtttaaaactggcctagctgatgctaaacccgttgtcttgatgtccgctttgcgtagtctccacgcgggctatttcaggatagcc

SEQ ID NO: 60353 - DNA, 1607 bp, Arabidopsis thaliana landsberg
aatatgtcggcccatctaaagcaagatttttgtattcggcttgtcatgatcacgttaattctttactctcacatccatgtcccatatactggttagaccttgattgatccctaaagccgatcaatggtcgaggccaggtagtgtgatctagcccaagtcatttcgattgatgcgtgacgtgtctgcaaaaatctgactcaaaatctgggtgtcaagggtttgtccgaaagaaagtttaaccttattcaatcaccctgcatgtttgattatatggaaactgaccgttcttactaatttattccaaattactacgttttttggtttccaggaaatggagatagtcgaataatgaacggtctagctatagtgactagggtctatatatgcccggtagataaatggttatagtatgcatgattagaagatttgtatgagctagtaagcaaatttggaactaccggatctagtcatccacgcgttaagcgaaagtaattcctggatggaaaatcattttttcatcaaatgttaattacttcatatctagacataatactctaatgatacactcatatacttgtttaattagatactacataatattacattttctttattattttagaggttgaaacatcaaactaatccactcaacatatatgtgcatgtataatcacacgttgagttgggaacatgtgaatttagagacagttgtgtgttaaactttcaaaccaaaaggaaaatatattgttttatgatcaaaaaagaaaaaaagaatttagtgactgttgtacaaatataaatcttaaatatcacaaacgcatctcatcaagttttcttcagtcttctcgaccaaaaaaaaaagtaaaatgttgtagtggtcgaaaattaagattcgtacttactataaaagttgccctaattcgcgatgttttttcaaaattacacgagaactgcatacttccaccaataggtagtagcatataagagaataaagattaccaacttgtcttatagacataattaatcattaattaatcattgcccataactttgctttaaaattcaaagatgatgagacttatactgactcatgcatgcatctttccaaataacagtttttcgtgagttatattcttgcataaaataattcatataagaataacttacgaaaattatgaaaagtatgtctttaatgactgatttgaaagtacatataagtgggaacatactttacttagcttaaataaaactgagttagtcaaatcacacgttaatacaaacatggtttcgcttaagaaaatgaaaataattcaacaatgccaattgatatcgagttgtttttctttgatgacacgcattgatacaaagctgtaagataaataaagtaatactaattgaaatgttggaaaacaatattattgttatgaaaaacagcttgtggctcgaatacatctaacgtgacaatgcctaataattgaggcattcaaaactctaaagcaacttgcctaatgggaatagtttttgacatccatcccacatttttggcccaattattacaaatttacaatttttatacctcaacaaaatgcattttagttatgattaaa

SEQ ID NO: 60354 - DNA, 471 bp, Arabidopsis thaliana landsberg
gagatttccggtcgtggagcctaaggccaagtcgcggccctcgccatcgacatcgagggcatggcgatagaccaggtcgaaacagggcttgggcggcagggcggcggtgatccgtcggaagctcttgccgccatcctcggtcttcagcacgcagaaatcctgatcgctcgggatccgcatctcgtccttctgcgccggaacgaaccaggcggtctggggatccttgggatgcgccgcgacggcgaagccgaaggtttccgagatcgtaccccactcgccggcgccgtcggtcgagcggaactgcgcattgtgatgctggatccacaacgtctccggatgcgcccggcagcgcacgatccgatgcggatcctgcgtgttgggattctcgcgctcggccggcggcatataggcggcccacatgcccttcgaggcgttgctccagctcgcgccggcatcgctcgtcgccaggcg

SEQ ID NO: 60355 - DNA, 368 bp, Arabidopsis thaliana landsberg
tagattaacgagtgggaattagaattcttctcccagtgtcaagaagagatggagatcgtcatccaaagaacccacaaattgtctgaattaatttctccatatataataaataattttttagaacatagaattttgaatcgggccgcatcccctgccttacttaagatgtattctcgattttgcttgttttcatttttcttgtcaaagcttgtttgcgtctagataattcctttgaaatatataacatgtaagaatatgatgaaaagagctaaactgtaattagtaccaaatctaactcacaaatcaccttagaatcgaaacgaataaccaaaatcattcatacccttactttttgtcatgattagttt

SEQ ID NO: 60356 - DNA, 516 bp, Arabidopsis thaliana landsberg
gcccctgtaccctaaaagaaagaaggtaaacatacattcagaagtcaaccatgcaaaaaacacacttcaggcgagatggaaattatattgtagcagaggacctgaagaacattgcgaaatatcatgttcagatcatttccgatgaccctcgagacttgctgacagtctgagccaagtctgcttgttaagtcaccaacagtttgagagtcgaaaaatgatatatcctgatgcaaaatccagccaagttaacgaaagtagctaaaaagatattaaaggtaaacatgagctaccaagattcaaaacagctagaaactttcaggacctggaagagaagagtggagtatagtgtttccctcattcgtttcacctacagagtagggtgagatcccatcatatcatgttctgagaaggtaagactactgagtagatttaagcagaaaataaaaaggaactcacaagtatcatgttagcaatcccaaagaagcatcctcgtatgccactgaaattatgagttga

SEQ ID NO: 60357 - DNA, 565 bp, Arabidopsis thaliana landsberg
cactctgtctcaaacttatatccgccaatctctgaagccagtgattgtacctttccaccacagaagggaagaaaatccatgtcaaaaagtaacttggctgccaaaaatagtcttgaaacagatagggccgatattgcaaaattttcacaagataaataaagaaaaaagagactgtcaatggttttcatggaaacagatcgcaccttttaaactcttgcttctctgtcccatatacacgaacggttctcatcaaagagtatgtctcttgagcgaccttgaagatcacagagcagttattaacgaaagaattcattgcatataagacaagttacaataagcgtttttgagcaatctacttcatttgcagaagctgtgatctcctgaattagcttcgctgtcttcttttggtacctacaacatgaccagatggcttaagtatcagtttcagctgccaggtgtataatcaattatatcttcacagattagtattcttaataaaagtgagacaagttttggtagaatctcacatcccataaacgaacataaccgcagccaaaatacagca

SEQ ID NO: 60358 - DNA, 382 bp, Arabidopsis thaliana landsberg
atgagttacaaagtatggtagcatatgtcttttgtttggcgttataatcttcttgtgtccttcataagtcctgtgcccctgaaagtttaattttatggcatctcttagtaaccaaccttaagaatgtgtaaatgcacaccagaggttgacctttgatacaactgagacctaagaatgtgtacctgaattgcgtggcccatgttccctccatgagatgccataaacacatcactctccttacacactatatagtcgattgcagccattatcgaagctcgttttgcgaaaggtttgagttcaagaggcaacgcaatatcgtacttgttgtagagatgtgggaatttacttgtttacggtttcaaagcttgctttccaccgagcg

SEQ ID NO: 60359 - DNA, 444 bp, Arabidopsis thaliana landsberg
ctagcgccgggcgggtggcgtacacgttcgggctcggctaccgacccgtcgagtacgacctctacggccgctcctggccggaccgcggcgctgaggtggaggagcgcatcacggccgtgctcgacgcctgggcctccggccgcatcacgcccgcgccgtactcccggccgcacccgttcctcttctacggcggcggctcgccggcggccgcgcgccgggccggccggctggggctcaacttccagccccagcacggcggcggcgagctcaaggagatctacgaggcggcctgccgggaggccgggcgcgagcccggcttcgtgctgcaggcacccgacggcggcccggcgaacgtgttctgcgccgagcgcccggaggagttctgggagcgcgacggcgaccacctgctggcggacgcgatcgcctaccaggagtggcacggcg

SEQ ID NO: 60360 - DNA, 950 bp, Arabidopsis thaliana landsberg
cataaataaaaacttataattaatgtgctatgatttgtggcctggagggatatttgcccagaaattcgctggaaaaagaaaacgatgttccaggtaaaccttgagagttaaaagtcatttcttaataagctacaacgtcaaacacgagttttgatcaaataaacttccaagtagtctccatcttctgactttgatatgcacaccaagtggggtttggtgtcttcgtctactagtattttggtgtgtccttccaaaaacacacgtatctaccataaatgtcaaattagcgaaatgaaaaaacaacattttataaatgcatccgtacgcagaaacaagaggccatagttaagagagctatccatggaatggatctttaagcaagttacacaaaatgatgaatgtggtatatgagttatgcacacatacagtattaaggaaaaaagacagcttgtcaaagccgtttaaggctcaacaacagcagtattgtgtccgtccctcccatttttttctctgttttcgttcatacatacatatatgcatctcatctaaaacaaaccagaaattttcacacgagtcttgtcttcggattagaactttctcctcctgtcaggaaagacatgtgtaatgtttaaaaaacactgcaacaacgagtggtcttttgatgaaaccataagctgaaaacccgtaaaaacagattcacgaactgaaggaacaaccctaagcaattgctcaattaacgacagctttgctttaagcaaaaatctttgacgcaaacaattggaatccatgatttgattaatctgcagtcatactaaacttgatgaattgaatcaaaaagaaaataagaagaggtgtttccttctttctcagatcaacagactttcaccagctcataattataaattgcttgctcaaaaccatgtctttctttaaccctggaatcttcccag

SEQ ID NO: 60361 - DNA, 819 bp, Arabidopsis thaliana landsberg
catcaaacaagatcatggtttcctatagttgacatttccaatgatttgttcattagtcatgttttattgaaaacaacacaatttaaaaacagagagatgtgtgaaaagttgcaatactttgatagtgttggcttcttcagagatatctgcatcatctccgcgaagactttgcaatgaagctctacattctttttcatgtccccattttccctatacaccattgtaaaccatattgagttttacttcacactttttttaaaaaagatcaaaacttaaaaagggctaaacgtaccagtagtctaggggactctggaataaagaacaaagtcacaacttgcaacgcacatggaatgagacctgagagacagaaaccgataaacttaaatcacttcttgatgaaaatttcataactaacctgctagaaagaaaaaaaggattaggaagaagcttaccgattaaggccaagttacgccaatgaacaaaatttccaatgacgtagaataaagacaatccacaactctgcatcagctgtaacgacatttgaacaaattttaagaacattagtataatatatatcttttttattttatggttataagaatttattctctaattattctttagtttacctgattagcaaatacaaacgctcctcgaacatgttttggtgttatttctgcaatgtaaactggtatctgaaggcaacagagttaacacaaagtcagtaaaaataaattagtatattatacaccaaattaatggaaaaaaagaaagtaaagaattattaccacatagcttaataaaccaactgcaaatcct

SEQ ID NO: 60362 - DNA, 1065 bp, Arabidopsis thaliana landsberg
ccttattctgaagatctgtcgactttgaagaatccaaggccttgtgtaagaattcaaggagcacagatgaaatttctgcggagaaagaagggtataactcaacaaggctgcttacaatcttccttatccttttattagaacctgaaaatcacaaaaataaccttatatgaccttacgaattaacagatatgcgaagttaaacacgaaaatgcaacccaaaattatttccatctctaaagctggaaaaataatctagtgcagccaaaaccaatgtatcatgtcattataaacttcatcgaggtaaacaagcaagacaccgatgggatcattcccatttttttgcttggtgttactacttactagcccttccccagcacaagatccaagatacaaaagaagtattacatttttctttgaccaaaggggagtcaaattgaggattacgcttcagctgcaaggagaaagcaagtttcctgagtttggatttgacttctcttctgatgctagctgttccatctctctttaaggggatttgatacttttgttgctcccaataatacgatttcaaccattcaagagcctacaacgaccaacgaatgtatgcaagcaagttaaaatcttctgtattgtccaagaacacaccacataaaacatctttttaaaaagactctttggatccttcaaaaaagatcttaagagcaaacgttttgaataacagggtagcagaccttcatgaactatgatacttgaaataaggaaatctagaatgccaaacagaattaagaaggaaaacagtgtacctcatctgcagcatcccgaagcaccgagagtgcagggagctcacggtgagaaccctctacaaatagaacaatcaaatcaatcatcagcatcatccaggaatcgaaaagtcactgtaagcaaaaaaggaaaggtccccaaagattcttaccatgacgaagatcgattaatttacgtgggataccgattgctctagcagcatccgcaattgaaacgtcttctctcctccttgtcttttctatgacacagttcacaagcgtacataaa

SEQ ID NO: 60363 - DNA, 1056 bp, Arabidopsis thaliana landsberg
acttacgggcgttgatctcaacactccaatatgtaatttgtttaccccatatgtccacagctcttaagtcttacctctttaatggattagatgataagtcttaaacaaatgttctttgcagatacttggagcagagagtggatggaaaccgattcctctcactgatcttgtctcaagcgcttctgtgagaaaagcttaccgcaaggcaactctttatgttcatcccgacaagcttcaacaacgtggcgcatccacacagcagaagtacatttgtgagaaagtttttgaccttctcaaggtttgtctccataaatcctcgatagaaaattaattccatttgattgagttacctccatctgcaaatcagtcatttaccggctttttctgattctccaggaagcatggaacaaatttggtgctgacgaacgataagtaagatggtgtaaaactttggatttttctttaccctattatcagaagtcaccctgcaaatcagaacctagcagcctaagaacctaagttaacaagtacaggatcaagctatggtatgggatgaagacagatctagagatgtaataactagttataaatatttataactatgtgtcatatatagaaaagtagctcattcatattcccagctgaatcagccacaaatcttattcatcatacggtttctcaaactaaggttaataaatagtacattattaagtcaatgtggtacacgaaccaaccgcatgcgagagctaagataacaaagaggtttaaaagccgagcaagtgaagcattatagcattttgagcatgcatgcgattctccgcctgtggaaagacaatggaataaggagcctctacgactccattggtcacctcaactcctctctctgcaggcaaacaatgcatgaaataggctttttgacccgccaacttcatcagagcttcatccacctgcaattgaacataatatgtaagcgtgaagcagtgtaatttagtaagagtaccgagcattgcaccaaaactaagccagattaaacttatgtttacctggaatccttgg

SEQ ID NO: 60364 - DNA, 1265 bp, Arabidopsis thaliana landsberg
ctgggacaaatccaagctccaatatttaaacccaatcaataaaactcaaatctgtgttaaacaaccttaaacagctttaaaacactaaagatcaggatactgatccagattcccaattcataaatcaaatcataaacttatcaagagatgtataaaacacactcacataatcatcaattcacagcaaaaaaaaaaatcaaccatgaacctgaatccaataaagtaagattgatactagacatcacaagttctgattcgcaatcacatagaaaaccaaatttattccgagaaaatcagaagaaagccacacgaatccatgatcctacacaattacaatatcatagaagaaacgagatcactagtttgatgattttcaaacagatctgagattgcaaacaatcgtcaaaaattctccatgggatgatcttagatcgaacataaaattacggagagaaaagaagaaaattctcaccttcctaacccaaagagactcatggcgacaaaaagcaagcgagattcgaaaaagcttttttcctcaggtggaaatgagaaagagagtctctgaaagacgggaaaaagtgagagagtatttatatgatgaagacgaaagactcgttgattctctttctctctatctctctcttcttattagctgtcatatttttaaaaaaccccttaactttcagaatgtttggtattttaccttaagtttcttaaataatcaattattagctggaaaattcaagtgacttgactacacacacaatagtgaaaaactggaatttgtcttcatgggcaagcaaaaatacaaagaaaaaaaaaacagttgctttctgtctgaaatgtttttatagaacttaggacaaatttcaaagccggtggttattagatatatcaaaaatttctactattgtgataaaatagaaaaaacatcaaaacataactaataataaaatttgtaaataaaatattacataattattcaaagacaaagaaatttaatagtgaaatgtttattacttcattttagctcatcaccaaaaattgcatcaaataattgacaaactactaaaagtgattttgaattcttaaatcttccaaattgataatattattacaatatttgactttctccagtttggattgacaacatgaaatcaaataaggattttgagaattaacgttaatatataaagggtttgataattttattttgttgttgtttatgtgatatctttttttaacttgccaccgcaaggaacttt

SEQ ID NO: 60365 - DNA, 1652 bp, Arabidopsis thaliana landsberg
cattgtgagctttgaactaagtattcaattttttggacaatccgaaaaacacaacagtataactacaaatggattagtcccatttgggcgtagtctcattcgtttggacgagaaacacaacgaaaaacctagccaattttgttgttctcatgtatgggcttaattggggactaatccatatgtggttcccttgtttccatagttcataattttattcgtttttcgtcttaagttttcccttctttaggtttagtttccggagatatttttgttttccgccggctttgtgtttcaaattcgtattccaccttttgtatttcacaacctataatacaatggaaaaattctggatgaaaaaaagaaaaagaacacagtatatagaaaaatctgaatcacagtactaacatcattgattttctgctacaaaaacgagtgtacactgattcttaaaatagatacgggctataacataacaaaaagaaaaagtgggggatggcttttgcaataatctcgaaagagtttctcactcacatcacacccttggtttataaataaaactcattgatcttgacggtgaaaatatcgccacctgttaatttataaaaaggtttcagtacacttagctacactggatccaagtctagtgctaaactcaaacctcgtggttttagaccaaaatctcttcttcttcgtttccttcttcctcatcatatctttcatcttctccaccagaatttgttttaggctctccttcttctgtttctttttctcccaaagagacaattagatatggagaaccttaccctagtttcttgctcagcttcttctccaaagctgttaattggatgcaatttcacttcctcgctgaaaaaccctactgggttttctcgtcggactcctaatattgtcctccggtgttccaaaatatctgcctctgctcaatctcaatctccctcttcgcgtccggagaacactggagaaatcggttagtttgcaaattccactcgacactctattatagcaaatgccaaaattttccggaaaaatttcccagtttattacttttatctatctaattgaaactcaaattgcgaacccatttcgactggtttaatatgagcttatgaattgctatatctctttaaaaaatccacactttgtgaatttgcaatttgaattcttgtagaaaccattcattgttagaattgtttactttaagtttatgttcgatttgcagtggttgtgaaacagagaagcaaagcttttgcaagtatattttcttcgagtcgggatcaacagacaacttctgttgcttcccctagtgtgcctgtgccaccaccatcttcatcaaccatgtaattttcctggttttggacaatgtgcttagtttgtatgtcgtttgattcttggttattaaattgtgttttttcttttttcttgtagaggatcaccacttttctggattggtgttggtgttggtctatcagctttgttctcatatgtgagtatcaagattccttcctaatttttttttcctctataaatattctttcttgcttcaatattgaataataaatgcttgaccttttttcttttctgatggcattgcaggtaacttcaaattaaaggtacagatcttggccctttgttta

SEQ ID NO: 60366 - DNA, 500 bp, Arabidopsis thaliana landsberg
gtcgcaacaaccctcgtctcaacgcggtctgtgctcgcatcgtcgaccaactcgacgtgcattatcgcggacccgaccaggatcccctcccagaacccggccgccccggagagcacgcgcagcacgaccctccagcttgccgccctcgaccagagccgcagcgacagcgcgcggcgtcaccacgacgaagacacccagcggctctcgctctcgtccgcgccggccaggtaggaccttggggttagaccgggatgctgaaccgcgaccaacagcagttgctcggggccctaggcaccgggatggcgtccgacgcactccttgaccgtctccgccgccgcgggacgctcgaaggcggacgctcatcaagccgggcgggctgctggatcaactacaaccgcgatgcggtccgccttgaagaccactccgagatctacgtaactttgcgagcggtcggtgcggagagccccacgggcggcgagcagccctggcggtgaatgaag

SEQ ID NO: 60367 - DNA, 1078 bp, Arabidopsis thaliana landsberg
catcgctgatgctctcgagctcttcttttggacgaatatattcttttggaatcgatatgattccgctttttgctagactctcaactctttcaaccgcaaccatcttctttagtcttctgtttaaagctaaaacagagcagaaaacagagtaagaagtaaataaacttaaaaacaggggaaaaaacagagtaataaaaaaaatggatttgttttgtttttcttcttacactcttttttgtaattggttgcaagtaaatgaaatgtgcaaagactctttcttatatagcaaagtttttactatacttttagttagaagagtttgttaccgaactaagagacattgtagagctaccggtggttagtgctattgttgtgaggtaagtgcgtgactcacttcacggtcaacgggagaggatggttgggttgactgattggtcaaaaagattactactatatgggcttgggtctagactcccggaaaaggcccaatagaattaaacccataatcgctatcaacgtgttcttcgtcgtttgtgtgcacacgtgctttaagcgtgtctccacgtgttcacctctactagttcttctactaaccacattttctttttgtagtttggaaatcaattactaaaaaaacaatttgactggttttcaatttcaaatagacaattgtatgtggatcaataattcttttggaaaactaaatcatttatcttgtttgttttttaaaatttggaactcattttttttttatatggtttgtactaaagtatattatcagctgaattcaactacacatgctacatgtcatatatttttaaaaaatcaccatgtttcgaaaaaaaaatcttcttactcatctcacagtattttttttattgtataatcaaagcctaaaattatgtcttttctctattttaagtttttgttttgtttaagaaagccggatatttaatgctaacgtggatattctgattatgaggatgagaggaaggaaaaaataagagaaatctgcctaggaatttatctccacacttctcaaatctccaaatttcttccctccagatttatgattaat

SEQ ID NO: 60368 - DNA, 183 bp, Arabidopsis thaliana landsberg
atagaatatagaagaaacataaaaaaaaaaaaaaaaaaataaataaaaaaaaaaataaaaaaaaaaaaaaaaaaaattaaaaataaataaaatgaaaaaaaaaaaaaacattaatcagtatcaataaatcctttaaaaaaactaacgtcaaaccggaaggcgaaaataaactaataccccaaa

SEQ ID NO: 60369 - DNA, 173 bp, Arabidopsis thaliana landsberg
cggcacaaaaggcatacccggggctacgggttgtaagacaggagtggtaatgagcccgcaaaacctatcccgtaccacgcatctgccaccacgaccaggaatgctcgtccgggatacaacattcactgaacagacgtttacataagcgaccaagaaccccactctttggaccg

SEQ ID NO: 60370 - DNA, 1138 bp, Arabidopsis thaliana landsberg
tagtctttaactcttttcattagtgtgccatcctataacttgacttccattgcatactggaccttcaaggatggccttgtttttgctttgtgcgagcatagcaacaggccaagtcccaaatcggctacacaatgtaacagataagtatagcaaattaaaattggggacaaatactttagaagaagaaaagctttggaaatcaagccatcagcatttacactcaatggatgcttagattaaccaagacaaggtacaaaaagaatgtttaacagagtcctttccaataacgaaaaatgaagtattctctcaagtctcaaacaaacaagactgagcacatggcagagcaagcagaaaagtaagaatagaggcaggcagacaaaaacaaactcagattctgtgcagaaaacttcaaattctcattactttcaacatcaaagtaataggcgtatattcggtgttcaacaacactagaatcacaaagactgcacgcaataaagccaaaaagatgccaataaaataagcgcagacgatagagttgctcaactaacaaactcaaacataaaccgcagtctctctaataagtctatttcacacaaaattaccatcaattagagacagcaaaagtaatgagcagtctttttgagtcacctgatttgtctcaagctttgaaagagctcaagcgagtagatattgtcatcatcagcaaagtagacaattccatcaagcttatgcaactcaatatgttccaatgcagtgtttctctgatgcactcctctatccttgatactcgtcatgttcctcttgcaaaccaagtgcctgtacatcactcccgtcttcctcagaatctctgaggtttcaaacgacgccacgttaccctccaccactatccacagcacaggcgactcaactagtctcagcgtttgagcaaccctgttcaagtaatacgcctgcatcgctctattatacgttggtgtgaccacaattagaagcttcttcggcacaaagttgacctccttcttcccattttcagtctccgccacgatactcaccgcatctacagctgcttcttcccgtttcctattttccaaaccgttcttcaacgtagggctgtttgatctcgaaggagaatcgatcggac

SEQ ID NO: 60371 - DNA, 1022 bp, Arabidopsis thaliana landsberg
attaatggctaaagttaagatatcttgatcttgtttgatgataagagaagctttgagtttggtttatgagccaatgggaaatgtgggtctatatatattggtggagttagaaaggttttattgaaaataatatgtctacgaattgtgagtgcgacctacaaggacatggttttgacaaacagattagttaaagcgtttggattttaggaagatgtagtttaataaatgttggggtgttgagaaaaaatgagtgtcctacatgcatgtggccaatggctacattagttctgtcttcagctgctattgtcaagacaccgatattttatttttttacttaacggctgaatcaatggtccacatttaaactaacattaataacggtaatagaatttgttgtaacagcaaccatagcaatgcatgttaacgctacataattctatctatattgtgatgatattgacttttcaatgttggtttttacgtgttccaagtaactaaggtatgagtggtgaagttattgacgtaaacgttgtacacgtgaacattataagcattttatgttccgtatatgttatctgattcatatctagtctgaaatcaagatattaagatcgtatagcaagtatccaacttggagtatccatacctaactaccaaaatcctattcacatgcaaacgtgaacactgaacactagtattcataaaaaaatcggttatgttatatgttatctgattaatatctaataggaaatcaagatatccgaacatcctaaggtatatatcgtatacgaagtacctatcaaaagactcgtagtatccaaacctaacttccaaaacacatagttttcaatgcattaatgcccaagatccgattcaaaatatctgaaaatatctacccaagagacaagaaaaatacgatgattttcctttacacaaaacaggtcgggccaaagtacgtacggttctccgattttttttttctaggcactagtctcatcctgagaccccttttgagttttgtc

SEQ ID NO: 60372 - DNA, 395 bp, Arabidopsis thaliana landsberg
acatatttacacacttctaacaatttgtaccttcagttttttatccttctagattctcatgtacacttcggcttaacgccttgacttgttgccaagtatcttctgaaatattgtgccgttgatttttctacaagttaacatcatctccttctcattagatatacaaacacaaagtgccatttggtacaaaaaacaaccaaaaagtacctcgataatgtcacaccagcggttaagtaacctaaatctccctgccaaaacaagtttccatgctgtaatagctctacttatagctggaacatcattcaaacaagtttaactatcatctcctttggctactgcagccaaagcaatgactacaaaaccacttacttatattcttttgcccattctcgcgg

SEQ ID NO: 60373 - DNA, 1097 bp, Arabidopsis thaliana landsberg
  unsure (1)..(1097): unsure at all n locations
taatagatgactttgtcgagcatatgtacaggttcgaaatgataaaagcttttgtcctgaataccttttactctacacattaaacaatgagactcaatcttgttttgttgatgcgcagcattttaggaccgaataaggacactagcttgttctgcaaatgtggtgacacagaatctgaatcatgcctctatcaagaaggtacatatctgtggtttttataatcttagatcgtaaaatttttcgtgacatagtcttatcatcttcttcttcttcttttggtattagatgagcatcacaaagattatcgccgcccacacacgggtttaagaaacattccaggtttaaagagaaaaacatcgaagaagaatgacgaagaagaagaagatgaagatgaagaagtgttagaaacccaaaactcttcttctttgctaaacttcaaacgaatgaaaaccagcaacagtccaaggtgttcatcaaagtccccttgttcaatcgagcgaagtctttcacaaggttttgcgagtcttttatcgactggagataaaccatgaaacactggaacatcgtcgcacatatatatatagattatacaaagcaaaagagttctcaaggtgttgtctcattttttcctacctaaatacctcacttctttaaatgacagttgagttcttctttgttgtaagctatagaataatttgttccttgaatcattcataatttgatcttattccattttaatctctttttttttgagtggtcattttgactacttttaaataacgttcaagtttctagagaaatttttgactatttgtgagaacaagttaccaagcagcattaacaaacagaagaattaacacaacactaaacccaaaattaattaagcatttgtttcattttcaaaaagaaaattccataaacatttgagcatttgtttcgttttgtttgtaagtcatagtttttatatgtatgtataataatacaacaaattagttgatttaaaatgctaactatanttagatatntattgcataaaacgtttttttttttttggatanattttcattnctattaatttcttacatattctaaaaatt

SEQ ID NO: 60374 - DNA, 1567 bp, Arabidopsis thaliana landsberg
tcatattgtagcctgtaggagatcttttagacaagcccctccatataaagagagccataaagtttttatatcgaatagatagatagggatatactgtagattgctttagttctttatactttatactttgtatttgtttttccttttcgtgctctctatgtctttccactttttagtttatcagctattaagtttcaggctttattgggaggttaggtgactcatacactcaaggaatctcaacattaggtataaacttttaaggagggttcatcatattctttgttccataccaatgatgggcatggatttttttaggttgtgattggggtaatataacaaaataaaatattgtggaataacactagatcatgtttattaaatttacggaatcacaaaatagtttaatataattgcacagtcgtatgatttgttaatctagaaattaccaaccataccttaaaaatatgtaataaaaaaaaaactcgataaagagaagccgtgacccgtgagaataataagattcatgtatgtatttacaaaattctgtacacaaattaacatgaaaatgttgcaaaacttctagtcccaaacgaagccatatattagagatttaggggaaataagtacgtaaagttttgtgaaacaaaaaagttgatatatttgcagtgaattacgtgtaatgtatgagtaaaaaaacgtgatttacgcccaccgttttgaagactttgccaaacttgatgtacttcccgtcttcttaatgcctgcaaaaacatcatcgattagacaaaagtcacaaaactctttattattaatctgatgattgaacctactttacactaatcaatgcttttaaaaaatcttcaaaacctataggttttaagtttgcttacttgatgacgctaagcctttacttgatgatgtcaagcccgtgaccttagcaacggtcgatgttgttcttgtagctactttccgaagtttatcgagtggccgtgttacactcgtagatgattttgcagtcaccgacttagctctgcaattccaatacttaaaacgttaaaagaagaaaagatatatcttttaaaaccacaagaacaagatgaagatgtggttttaaacctgtctaaaattctgggtggtcttttggtaacatcaattgatccttgtgttcccatagatgcagcatcagacgtaatctcgcttagtatctcgtcgtactctgcctcggcagaggatgctaaactttcgccgtcagtaacagagtatcttgattgtgatgaatattctcctgtatctgagtttatgtcatctgtatgtcctatgctttttcttctcatcattgatttctgaagtctctgaggctgatgctgaagtctctctatctcttcgtcttttctcgctatggtgtccttaagggacgctaactgtaaaagcaacaaatgattcattctatctttaggttaatggtaagagagatcagagggagagagaggggagataaagtgtctgtttacctgttccatcaagtctcgaacatctttaccttctttacttgtctttgcagcac

SEQ ID NO: 60375 - DNA, 343 bp, Arabidopsis thaliana landsberg
catacatttgcggggaactgtgtagatgactgcgggtttgaccaacacaaaattcataaaaatcttaaaatttattcacatctttaaaaattaagaatcactcttccctgctggataataaacaattattttatattcaatttaaaaatatttttctcaatttcaaaactaagctaaaaatatattaaatcaaaaaacttgtaattcttgctttgattttataaaaagagaaagacgatagcattattttttgccttttcaaaactttattagaactttaagagatatagttgcttacatgatgataaagaaagtatggacatgagtgaaacacaaaccaatg

SEQ ID NO: 60376 - DNA, 459 bp, Arabidopsis thaliana landsberg
  unsure (1)..(459): unsure at all n locations
tattattaactggggatatgagaattacactcatgtttcatgtttctaggtcctatagcctttgtctaaaaggatcaaattaatctttctttagaaaatcagagaactatatatgttctagttggtcaatttttctgtttaacactatgtataactcaagtttgctctaaccctaaactagtatcaaagtttatggttttaaatacttatatttagttagtttctggttcgttgggtaaatcaactccaaacaggctcaaatttttaccagaagctatattaagggtatataatgtttccacaaatttttataatttttggacctatggttttatttctaaaattactttaagtctcccaagggtacttttaaataactaaaaatttacttggtgctgcanaacatcttacaactcattttatcagaggctacacaattttgtgaactttacacaattg

SEQ ID NO: 60377 - DNA, 983 bp, Arabidopsis thaliana landsberg
agagagcctcagtctaagaagccgactagtgacagaggagcagtcaataggaccatcagaccaagctttagtgagaccaatgtaatgatcagcgtgaaaatgagtaagcaaataagcagcacatccttgaacacaaccatagcgaaaagcatccacagtgaacggtgttcctacatacaatcaatcacaaacttcatgaaattggcaaagagagaagcacatttaggcatatgaattcaaagaagaagaagagagagagagagagagacctggaagtttcttgtaaaatggacatggtcgaggcgagtcattgctaaacgaagagtctctacgcctttttccaagagcactcgtcgtcttcttcgccgaattcgaagcaggtgaagtgaaaggagaagggttttgtaaaccccaactctgaaacaaatcagtttgtttcatcttcttcgttgtatcaggagaattctcttgtaaaccccaaatctgaaacaagttcgactgtttcatcttcttcacagaagaagaatcagtctcttcatcttccactaaacaagaccaatcagaaccagccttatagaaatcagacgcaaaaccctcttcttcttcattctcttcaacatcgtcgttaaacacaaaaccctcttcgtcttcttcttcttcatttacaccgtcgttgaaacgagaaccaaaacagtcttcgtcgtcgtcttcatcagaaaaatccatccttttctgctatagaggttcaatgaaaatgaaaggtcaaaagagtcaattttgacccgcccgccaaaggttgctttttggccattgagtgtctttcaacgagagagagagaagagaagagagtaaaaatggtaaaaagcccaaaacaaaacgtgaggagcagcaagaagacagatttaacaacacaaaagggcccaaccactacgtcattttgtatcaatctaacatcgccatcgtcgtcgtcttcgtcaccgtcg

SEQ ID NO: 60378 - DNA, 529 bp, Arabidopsis thaliana landsberg
  unsure (1)..(529): unsure at all n locations
ggaatctttctccactagatgattttaggtgtttattaatgttttatgtgcttctttaattatatctcattgtttcttttgtttcgagcctttcactcttgtttcgaagtatttataatgaaataatactgaggttacattatttcaaattttatcaatgatcactttaaattccattgcagttttcctatgattgtactctgattgctagatctaacccttatttgtatgtgactttgattgtgttctattgttgattttttttaatattgagagacttattatgttattcgcatttttattctttttatgtgtgtgattaagcactgacaattttgaaaccatgagcggatcgaagataactaaaagtaacccacgtaagtacctcaagattgtgaagaacaaacttcaaaacaaacgtgacatttatgttaggtttcttcaggtcatgactgcttacacagctcaaaggtatatattttcagtggtgataattgggtttgcttttaaataaatttcattntgattc

SEQ ID NO: 60379 - DNA, 960 bp, Arabidopsis thaliana landsberg
ccgctgctggtacgtaacatctatgttccaaataatatgttttctatgttgtggcttaattaaaagaaatgctacattgttaggtcggtgagcgaggagccgctgacaaggtacgtgaggttcgcgagtgagagctgcatccaagagctcttatcttcctctgaggccggacgctttgggaacgcttccaatgggtggaagatggtgaggcatgactctaacggtgtcgagatttcaaaacgcgactcgggatcgctacacgcgtttcgaagccgcaggatcctcacatcagtctccccagagcagttcatcacggttgcaaatgcgatagacgcggccaaggtaattatttcttagtgcttccttacaatatgcaactacgcatatcctcaaataaaaacaatgctaagagagacattaactcaataatatattttcacatcattatgttagctaagttaaatgtaggatttacagatttacatttttcacatctcaataaaatatgtggaaaatgatacataaactaactcttttttagtagaggtgaaagataagtgtgtagtataatactgtaaaatacattattattatttttgttacataaaataaattagttactcaataaattgagaattatacatccgatcgatcagttcttaaagtttctgtaaaatatttttatttaacacatggtaggtgtttttcgtttgcttttaattaaaatattaaaacatggtaggtttatcacccacttcattaataattggagtttgttaaaataataatgattattggagaaaaatgacagcaatggaaaggcgacctggtggaggcaacacacattagagacatagatgagaatctgagcgtaatccgtttaaggtttggcgaaaactcaaaaccgctctttaggaatagagagttcattatctacgaaagacgtgagaccatgcaagc

SEQ ID NO: 60380 - DNA, 1094 bp, Arabidopsis thaliana landsberg
aaaggaaaaataaactcttatgatcccaaataatgggcacattagcgtttgcaatttgcatatgcataaattggtgtatgaaagtaggtacctttcctgagttttctttgttccctactattgtttgacatgcgagtctccaagattccggcttctgcacaatagtaacaaaacccttaagatttaaacagccaaggctcttattttatccaaaatttgcatatctaagaaaagttacttagtaaccatatcagacaacaaaacatatattcacatttaaccagaaacaatgctcaacatttcattcatcttgttagtgcacatacccattccaaacactagcaatgagaaacttgtgaatctaacaataatatagagaggagtgatcaaataactagcctttttcaggtaccggttttctgtatctgttctctcattcagaagatctctgccatcgagtatctgcacacaagaagaccaaatgtgtatttttttgctttgagttactggtcatcataagaagaccaaacacaaatctattttcctccattgatatccatgaatgctagaacaatcatagctcacaaattcataatcagaatctaattaacattgtatgaagtcacttgcctccacaatgcaagttccacagcttcctccaccaccacagttcatcactttcccctaatcatcacaaattgaccaaaatccaaagtttacataagccttcaacaaaccatctcctcacatcaaaatctagaactaaatattttcattgtctactaaattattccagaaactagttcaaacatcaaatcaatcaatgtattaagattgagaaaatctgaagttaaatttcgtaattaaagagagagaaatcaacataactcacgtaagcagcgtagagttcaattttgttatcctgcataatgcttctgagaagcttatctccactcacagcctttgctttatctaccggatatgacccgtcgctacccggcttcggctgcaaagaaaaaaacgaaaagtctcttctgagttttgaaacgaattgtatcaataatcgacgagaaaatcgcgccgagagtacaccg

SEQ ID NO: 60381 - DNA, 378 bp, Arabidopsis thaliana landsberg
tcgtatacaacaaaggtttcattggagacaaaacctcttcgtgtattcaaaacgttttctcgttgaaggcaggaacccacgcttttcctgttaatgctttatgctttatatcatgatgatgaatttacaaatgcctaatgtatgtttgtttaaatgcaaaaaatgatgtgataaattatgcaaatcagtgtttaaaatacccggatataggaccacatatctgcagataatagctggagaaggatggggtttatataatcacattttatcgctaaacggtcaaatacgctaatatccgatattatcccgctaaaaccgctaaatctcatatgacttagcgcgctacatctcatgggatgatggctgttgtgtgtttgt

SEQ ID NO: 60382 - DNA, 248 bp, Arabidopsis thaliana landsberg
tcgcgagtgcgagatgctttgttttcgggagagatggcgcatttgagtccgaggtatttgttgcaaatgtcggggccttcccaagacttaagtttatcatctgcgactagatccttaaatctttggagaactggatagactttctttaataatgagctcgcaaacggtagatcaggtgttggcggcgatggctggggtttaggcggtgcaggcggcggaagctgtggaggaggtggagcctgtggagg

SEQ ID NO: 60383 - DNA, 122 bp, Arabidopsis thaliana landsberg
gggaaagagcgcttggcaaagaatgactatcctagaggtaaatgttaatcaaactatctcgcattgcccacactgaatgctaaaggctcgtaaccccctaaaaaggaaacctcatccaccca

SEQ ID NO: 60384 - DNA, 1232 bp, Arabidopsis thaliana landsberg
tagacaagagatgacatctatattgtcatttcattggtgcatcatcgattcatcgtcttatattggtcattacatatgtttttttacgttttattgtggtcttcttctaaacacaaaatgacatctatattttattgcaaaatttccttacgatatatagttattattaaattagttattatcgcaaattaaggtgcttttcttatagcatagaatgtcacaagagaagaacgatagcaattatatgaatcacaaaactaccgtttttagctacgaatgtgtttgaaaatgataaatgcattacatagatgtaatgttttcatgtagttgattgccctcttgtctttattgcgaacattttgattgttatatcacatgagtcattcagaagagaaaagaaaaattagatgtaactggaggtgcgagcgacggcggcagccaacgacccactttatcaatttttatttgacatgtctccatcgaaattgtaaactattgagtagtaaattctactacgattatttcatgactaattacgaactatcataaacagatattccccttaacattattatcgatacataaaacaaatattaaagctaaagctttcttcatacaaagcaatctcctaaagttagagacttttgttgcagcaacaaacttatatatattagtattttcaaacataatgatttaatactatggttataatttgttaatatagttaaggagttactcaacaatctattagtcaagtcttggaaaaaaaaaaatctattagtcaagtcaatctattgtacatttgtacatatctactacaaattttaaaggtaataacaaattagttcaatacattcttatatcttctctttgctagttcaattcttcttattggcaattagtaaattgacccccaaaaaaaagtacattcttgagttttaatttgttttttttttaaaaaaaattcttgagtttaaaaccatctataatagatctacatttatttcttcttctttttattcataatataataaataaatgtattgtgtttttttggataaagcatttccatcttcttaattacatgtctattgtgtctactactgcaaatattatttttaaatactatcattaaacattaatactaggaagccaaacaaattaatctgaaaaagaacaagacagagtttagagcacaatgatgggagccacatggagacagaacatatgct

SEQ ID NO: 60385 - DNA, 225 bp, Arabidopsis thaliana landsberg
tactaactcgccgaaagcatgcgtgccagcctataaaattatgaataaaagggagtatttttacatatcacaactaagagctctacaattgtgggtcggaaaattcaatttatatgggaaataaatattataacccatgttgaaatatacattacagattagtatacattacactttggaaacaaaacttcaactagttcacattaatttttgtagtcttggtta

SEQ ID NO: 60386 - DNA, 692 bp, Arabidopsis thaliana landsberg
  unsure (1)..(692): unsure at all n locations
cctacanggttngaaccacttcaccaaacatcctatcaaggaaatatctttgggagaagtaaagcaggtataaagctctgagaaaattgtttaagccatctgatcttctataaaatgttaagaaatgtcatattctcatccaaaactcatgcaaaccagttctacttcatatctgcatgtgtacatgaatgtgtggcaagtaactaaattattaaatcccataagacagaattgtagtatacctgcaaatgtgactgaatttcgacattgctattagctagctgaagaagtttgttggagatacgagtcaaatgaccgatgtttccaatcctgagtggctttttaccctctgcagggactgtaggctgaagctgagacatcgcatgtaaaccaagttaataaataatgatgccaacctcagacattagcaattaagtatcttcaccttatcagaatcaccagcagttatgttggagtccttttccgcctctagtatactcccaataagattgcactcactgagaagatggtcaacaagttgagagtttttgctctccatacatgagagaattacattctccacatggtgatgcaaanaattgttgtagggatacctgagacacaattgcatcacaattaagcatggcagttgatatcatcaactagaaaatgaatttctacttctcaagaca

SEQ ID NO: 60387 - DNA, 1221 bp, Arabidopsis thaliana landsberg
cacactctttataacaagcctagtttttaattcttgaacatcctgattttcttttggcacatccatatagagattccgttttcttatcattgactcttcctctttgtccttgaatggatttctgatggcagccttgtaattagattggtatagctgatctctccatttttttatgttagcaaagcaatatttacaaaattacttcaaatctcgtaggagctttaagatttcttctcattatctctagcaagttgagtaatctgctagttctaacttagatcctcaactcctcttccttaatagcactcgtagcattgtcatcagattcaccaatatctcctcgtaactctgatgatgttcacctgtagctcattatagaattcatctttaacgttgtcatcatattggagatacttttctgtgattagatataactagtcgaactaatgtaaaatttcgactgtcttttttgtttttgatggtttattagatattggatataagcaatgaaaagggtgaactaagatacaagtttaagtatctcgactttccagatgaacgttagttttatcctccaagtatatatctatttcggttttctaactattgtaatgttttgcaaatgatatatgtttcagctttagataatgcactggtctttgaaacacctaaaggtgggacagaaagtcagctaatgcttcgtccaaaatatccaccactttatcttgaaagtgaatatcttaatctcgagagtgacaacgtagaacctcttgtcgtcgttcatgattcttggaaagttggagatttagttgattggttgagagatgacatttattggtctggagaaattgtggaaatgagaggtaggagagcatgtcaggtatgaaacatgttgctgttgtgaagtttgtcattgttctttagttttatggttttatcagttgtctacgagtaactaaaatttgacaaaatttttgttgtttttttgcagatcgaattgcttcctaaaccagaaggggaaggagatagttatcaagatttgtgtaagaatttgcgtccacggttggattggtcagtggaagatggttggaaagtgccttgcactgcggttagtttttcatttcttgtatctgctcctgttcttgtttctgagatttactcaacagatggttaaaattttctggttcttgaatagtttggtaacctcacttgtcatagttg

SEQ ID NO: 60388 - DNA, 611 bp, Arabidopsis thaliana landsberg
gcttgtgaaatataacttttgtaattttatgctcttttttccatgcaatgaaattcagtcttgtttctttgagctcaatctaatatcctttatgcttttctttatttgcatttttttcctttatttacttatgaaatatgatcctttccctccctaatcattcattcaaacttaggaccctaggacatttgaagattcctatatcacaagtcacaacatatgaggagcttaaggataattagttcattatattatacatgacataaccatcttaagttgatttattttattttgaagataatatatgagaagtaatgtaagattaaacggaaaatgaagatccctcacacacacaaaaaaagaaaaggaaaacctatgatgtacattctcaactcattacacaaacacaaagagaaaaacaaacacaaggacaaagacagacatacacattagctatatagatagtaaaatgatgtagtttagaaacatcaaaggcctcagctttttttatcagatgatcagtcatcttttccactctaccggagttgccttacctgcaaaacccaaacccatccaagcaaagtagacgagaaaattccataaatgatcat

SEQ ID NO: 60389 - DNA, 1062 bp, Arabidopsis thaliana landsberg
aggcttttgcgcgttctatcaaagacgccgccgattgatgatggtgatagaatagctagtgtaattgaggatgagattgagccagcgatgatatgggaacaaagggttaaagatgttgaagcggagaaagagaggagagtcattacaagtcctgggtttagtttctctgctgctggtcttttgtttccttatcatcttggagttgctcagttgcttattgaaaagggttacataaaggttcttcattttctcatggatttgtgtgttttagtaacagttatgattgaggaaggaacatgattttgttgtgtgttgattcaggaaactactcctttagcaggatcttctgctggtgctatagtctgtgctgtgataacctcaggagctactatgcgagaagcccttgaagctactaaggaacttgcttatgattgtcgacgcaatggcactgctttccgtcttggggtaatgagccttctatctcagtgtgctcacaaatatttacagccatagagttgaataagttcctaggtgttggtcttgtgctttagattgtcactttgttaatttgttcaaacaatttcttatgagtgaaacacaagacccaccaatgttgctgtgatgagtttggctttaagttacattataaagatgttcatacaagtcgctgtggttttaggctgtccttagagaatccatggagaggttactgcccgatgatattcacattaggtccaacgggagaattcgtggtgagtaactacgtcttctttcttcaattttgactcctcgtgcctgacttgtcttcgggtctgacgttgttgatcattcaactgtattgtagttgccatcactcaagtgttttggagacctagaggtcttctagtggatcagttcgactccaaaagcgacttgatagatgcagttttcacatcttcttttattccagggtaaatcactctcttgcttttgaaactttcagtttatccggaaaacaaaactttaacaaccagaattaaaaacaaatgcagatatcttgcaccaaggcctgcaacaatgttc

SEQ ID NO: 60390 - DNA, 890 bp, Arabidopsis thaliana landsberg
cagctcagccacgagcagtcaccaccgcacacaaatttacgcttttcataaaattctcttgtctttggtgtaatgttaatggatttactctctcacattttatgaactgtcatccaaaccataccaatcaacattatccttcgaatggtcaagacatatataattccagctgttgatactcaaaggtcattatcgtcacttcacccaccttcaagccggcttcaattaattaaacccgataactatatcttaatttaatcttattgaaattaaaatataaaaataacgttaacgcgtacagggaagcaacaatgcttgtccgttttgtcgtcgtcttgactatacttacctctccactcattaattgattttctctctctctccccaaaaatatctctgtcttctccaaaaactctctccgatttcatcgcttagggtttcttccccgattcttcaggtatgtaatcatcatcatcatcttcctcacttcactctcccttactactgtattcaaacttcaatttcatctgtttcttaagctcaattttcgtaaccaaacgaacatgtacctctagcactttccatttttagatctgtgaagtttatagtttcgattttctttcgtttgatagatctgagaagaagatcgtcccggagaagtgctcttgatcgatgaagatcacagagggacaattccgtctctctcttcttcttcttctcatatctgcagcaactttaatctcagctgctgattactctccaacagagaaaatcctattaacttgccgtggtggtgctatctatctaaccgacacagaacacccgatatggatctccgatgtcaaatcacaattcttatcatcctcctgttgagactcttaaacatcacc

SEQ ID NO: 60391 - DNA, 1724 bp, Arabidopsis thaliana landsberg
ggtgtttcgtggaacaccttctctcccatttccagaattttcctccatggcatgttcttgtttgcttctgctgcaaatttctccactcccacctgaaccaaccaaccaacacatatatcaacaacaattcttattcaattcatgaaaatacagctagtgtaggtttggtatatacctttagcatctcttcttcttcgtacgtccaaagtagcctccttctttgatccatcttaaagaaagaaatgtccctgcaaatccatgaggtaactttctaaatttaatgtggaaatgaactcttgatgttccagtgagtgaagaaaaaggaacaacctcactgtctttgacttagccacaactttggttgttgcctgctggttcctcattctccctgacggggaggttacttgaaccgatgaagttacctgctcagttacatcttctccatttcgttcgttacttgatccctttgatgagatgtcactatcgataattttcaatcctctccttcttcgcttctcattctgctggacctggtcctgttcttttgctgaaaacgatttttgcatttacaaaaacgaagaaacctctctctttttccgggcacctgtattcaggattcttgtaccttgatctttagctgtttcatcatcttcagcgtcttgaaatttttctgtagctaccttctctgatgctccaacttcgtcaatcactttaccagtacccactttcccttgatccgcatctggttttgatgaacagccatccttctctccttgtaactcatgatcacttacaatgtctgtactctgctcttggtttccaatttcatcaccagataaggttatatcctcatccctgcttttcatctctttatctagatacttgcagaccgccttttccgcctcaacggtcttttctctcaatgttttggatttcagtgcaacaatcttgagccagcaataaggacaaaatggattcgaaacatcctcactactactactactactactagtactacccaaatcagcatacaaacactcgccgtgaaacgaaagaagacagtcaaccccgcaacaacgagatacccgctcgtctgaaacttcacatacaatacaagcatccaagtccagcagcgactctacagatcctcctctatcagtagtctcactagtcccaagacaacgacgcttcttgtgtggcacatctctttcatcacattgtgtgttttcattagcttcgtcatcctgtgaaaggaaatgaccagaaatcattcacaaatacatcaaccgtaacagtttctatttcgcgagttccaaatttaaaattcaacctccacaatcacacagaatccaaaacaagctttgattataacatacgaatcaaaatcaaaaccaaaatcagtcatgtagctgcaccaggaaattacaagctctagttttccgattctaaaggagactgttccgagaagcaaatagagacgaagggaagaaataggtttaccagaagcgaatcgagggatttgcgcgaagacctaaccggaatcgatttggttctcatcttcatcttcgacagtttcttctcaatcatcagtctcggtttaaaattggcactctcgaattcaacaatggggacgttatatgaacagtgaagagtgtctcttctcaattgtgaagcgtactgaggaagatggatgaataaacaaaataaaaaaagtattatgtgat

SEQ ID NO: 60392 - DNA, 475 bp, Arabidopsis thaliana landsberg
actctgttgttattggccaacgccaacgcttctttatccggggaaaaaggctgagaaaataaagaaaagtcttcggaaacggtaggcgcaaagatgaaccccgttggaaagtttctaactatttctagtgaggtaattaacaaaacaaaaacccaaaaaaaaaacacttcttttctaatctctctcttccacttttatgtgttgatgttgttagatctgaggtctattaaaatccgaatcctttcaatctcttctcttattccatcacaatcatctagggttttaagccaagcttatatagcccgtcataaagagaactcatctgcctctctctcaataccaataaatatcaccaccgtccttctctcctatcactattcaatctatcgcaaactcctttatgtctctccaattttatgagagggttttctttaagaacacagtaaaatagattggatctttaaactttttgtcc

SEQ ID NO: 60393 - DNA, 558 bp, Arabidopsis thaliana landsberg
tatatcaaatacttacattcttagcaaaaaaaaaatgaaatgttgaaatagtatagtataatttaaaatgtttttaataattgaacatttttcaaaatttggtagtgacggtggcaacagttgaggtgacaagaatagcgatggcggtttcttccaaaaagttcgagagagtcgagatgcaccacccaataaacttgaggcatgataagattgaagtcacaaaggtttgaacttgaaaccaataccgtgaccaaactcaccccaaatgagggtaaaaatagagataaactaaagcatttcaagattatactttcatcgaataccaaacgaatcagtctatccaccagatttcgtgaatggtaatgaaaggtccaaactaaagccatcactactgttctatgaaggagtcctttactctgtataaacgagtattgagatcttcaacattgaacttggtaagataaaagaataaacaaacctaggcctaacaaaagataaggaaaattttcaggaatcaaagaggcacaaggcggtctcagtgtcaaccatctactcttt

SEQ ID NO: 60394 - DNA, 1124 bp, Arabidopsis thaliana landsberg
attctacaatccgggtatgaaaaacagtttctatctaaataaaaaagtgagaaagaatctagaaagagacaaagatgcttacttcttaaacatgttcgaggtttattgaaaatgatcaccagcttctaactatggtatcttcttccctgcaagcgaacagtggaagatgattgataacggaaatatcggaacatcactcaacaaaccaaaaatttggacatcatatcgcaacaaattcaataggaaaaatactgaaattccaaaacagaaaaaccaaacggaacagagcaggaactcacggactgagagagaccgtggacggtgtcacggcggaaaatggtcttggacggagttactaatcggcgaattgagatttgagaggtggtagtagaggaaccgagagaatgtttctctcaaaaaaatccccaagtgtttccgatctagtgtctcttttgtccaaaaacgacagtgtttaggaaacctatgagaatgaatgacccgatggtccgaatccgattcgaaattggttcgaattgtaataactaacatacaatattccggtttgaatgataagaaaaaacacattcgatccggttagaacaatatattaacaggcccattaaaacatatgggccgatcttgatcaactgggctattcatcgttgatacatgcggccgcacaggattaaaatccagttccgttttataaaaggatactagtttccaaacgaacggtggttgtctcctttccagaacaatctaacgctttctcgaacatcttcttcttcttctttctcgaaattatttttccagtaatcaatttcttctcttctagatttttacaggaactaattttctgctctgaggtatcagatgagtagccgatggaatcgtacgatctacgttgggaatttgcctggagatattcgcaagtgtgaggttgaagatctcttctacaaggtttgaaaattcctcttttctctcgataaaaattgaattcattatgacttgtttgggttcataaatttgcaattctgtcttgctgagacaatttaaatcgactcttatgtatatttgtttcagtatggaccaattgtggacattgatttaagattccccgagcc

SEQ ID NO: 60395 - DNA, 197 bp, Arabidopsis thaliana landsberg
tttgtccaatttttattgggcctattaaagcccaattactaatactttgagaaatttaactgagataaccgcccatatccaagcatactaacagcaatgacagtataaatgttcacgccgacgaataccatttaaaccgtgaccgtgaatgttacggttaaaaaacctttcgatgactgatctacatcaatgaaaat

SEQ ID NO: 60396 - DNA, 524 bp, Arabidopsis thaliana landsberg
tgcttcgtgtcccatgtgggttcccccgcgtctttctcttcacatgcaatgtagatgaagcagatccaatatggatgagggtgaatcgggtgttgaggtggggtctgctcaatctctcaaataatcaaatggcggctgcaacaacacgagggaatgtcattggtcgatgagttggagacgtcaaatgcagatgaagctatagcttccgtgtggaggatcactgtgacgttgtgccagacccatccactaccgtgagagtctagaagagaatgaagccgattgtggacatcgatgtcggtggcaatgacttccagatatcatgttgggggaggaaccatggcacgataattaaggcgcaagggtcccaccccttcatttatcaatgaagcttcaaggagaggcacatcatcgagatctaggctttcgtgcaggaatgggtacacctctcgacacaaggaggaagggtaccaccccttcatttagcaatgaaagtttaaggagaagtacatcatcaagatctaagc

SEQ ID NO: 60397 - DNA, 348 bp, Arabidopsis thaliana landsberg
  unsure (1)..(348): unsure at all n locations
ttaattagactcggatcaattttgcttctctcctcggctctttgtggtggttggctggctggacaaatgcttttgaagaggctctttgtagttgttcagtacgactgcagcagtggttttggaggtgatatgtgtgtctcagtcttccgtgtatggcttcattgtggctctatcttggttcagttttgttgttgcttgtgtgttgctgtcttttttttttgttgttgatgtaggttcagcctgcaatggattgaagccgtgtgatgctttggtggggttatccatggggaatagaggcgacggttcngtctaagtggctttgctatcctgtgggagatggttcttgtc

SEQ ID NO: 60398 - DNA, 387 bp, Arabidopsis thaliana landsberg
ggatttactagactaacatagatttgttgacaaaaaaaaaatttggcttcatagcttttttggtaaaaatgacagcaatgtttttagtattctatgctatctttaagttatttaaagtgcactctattaaaccacatagataaagaaatgccaccacgaacaatatgaaacattacaaactctagaaaacgccctaaacggctagaattgaatttgaactctaaaggacatatagaatcagtacgtacataaataaaacacgtaaacgactaaattcggctaagtcccttaaaaaaaattgatcactctttattcttttttttttttgacataaaagaatcactcttaattcttaaaagttggtttctgcttttccattagttcaaa

SEQ ID NO: 60399 - DNA, 530 bp, Arabidopsis thaliana landsberg
gaatctatccacttataaacttcatacgataaattaaacattctctaaagctgattgtttcttcgtcctcatgaagtatacaaaccataatcaaattaatgaaaaagaaaaatgcagtacttaactacttaccaaaccatatctatgtcgcagcgaagtgtttgagattgcgggaagagcaagaacctatttatttttgaacaaaaaattattagcaggaatcaaatatctttaaagtttttatttcacctaatttagtatttgttagctttcgagcaagaaaaatttagatatctcaactgaatattcgcgggagaattcaaaatgaaacttatgagttagtttcattcaatcacgaaatctttgatatattacattatctttaaaagataccaaacagaagagaaacaattaacactaaaaccaaatcataacacagtcaagtactattttactaagtgatcctttagattgtaaaggcttattaacctatagattattcttatacacatacaccgaaaacatctttt

SEQ ID NO: 60400 - DNA, 441 bp, Arabidopsis thaliana landsberg
cttacgatatctgttggcttattctgattatattcattttatattgttctaacaaccttttcaagggtctcttgatcccactcatccatatcttcatctaaagccatataaaaaaggcaaaaatatgaccatcatccaaaggaccaaagggatagatatataagacactttgtgccacacttttataccttcatcacgcgtatcactgtaaatatcaatcttctcacccttcctttgaatgtacaaatcatgagagactttgcacttgaaacccttttgacactgcccggtctttgaaaaactcacaagagtattagactttgtatccacaacctgccaagatacattacctaaaaacaacacaccgtattcaataaatattacacgaaacccaagtgaactaaccatataaacagtatcaacattcaacatacataccta

SEQ ID NO: 60401 - DNA, 579 bp, Arabidopsis thaliana landsberg
  unsure (1)..(579): unsure at all n locations
gggatatgttttaatcaaatggttaaatctatttgaattcgccttttctactaaagttcgactctactttttcacgttactttgcatagtagaaattgactatggatcaactttctcgatgtaaagatgtcaacaaaataaaacttaacaataagtttgagaatcaatatatatatacacatgttagttgtggaattaatctttgaatccgaacagaataaaacaattatgtcctccaaaaaattgaaaaattcgggacgaaaggtacgggcctaactggggtctaatagacgggccggagcgtttgtatatctatttgccgtttagtttataacatcttctttaaaagtaaacggcccaaattacaacccggattcaaacccgtacccgatccgagttacaattgccgcctcactgatctctttcttcggccaaatttctgaattctctaatctctctgcaaccaatgactacatcggcgatggatcctncttcaccgcgaaaccctagccatgattccgagccttctgaaccaaacactacatcaatttcccaaagcgatgaatcctcaacgatgaa

SEQ ID NO: 60402 - DNA, 213 bp, Arabidopsis thaliana landsberg
atgccaaacccatcaatacacccatcgaaacaaaatgtcatctctacctctacacaagaggtaaatccccccatcaaaatgtatatccatccacaattgcaccattactctatatatatgcatcctaaccaaacattatactttacctttgcaactttacaacaaaccaatccaaccctaaaaaatcccaccttaccttactaaaacaaaaca

SEQ ID NO: 60403 - DNA, 527 bp, Arabidopsis thaliana landsberg
  unsure (1)..(527): unsure at all n locations
aaccaactgaaagtcaggtaattgtaaaaggttnnnnnnnnnnnnnnnnnnnnnnnntagtgataactcaagtccctgggttttggggtttgcaggcatatctgatgaccctatggcatcaacatcttagcccaactcttcataccactcttcaaatggtttgtcttcaattcacaatttaccctgaaagtcttcaatttcttctttaaagacaaatcctttcttcaacaggtgtcgatgaaaattgagcaagtccagaaatggtcagagcctcacattgaaacactgaactcagtgagttttgttctaactgcacacttgtttacttttccattttcttgatactgatatctgatctttattttcagcaatggattccaagcatcaaagatgcatgtgtcacaataaccatatatctcgaaccaaaagttcaatatataaccgataagtacatcgagttgttatatacatctaagcatgctttgacaccacttctcatacaaggattggacgcttcatactactat

SEQ ID NO: 60404 - DNA, 1092 bp, Arabidopsis thaliana landsberg
gagatacactgtccaagcatacactgatatgctcatcggttggaaaactaccttcataaatgtatacaacacacatttatttataactttttttcttcataatattgttctacctataatgattattttgtatgaataacagagtctatatgatctaggagctagaatatttgcaattcttggaacgttaccgttagggtgtttgccaggggcgagacaaattaccggaaatttgatatgtcttccgaatgtaaactatggtgctagagtttataatgacaaagtagctaacttggtcaatcagtacaaccaaaggcttcccaatggcaaattcgtctacatcgatatgtataactcacttcttgaggtcatcaataatcctagccaatacggtaaaacattgagtaacacacgcaaattttgaatatatatggtagaaaaaacaagggtgctaatttctacattgtaatacatttcagggtttacgacggcaaaaccatgttgttgctcggtgatgactccgattccgtgtttaagatctggtagtcacgtgttctgggactttgcccatccttctgaaaaagcctataaaactgttctacctaagatcctcagtaccatccaaagcaacctcgcctagtcactaattttctctttcttttttatatttagacatgagaaccatgaaccttggtttgaatatgattagttcctcgatcgacgatgagccgcttgtaggtctctattgttaagcttgatttatgtgttctcatcaattaatcagaatcagtgataatttcatttgcaataattttggtgcttcttagtttaccaaaccagaaaagttatgtgtttggaaaagaagaaaaaaatactagaagaagataaaagatttccatccaacacaaatacaaagatcaacaaatgagagaaatacaacacacataaatatgttattaattttggtttgtttagtgtaacgcaatatttttcccaaaaattgtggtgtttggtacctactttttacattttccttgatattcactacaaaatacccagatgataattcataatttcacatagatttttaca

SEQ ID NO: 60405 - DNA, 158 bp, Arabidopsis thaliana landsberg
cacacaacagacaaggcccgtgcataggccgtgtagcttgcggtgcctcataagctacctcactctcactagcatcacagaactcaatgctcactttacaggcggcaaaccccgacagcactatagaatataccaatcgttcacccctcgaagatagg

SEQ ID NO: 60406 - DNA, 1754 bp, Arabidopsis thaliana landsberg
tctaagtggtggcttcaactgagtctgcagacggcaggagctttccagtaggcattacttgaagcaagattcagaggggtgagcaatgagaaaaatggtgctgaatcagtcgcagtttcgacctaaattgcattatgcaaacatccaaaagagagaaaggaggattaggtattacataacagctctttccaaagacaatgaagtgatcatagtaattttaaaacacataagaagcataccttatgtaagaagcttgcaaatgggaactcagaaagcgactcctctttacccaaaatttgacgaaggaaattgaagtcttctcgattaggagaaggttgacctctaacagcaaggtgatttgtaatgttagatccaaatacctcattcaaagcttcccgaccagcattatcaacacggccacttcttcgcaagctgaccatgacccttacataatctacaatcagggcttcaagcactatcgagctgcagcattttttacaaatgtaatgatctgaacctatcgaagtagcagagacatctgcaagacttccacctccattcgcagtgtccctggagtaggattttgaaagcagaagagctccttttccagcacaacaaaacttgcaagcttttttcatacattggaagcacaagaacactgagcccgactctcctcttgaactcttggtagaagatccaactggacttttattgacctcggctcggacttgacacattccgccatcacaaccctcaccaattctggttatgttccagaaatctatcacattattttccagcttccctagaccaatagaagctataattttatcttcaagagaagcctggcccataactgcaagtgcatttgctattttgcataatcttccaatatataactcgtcgtatgaagagtttggattaatggtagctggatcaattccaatcgataacagtgccctatctctttctgctgcagaaatattgagacgtagacgttcaatttcaagcttcatagcttctacaaactcaagcttctttgcctgtattatgccagacatgcagaaattaaatttaccatagaaaatggaattttacgaagaaagataacatatgagaagaatagttaaaccaatgaaagattcatacaatcagaactacagtttgtggcaactggaaagacgtaattgcatctcaccatgtttggacccgcaagggactttaggcaatttaagtacagatgagcaccactgtccttgggccttttattttgtgggacagacccgtcaggaacagtgtcagagccgcgatattcaacaactgcttcgtctaagaaatcaagcatgtcattgcctccacttgcaatacattccaccactggttgtgggaaggggtcagaagaagagtcctctcctgtcaaaaggtcaagcagattactgggaaagggatccttctgttgtactggtgtggaaacagcttcagcctgtaaagatgttgttgcagcaaacggattcaagtcagaacaagatgcaaaaggacttccatcttcatctggtttccttgcaagttcagctaatcttcctccagtacgttcacaagtaaacattcctttccatggaagagaaattccaaggacttctatctgcagcatagacacaatgcagaaaaagtgattaggtttttcttcttttgacgatagccaatcataaactttatcgagttcagagcctgatgatgccgatagaatttcatca

SEQ ID NO: 60407 - DNA, 194 bp, Arabidopsis thaliana landsberg
tttccactagtaaagctgtcattgaataacgcagctctcccctcccttatctgcacaccaaaaactacccatattccattaaaaagcgccgcccttcaagacacacacacactttataacagcctctttccttcaataaaaatacaatacacttaagacatactgggaaaatcttgacacgagagtacagaaac

SEQ ID NO: 60408 - DNA, 1431 bp, Arabidopsis thaliana landsberg
gaaacgaagagcaaataagctcaaaccccaaaccagagttttagtgttttgtcggccattatcattaatataagaaaaataacacgaacatgttcctttaattacaataatatcgccaaaacttgttcctcaatggtccaaagaaactaaactacgttactacaaccaattaaccaataaccatcctaataacaaatattaatctagctagaacttttattagttattttgaaataatataatgttttcatggatcaagaggtaaagccttgttgtgaactggtcttcttcttctaaacgtacgataatccatcgatagatatttcgctagagcttttttctcttcttcttcttcacttagtttcttctcttcatccttagattttcctgtgaaatcaaaacataaactagacttaatacaaaatcatctcatattatacttctcagtttgaaagtcccagaaaggtttcgaatcttttcgtttagttttatatattatacttagaaagataataacaaaattctgaagaagaaagcataagaaacattgataaagattttcttctgacatggtcaatgattcgtatgtttgacttttatatctatttgtttgaacttcgtttgactactatagaagtgtgctcaagttatgtgagcttgctaattatcgatttctttaaggaagatcttcatgaagaaaggtctaaatactttatataatattaagaaacagcttataatttctcaaatgattgatttacctgaagaagtgactcgaagttgttcgcttgaaccttcatgagatgttgatgtcatcacctattatttgcaatagagaaggtttgattagaaacttttcatagaaatcaaactggagcttcaatatgagataaatacatacaacaatctcttacatattcactagagatgatcatgagctttcgcgtcgccattttcgtaacaatctttttgcttaaacctgtattgttgtaagtaaagtcagttaccacttcatattcaaaccttaaaagtttaagacaaaaaaagtgaacttaattaccttggctaggagatgagtagggatgtttaagttgtagagaagatgttggagttacaagcaataaaatggctagtgcacaaagaaagagggtgactctaattagcttcatattcttcaaagtgatttttagctatatgagaagcttttttgtgctatctttctttttcttcttcttctcttcttttatatcaactaaaaggagctaacacatatatatgtatctatctatctatatacctattatatttggatataatatcttaatgtgactatgtgagataagtgcacgaaacacaaaagtgagagtttcaaaaaaggttgaagatactatttattaaaaatatatgaatttattatgtcaaggtatagaa

SEQ ID NO: 60409 - DNA, 730 bp, Arabidopsis thaliana landsberg
tttcagtgttacaagaatcagtgatttagtttgatagcattgatgatttcccagccaagctctaaatctgcgatagaccagttgcaacacaagaacacagcttcactactactactactgcttcgatgcatacacttgtcttttagacacaaagagcccttgaaagatgcaacctgcaaacagttttcagattcatggatctgagcaccagagactgtcttcaagatctttgcagacaattgcttgattagatcaacatcatcatcaactgattctcccttgactttcactggacaacaatgagctaaagagaccacatggtttttctcatgtaacacctcagagatttcatcttggtgaactatctttgcctttttgctcttctctattaccaaaaccccgtctgtggttctctggtctgtaacacggagctgagtagagtttgagaatttgaaattcgggttggagcagctttttaggaacatatcagaagcgtttgcttttatataagtggtcgaagcgaatgaaactgtttcgccattggcagggacgaaacaggggatgtcaagttctgaggttatctttactttaagagtcatcatgctgggtttttcgccgtgcacgagtacaacgttctttggtgaaaggaactttgtgagatccattattccttttgcatctgtgtgaggactgaaagccacttgatgtaccttgatacaacagaatcaac

SEQ ID NO: 60410 - DNA, 152 bp, Arabidopsis thaliana landsberg
ggctgcgacgaagaaaggaaagaagtccaaatcggcggtgtattcatttacggccacagaatcttcaagctttgggacgggtttgcgtcaacttacacctcactcccacgctattaccattcatgcgaagccaggctccaacgccgccctcc

SEQ ID NO: 60411 - DNA, 183 bp, Arabidopsis thaliana landsberg
agaatctagaggaacacaaaaaaaaaaaaaaaaaaaaaaaaaaaaaaaaaaaaaaagagaaaaaaaaaaaaaagaaaaaaaaatatcaagaaaatcatctaagtaactctcgcaattaccccccaagagatggctccaacactgaacaacatctattctcgatctgtaataccttgcgacaca

SEQ ID NO: 60412 - DNA, 1647 bp, Arabidopsis thaliana landsberg
atatataaagcagcattaatcaattattcttcagaaatataacctgagtacttaaatatatcttaattatatggcagtaatacgcatcatccactagtttcggacgttaacacgcatgtgaactatcaacggtgtcagactccaacggccttactcttacccttattaggtaacgtgccctaacgttaagttttttttttctttccctaacgttaagctctctcacgttataatgtttattgcttaaccctagcttggatccaatcttctcacccaatatcgtccgctaaacgaaactataaagcacttttcttaacaattaacattttttttttgtcaacgtgcaaagtagtatttagatggtgaagtaataatacctacgcttcgtttatataggtaatcaccagtcaacagtcgacggtcaacccacaaaaaaatgtaaatataatcaaacaaataataaaattgagtttagtgcataaaatgtataagcacgataaaaactattgtaggtaattttgcaagtttatatatatttgacgttacggaaaactatataatgtatgcggggcttgaatatattgaaataaatctgtcttggtcatttaaattttgcctgagtcctgacatgggcttagatgtagaaagggagaacagaagttggaataaatcacgtttatgaattcgattaatacataaatggtgtggatgaggtgtgttttgtcgtttctagtattcaacttgcgggttagatcttactttacatttataatatatcgtatagtatttgtaattatttctttttaataaaaagataaaattaataatagaggcgatggagatggataatatagttgactgattgtttaatgttaactagcgttggggacagatggatccacacaactcgactcaaaaaattaatgcctggtttacgaacgtgtatttctgacggaccccatgctttcattgtttggacatagatacttacttttgattccatattccaattttctaatctattagtaaatgattacgtttgtagaggtggtagctgatagatggcttcaaatgtttggggcaaacttaagtgaaaatatccaaattcaactggatagttttttaaaactgaaataggttttattattttcagaagtaggatcaacaataacgacatttgttttaatactatagagaagagagggagagatctaacacaaggtttctcaatttggtcttaactcttaactactagtattaaaatagtatgcgattaaataaactgctagttggataacaaaattagttgccgacaattaaatgaagggaatggtttctcaaatttggcaagtagagtgtttttatattatacccgtgtgggctaaacagaaaaggatgggcctatggatcaagagaaaagcccaattgtaacgagacattacaatatcaagatatgatgggttgggtatttgcgatgatcatatctctctccaacacattacttttggtcgagctttcttcttcaatgggcccattagcgatctcgacggagctttcttcatctggttgttcttcacctgcctgaaaaaggtcgagaaaaaacccataaatgaatgggaagaaagaaggaaagggagagtagtgttg

SEQ ID NO: 60413 - DNA, 968 bp, Arabidopsis thaliana landsberg
agtgctctttaagttaaccttataaaaaaaaaaaaaaacgaaagcaaatgtcaaaagaagaaacaatctaaaaaactccgaagtcaaaggaaaccaaaaatcaaacaatgtcaatgattcaccatcttctctttcaccttcccccattttcaaaaacccagaaacagagcttctcactttcttcacccaaccatgaattccccaagacccatctccgtcgtctccaccttcgcttcaccatcctccacctctgacccaacccgaaaacccttaagcttatgggccaggtatgtaccattcacctgtcaccaccgctctttgggaagccagatccaaaatattcgaatctcttctcgatcctcctaaagacgctccaccacagagccagcttctcaccagaactccttctcatagccgtaccaccattttctaccctttctccactgatttcattctcagagagcaatacagagatccttggaacgaggtccgtatcgggatcttgctcgaagatctcgatgctttagccggcactatctccgtcaaggtatcttcatttgccaaattgagtgataaagtttgatcctttttcaggatactgtgaatctctgtcctctgactatggttgtattataggttttagtgatcttattgtgtatttgattttctgactatgtttctagtataggttttagtgatcttattgtgtatttgaatgtgtctgtacattgtgatacagcattgttctgatgatgatagtacaacgaggccactcttgcttgttacagcttctgttcataagattgtcttaaagaagccgatttgtgtcgacattgatctcaagattgttgcttctgtcatttgggttggtcgttcatctatcgagattcaactcgaagttatgcagtccgaattgagtatgtgtatagtcgtatactaattcaacttacaagcatgtatcttggaac

SEQ ID NO: 60414 - DNA, 123 bp, Arabidopsis thaliana landsberg
cgcactctttcaaggaggccgcttctaggcaaacctcctggctgtctctgcacccctacctcctttaatactgagcggccatttaggggccttagctggggatccgggctgcttccctctcga

SEQ ID NO: 60415 - DNA, 244 bp, Arabidopsis thaliana landsberg
  unsure (1)..(244): unsure at all n locations
ttgaacttcatgtaacataaacaagtttattattttggggggttaataaaacttatccattatcaattttctttctcattccaacgtgctaaaattatatattatatatatacaatgaggctcatgaacgaaaaccgtggaaacatttaaaggatcggctttaaatcaccatacatatatgcaattttttcttgtaatgggagcatgttanagtaagaaaaaatactaacaatttttgaaggtt

SEQ ID NO: 60416 - DNA, 1661 bp, Arabidopsis thaliana landsberg
  unsure (1)..(1661): unsure at all n locations
gatgaagtaacgaaactggaaaagaagtttaaggaaggaaatcacatccgtgttcgagtactcggccttaagcagatggaggggttggccgtagggactttaaaggtatcttactgccagatatgctaaaagattgttcttttagtttcgattattcatttcaacctctgtattgcaatctaaaagcaaataggcagtagtttggtgcggaatcatacgtttataccctctattgggacatgtatgtttttttgctcctgttttacattggtttgtttctttcttttcatgttgtttttatattgagcaggaaagcgcctttgaaggtccagttttcacccactctgatgtcaagcctggtatggtgacaaaggcaaaagtcatatctgttgatacatttggtgccattgtccaattttcgggtggtctcaaagcaatgtgcccacttcggcatatgtctgagtttgaagttacgaagcctaggaaaaagttcaaggttggttacattgatcgtacatgattaatttgcaacattgttgcggcatgcctaagttttgaatgatgttctatttcaggttggagctgaattagtattccgtgtgcttggctgcacatcaaagagaataactgttacctacataaaaacactcgtaagctttcttatgatagtgaatctgattttgttaaattgtttacatattccttgatatgtctagctttgatggtttatggaggcttataattgttcaaatcatttccctcttataatctatgtaataaaatgcatctcgttttaataatcgttccttcttttattttcttctgctgattcaaggttttactttttacacttgtgtccatttctttctggttaaaaatggaaaataagtttcttctttattaaaccatttcacttaactatggacgaaaaatatttggagggacttttgtctcaatttgtatctcttttggaggttaggacttaggagtggagaaactctattgctatttactttcagtcatctattgctaccgtttcaattctgttctcatgcagtaaatatgaaatgtttattctttttcaggtgaagtctaaacttccaattttgagttcttacactgatgcaactgaagggctagtgacgcatggctggataacaaagatcgaaaagcatggatgctttgttcgcttctataatggagtgcaaggatttgttcccaggtcattgctgcacccttttgttgtatttgaactgccgttttctttcagttctggtttccttatactgatattctacacagatgtttttccccctcataaaggctttggttaagtttttctgttttgatggtcgtaaattaataatgctatactgactttgattaaacagatttgaacttggtttagagcctggaagtgatccagattcagtgtttcatgttgnggcaggttgtcaaatgtagagtaactagtgcagttcatggtacccgaaggatcacccttagtttcatgataaagccatcaaggttttccctattttaatctgatattcatctcgcataaaggctgtcttgatatccttaaattctgtagctcagatttgtgtaaatcatctgtgacagtgtttctgatgacgattcgatcaagttaggtagcattg

SEQ ID NO: 60417 - DNA, 888 bp, Arabidopsis thaliana landsberg
tatgacatgataatggtgtccattttgtatatatgttgagattaagaggagaataaaagaaaaatcctcggtgagacagtgcggaaaatgacttttgttttggatggatcaagatttatctcaacccatttagcccatgtggttagtcctctctcataagcaaccattgggtccatagctttgaagatcttattcccatccatgtaataatcccacctaaaacatcaatagcttgcgttactgtcacaaatcccaagtctgaagtaaaatgagacacaataacaaatacaatgaacatagacgtctatgaaccgttatacactaatcatttgcttttgaaggaaagatgtaagtgtttattcagatgacttacgaactccatctctgagagtgagtccaccagtgagcggaatcgaatacaagaacatctacaccacgccaatatctagcattgtcttcgattgagtccaaatgtaacacccttttacggtcaactcctctcttgagttccacaagcagaggagcccaacaaaactcaattgatgtctcaaaatcctgtatagtaaccaaatttaatagttgcatctactaaccaatgatgtatatgtgattcaaaaggagatttgtgattattaattaccagagaatggaaagacatcgtaggaccattgtaagtgagcttcttacgatgagtgggaagaacagactgttctaagcagacaagagattcccactggtttctcatcattgaatctccaaccagcattattctttttcctctcattttcccaagatatttcaatgcgtcaaacctaaacaccatcatggaaagagccactattttggttaatattaatgtctctttcccatttttcattagtcaattta

SEQ ID NO: 60418 - DNA, 533 bp, Arabidopsis thaliana landsberg
cacatgaggatgtgggtggtcaaatttggataagggaatctttagggcttcacaacaagttttgttttactggacacctacacgtcttgataattgaggagcttaccattaatctatatatagttaactaatagcttaaatagcaagttaccattacatgagatctcattggaagagttttattatatttcaggattttatattttaatgattaacatagtagaatgattatggtcaaatcaatgcgtagttgtgtacaatatgattagatcgaaattagtggcaactaattgaccactcacgagattgcattcgcatatctttaaactcccgtatttatatatttaagctatgcacttttgccataattaaccttttgcggttgtatgttaattatatttacagatgtctacgtacgccattttcttttaaaatatatcagtttgcaatatctattctgaatttacgtaataccactgttctttttttttttgacatataacaccagagatatgtcagcttgttgcaaaata

SEQ ID NO: 60419 - DNA, 244 bp, Arabidopsis thaliana landsberg
aaccaaatcacattatttcatgaaatgcttccatgaaggttgctggcaaaacaacacaggagaaaatgcgaatataaaaagctgcaaaactcgctcatagatataacgaatcaaaacattgactcgactttgaaatcccagacaagtcaaactctacgctgcggctttcatagtgagccaccgcttcctacacttaacaaaaaaataaacgtcattctccacacaccattctatttaccagtca

SEQ ID NO: 60420 - DNA, 594 bp, Arabidopsis thaliana landsberg
ttgctttcatggtttttttcattgtaggtacctgtgtagtgaaaggatcaggagatggtaacgaaaaactttggaatcaggatgacacggtcaggcgaatttctcaatttgtactggacattcagccttttgggttagacaaagccacccgtccgtagagtaacccggcctggcccgggtgggtatagtgaattgactgttttacacgattcacccagaggattttgtcatgaccgatctttcatccgttcaagagcccctttcgcaccgtgcccgattgtatgaagcgctggaaaagtcagttgcctgcatcgaatttgatcctcaaggccatgtattgaatgccaatgctgtgtttttaaagctgtttggatatcgggaagaccaggtcatcggcaggcaccatgccatgttctgcaagccagacaccgctgaatccatggaataccggcaattctggaaagacctgggcgagggcagacccgccagcggtgaatttctgcgaagagacattaatgggcgggatgtttacattcaggccacctacaacccggtgtttgatgacaacggagaggtggtcagcatcgtgaaagt

SEQ ID NO: 60421 - DNA, 1005 bp, Arabidopsis thaliana landsberg
atggatttataagaaaaagacgaagaagaagaagaagacacttttggttgaggaatgagactcaaaggttgaactttctgtttgtatcctttagtcctcttgacaaacaaaaccaattaataagtaaaatttagatgaaagcaaatgattgaaacagtttctgaggttttccgtttacctttataccatctggtaacttacgatgggtctcttgagttactgtctgcttcacattcggtgaattacgtaaagaggctctcaggtcgtggaacagatcaaactcaatgctggccacagaaaatctgcttccttgagttgtcgtcgtatcagcagacttacgaagctgcgtgttactggtgaaaccattgttcacaagacacaactcctcagcatcaagaacaccttagcataaatatagacaatgtcagccttgaatatacagagtcaaagctaaatgataaggtttgattgttatatatgagatgaatagtggaatagtgtggaataattgactattcaagtagggtaaagaactttgaagtaaaacgatgagacctggatcggtaaaaaaagcattgtcccaagcaaaacttggacgagcatcggttttcgaaggaagtgtgtgattatgatttacttcaacttcaatctcattctcgtcaatctttaagctcccaaacaattcttcaggatctaacactcctacaaaccaaagtggtaaactcattggattcatataatttaacattttgtttctacacaaaaacaatctataggaaataggaagaaaccagggttggtggaaaaagcagtgtcccaggccaagcttttgcgatggttccatttgctctctttgtgtgccatcggctgcacaaagtcaatctttactcttgctgctgcacaaagtataatcagtttctgaagactaaagagattttagataggagaggaaacagaagaagatgattctacttgatgatgaaccagcttcttaaatccaagcct

SEQ ID NO: 60422 - DNA, 1202 bp, Arabidopsis thaliana landsberg
aaaaagtattcataattttctgatcgtttttgtcaaactttttggctgtcttccgtgtttatttaaatttattttcacctttttcaaaaatcattcatatccaattaccaaaaaaaaaagcatttaactttatgaatagatttgaacaaaacaacaaagaaaaaactttatcatataagtcgcaaacataattttcttccgtgatttcggcaaattctatccacatgcctacgtcttatatagtcgcaaacaaaattttctccggcattgacttttaatgcgttatgatgatctgtcacctgtaattaatgggcttacgtgtaggcccataacggagttaaaaactggcccactaaataaattttgaaatgttcgcaggattaaaggaggttggggatggaggttatcgttaggtttggcgggaattcccgcgcttcttctaacggtcggagctttattggtgacagagacaccaaacagtttagtcgaaagaggtcgtctcgatgaaggtaaagctgttcttcgtcgtattcgagggaccgataatgttgaaccagagttcgctgatctccttgaagctagtcgacttgctaaagaagttaaacacccttttagaaaccttcttcaacgtagaaaccgtcctcagctcgtcatcgccgtcgctttacaggttagtactaccacttctctgttctctcgtaattggtaatcggaaaagtttatctccgatttggagagtttgactgaagtgattttgtttttcgtttaggatctagaaaccctaaaatttgattccattgtggtcattttaggagcaataaccctaattgtttgtcaagtttccataattttaattccattgtgttcattttaggagcaataaccctaaattgtttgtcaagtttccataattttgattccattgtgttcattttaggagcaataaccctaaattgtttgtcaagtttccataaattttgattccatagagttcagtttcaaagtttaaagctaatctttttttttttggtgtgcaatttgcagattttccagcaatgtactggaatcaacgcgattatgttctacgcgcctgttctgttcagcacattagggtttggtagtgacgcttcactttactcagcagtggtgaccggagcagtcaacgtcctctcaactttagtctcaatctactccgttgacaa

SEQ ID NO: 60423 - DNA, 649 bp, Arabidopsis thaliana landsberg
aaaagattatgatttttgtttgtttaaatttaattttgttatacttccataaacaagttacatgtgctacagttgtgagtctcgaactttgagtctccaacccaaaagaaatcgagatacagttatgtgctagtttaaagagtaaacttactcaaaaatatccgaaaaacacaggtaaactgatcccataaacaaaattccgaaaacttagatcaccatgtcgatccggtccaaaagttttcataagaactatcaaccagccttcgatgtttcagactttcagtctatggtttcagcacaataagataatcttgtagacacatagtatgtcttcaaacatgaggtctcttggtgttgtatgtgtagaaacttatttggctggtcttgccttcgttgctaaactgggatgtagacattttcatttattttgattgtactttcgaagtcttcaaaaatgggcctcgtttttatgaccctttatggaaaaaataaagttgtcactctttctcttacgacagaagaggtttggtgcagaatctgaccaaaccctgtaagcaaaatatccattaacataagggtcaaatctagcccattaaatagggcccaaataaagggcctaatagtgaaatgtcaaccctaatcgttcaat

SEQ ID NO: 60424 - DNA, 370 bp, Arabidopsis thaliana landsberg
tgtctttcatgtgttttttgggtatacatgtacattggaaggtataccaaaatcaagggagggatcttaaaaaaagtttgaaagcagcatagaaaagttctttatacgataaatccatagattttcttatacgaatttggtgagttcggtttaaaaaactgaacaccgaaattccagtaacacaacataatgtatatataacgatgtgttgttaattgatatcgtttttaatattactttagttttcaaaccggttttaacagggttcaatactgaaatctgttttaaaaacgggcgatttggtattttattttaattcaggggacttgttcattaatttaactaaggagaaaatatttcctttttacta

SEQ ID NO: 60425 - DNA, 453 bp, Arabidopsis thaliana landsberg
gtagtagctcttcagttccgccgcccttgcccaccacccctccaccgtctccaccgcacacagcatgcccgactctattctcctccccgaaatccccgcgacgcgcagatctcgccccggctcctcgccggcacaaaccacgtgcgcgccctcgacccatggcatccccaaataccgctcccggttcctctcccttcccgttcgcggatgacgcttccgcgcgttgacgttcgcgtccccaaatccccggttcccctcccttcctattcgcggatggcgcttccgagccctcgacccatggcgtgcccaaatcccaggttcctctcccttcccgttcgcggacggtgcttccgcgcgtcgacgttcgtgtccccaattcctgccccggtttggcgcttccccacatcgaggcaccacaccatcgccacggagtaccgacaacgtcgacagcgc

SEQ ID NO: 60426 - DNA, 911 bp, Arabidopsis thaliana landsberg
tgaatatggattctgcttctgtaacttgaccctggaaattatcacaaagaaagtgacagtcaaaccatatgaaaatcagaattctattgaatacacacgtcttcttctgagctcaaactctaagcacttgcctgtttgctgtaagcacatagaaccgaagagtacacctcctttgtcaatggaatactgagatcttccatctccttcaagtaactaattgcttcagggtattttgacatcctacatgaaccgcttataaggatagtgaaagtaacagaatcagctttgactttcttttttctcatactctgatacaatgcaatggccttctcaagttctgcagcatttatatagcttccaatggctgagttataggctgccgtattgagattaatgcctctcgactgtgctgcggaaagtacagtatcaacattcaccttttttttagacctactacaagcagccaaaagagtgcatactgaaacaacatttggcttaatgccatcttgttccatctgccgaaagatttccacagcttcagctagaaacccattagacccataagcatcaatcaatgcattgtaagtaacaacatttggctttctcctttccttcctcatcatgaggaatacctcctttgccttcccaggttgacgtgatcttccataagaattgagcaagcatgtataagagaccacatctgggataataccattctgcttgatatctcctaacactgagagagcagttccactcattccatgaacagcataggcacccattaaggcattataggaaacaatattaggctttagaccttctgcaaccattgcttcgaacacggctctgcagttttctatctctcccttgacagagtataaatgcatgatgctcgtaaatgtcacaacatc

SEQ ID NO: 60427 - DNA, 516 bp, Arabidopsis thaliana landsberg
gtagccagccctgctgggcggcgatagccagcgcatcatccggcaaagcgaagcggtttatgccgatatacacataaccggcctgcatcaggggctggatcgactcggacaacaggctgaattttatcgaccgtactgggcaggtcattctgcaaaatacggcgctgcgagtttgaagcggtaatggcaggagcgcatagtccgtacaaagccaatgcggatcgggcgcaacgaaataaatctgcgtgatggtttcacggaaagtcgcgggcgctaggcctaggcaaaccgcaaaataggtcggcattcatggagtgggaacccatgggggcgcgccaacagcatgagggtttccacctggtggaaagattgcacacaatgcacggcctgttgcacaaacggtgttaaagtcctgcacgccaaaagctcaggcggttaaaacccaagttacgcaaatgctccaagcgctggcaatataacgagcgcggatcatttcaatcgaatactccccttctt

SEQ ID NO: 60428 - DNA, 1065 bp, Arabidopsis thaliana landsberg
ccacgcgctgattcgctcacgtgcgcgcgtacgccgctaatcttccgtcccattgaaacggtggttctcccacgcgcgctcttacgaggttatgtgcgattaaaaactctctgctcgctctgttgactctgttacgacgtcgtattctcctccacctgaacctgaacgagaatcggtttccggtgaacgaaggtggtgacaacagaagccgagtactcgtcgctgacggagagtttttaacggagggttttgtggaagactcttcatggttaatttgggccgttcccgaccaaagctgaaggaggaagaacgttatgccgacgaagatatgtaatggagctcgtattttccgtttacgaagctccattacaaaaaaacaaaacaaaggatcaagtttaatcggagagttaattacgttaattgtaggtgaaaagtgtaattaactctaaaatgcaaaattgtgagtggaaactaattaatagaaagtcaaatgcatggtgaatattgaagatcggaacaccattctaaatcaattcaaaaatgtagtaaacccacctacaattaggcaatacttaaattgtaaatcaaaaccaacccaaattatatttgaattatatgctatactcaaatttaaacaacaacataacaagaacatgtagctcaagtttatcattattaataatcgaaataatagcgaatctgcatgtctcaaaaagaagaagaataaagaaaattaaagagcacgtctaggctttctcttaattttctggttaaagttccaaactttcaagaaattgggataatggttcttgattaaatcaataggcttctttaaaatggactcgattgacacaccacttggtatattctcaatcttcatgtacataggagctcttggatcattaagagctatacaccattcactgaacacattcgtattcaaagacagaagctttctcacacaaaatcctccttttaacgacaatcccatctccactggtttataattcccaaccgcatttcttattcctccggctatattcccgatggaatcttcgactttct

SEQ ID NO: 60429 - DNA, 114 bp, Arabidopsis thaliana landsberg
tttaaccatgatcttgaaaataaagagcaaaagttttgactttgaccattatatttgacgcaaggaagccggttacggttcaaccgaaccaaattaaggccaaaattgtgaacc

SEQ ID NO: 60430 - DNA, 547 bp, Arabidopsis thaliana landsberg
  unsure (1)..(547): unsure at all n locations
tgtattgggcttgggcctcggatgaatggccaatattggccgcgacgggccgtatatctgctggtggggtctgggagggtgaagtcatggtagtgtcgtggtctacactattgacttaatagatagtagagatatacataagcatccaaacaagattaatttttatatagtcttttaaatcctacaagataagattttctagacaggatggagtatactactcccgcaatttcaaaacaaaaaaattctagaaattttgaaaataacaatagctaacaaaaaaatctaccgcctccatccataaaataaggcgtatataattctttgggtaaagtctttaaagtaaaactttgaccattaatttcttttaaaatatgacatcaacaaatacaaattgagcatcctattaaagtatttttcaatacaaattcaagtatataacatgcatacactaaaaaatatgtttttactgaattgntcgtgaaagttttaaacgttgacccttttaaaaacacacacgcctattttattgatggtgggagattta

SEQ ID NO: 60431 - DNA, 1220 bp, Arabidopsis thaliana landsberg
atttggagtttctctatccgctcatcggcatcttgtgagtctaatctttagtgattgggtttgattttgttgatatcgggattgcttcatttcccactcattcgctgcttgttcatgtaaaatttacccccaaaattggttgaatgtagtgagcatggccaacacaattcttcgcgggcagatgatttttcaggacgagaatgcattggcggcccttggaaaaagtaatttttacctacactgcaatctctgggttttttgctcccttttatcttattggacaaagaaatcgtttttttttgtgatgactcgtttgtcctatggttggaaaatctttggagactatacgagaaatgaaacatgaaggacctaccaagttgcgaatatttctgtctttttttctcttggattcatatgagaggtcttggtttcttgaattaagagcttcttattattgcttagagatacattcatgaatttgcttcagggtctgtatttataatcatgtccaatattatgcttaggatcaaatttgaactaagttttgttttgtgtccatcttgtatatgtttttattcatcagtgtaagcatgagaatgtatgttcaccatggaacatgtttttatttatagaatttctgtaattctagaggtagagctcctggcaacttattatgtttctaaagtctttttttttttttttttgacattgtagaggcggttgctgctggaaaaggtaagagttcactcgcagctccaaagaaaaatggggcgggtttcggaagccgcaaggctctccatgacattacaaacaagtcaaagttgcaacctcaagcttcatccacgacgaggaaggatgttgagggagtggattttgacatagcaaaggaaggtttcttgcatgatcacagcaaatgcattgaagaacaacaacaataccagtgggatagctacttctctgaacacatcatcctgcatggacatggtaataatgacttatgaagaaagaaccctttttctctatcttatgtttcctttgcttggcttaattctctgaagcctaatttttgttctgcttttcagagacaaacatcaaagaaggggttcctcaatacaataatattcaagaggtaagattagcttttaccttaccttgtctttctctatcttgattatgttgagttataagagaatcgttcttctaagatcgttggttaatgc

SEQ ID NO: 60432 - DNA, 989 bp, Arabidopsis thaliana landsberg
aagtttgttcttgccaaggccatgaagtatggactacgcgcaatccttctcttaaacaaggtaggatcgaccttcaggtatgcattgcattcactccctttcttagtaaaacttgttggtcttgtttaatatgtttagtttctcatccttttttttcttgcttcgtttatttacagtcacgaaagagaggtgtgatgaagtggagagtttggtgtttgatctttttgcaaattgtggtgctacaggtgattaatatatcaaagtttaatatatgtattcaaattaattttcgaatcattactaaatcaacatttcttctttctccattacttagaggaacaactagattttccggtgctttatgcctctgcaaaagaagggtgggcatcttctacctataccaaagaccctcctgtagatgcgaagaatatggcagatttgcttgatgccgtagtaagacatgttcagcctccaaaagcaaaccttgatgagccatttctgatgctggtaatataaaactccagcgaatgaaatttgcttggccaatttctttcacttttctgattgtccaatatcaagtagctgatctttgcattgtgctctttaactttggacgaggttaactaacacagttcccattgatttctgtttggcattccacagtagacttcagagaaaaatcggttgaacttagaatgtttgttaagtaagtagacttgttgttgtgagtttagaagcaactatatccgtcagtaaatttcaagaaagaacaagtgattttgtcaaactaatttcctcgggaaaggaagacattggttggacacttcatgagattatattcagtttatgaccttcggctttcctagtttgaacgtattcatgttatgtagtgaatgtgccaagatttgaatagattcatttatacgtaactattatttaagggtataaaatgtctgaactgctaaagccctagcatgattttaactatc

SEQ ID NO: 60433 - DNA, 1126 bp, Arabidopsis thaliana landsberg
gtttttttttcattccataaaacgaaaggaactcctaatttccaaaatttagtttattccacagcttttttaacatatcgctcgcattgccacattggtccagacctactcccctttttatttacaagattgccactttaaagagttggataattaatttagtttaaactaaacatttttctgcaacaatatagtaggaaaacaaaaagctagaagaaaaaagaaaactgtgaacgcacgcctgaatgcatgtgattgcctaccctacgtgaagaaaagacgatgcaattacagaagtaagaaaaacattttctccaccaatattcaatgacccttactaattattactatttcaacaaaacgtttcctacgtaaggaaggcaacagattcatttgatgtcatttttcaacgacaatagacaaaaaaaaagtaaagcaataataaagtaaagttgtacactacatatatactttttaaaaattgttgaaacacaaaatgtgtgcaaatttataacagtgtatacaaaatggatgttcaactacgtcaaagactattcatgaagaaaaaacggtcgtgacaaaatttagacaaattaacaatatattaaataaaaacttttaaaataattttagtattacagaaacattattagataaattcgcaatatttttgttctattgaaagaaaaacaaaaaagaaagagtaagggatcattacattgatttcacacatacaagtgtcggattatcagtgtcacgtggtgtttaaaatgtagacatttcaccatgtggactaatacattcataaataatgcagccatcgacgacgaccatcaagcaacttttatatgtggaaagttttttcaaaaattattagtaagtggacacgtcagacaaaacagagagttgaaaaaaaaaaaaacataagtgtagagagagcgaaagacacaagtggagctggtcggaagttggaaagttggaaacagcttagccgcccacgtcggccctacaattgattcgacgttgttaagatataaagcccaattataatgtacttaactaaaaggcttttactttaggcccatatgtagatctttgttttctttttgtaaaagttaaaacacca

SEQ ID NO: 60434 - DNA, 1188 bp, Arabidopsis thaliana landsberg
agaactgatttgtatatattgatgttattgctcatttctttttgtactggaacgttgactgcatgggtggggtgctttttcttctatttaaggcattcccgctataacttgcgttgatttatgatttgtagggaagatttccgtgtgacgtacaaggaggagcaccctaagaacaagtctgttgctgctgtgagttgtgatttgatgcttttccataacttatttgatgtgtttttgtttttttggccgtagcttttgtgtttgaagttgttgctgacaatgagtttcaatggattataggttggcaaagctggtggtgaaaagtggaaatccttgtctgactctgtacgttttctaagcttagttagccaaagttgtgtgtattaagtcaattgtttcaagcgttttatgtttgtgtttattaacctgtgggtgttataataatgcaggagaaggctccttatgtggctaaagctgacaagcgcaaggttgagtatgagaagaacatgaaagcctacaacaagaaattggtaattgtttatttgcatatagaaggctatgttatgtttatattaaccacgttattgagttgtctactctctttatactagtcagtagtcacactattcaaggctttcttaatttgtttactatatattgaagtttgagttatgtttattctaaacaatgatgatacaagcaactggtaatttggttaatgggggtgcttgaataatagtggtgtgttgtggtttcaggaggaaggccctaaggaagatgaggaatctgacaagtcagtttcagaggttaacgatgaggatgatgctgaggatggcagtgaagaggtaagttattttacacctctgcaatctaaacatctgtagtatgaatcagtaaagctttgtattaactctgttatacatgtgatgtaggaggaagacgatgattaagaagttgaagttgtggtagcgtaatatagaaggctgcaaggaatctctcggatgtttttatctcttctcttaaaatgttaattcggctggttaaagtggttttttttttttttcttttctttttcttactgatgtttcgttttagtaaactattacctatctcccactgattctacgggtaatggaaaaatgaatgtagaatgtttagatggtgaaatgagagatttgtagcgctata

SEQ ID NO: 60435 - DNA, 144 bp, Arabidopsis thaliana landsberg
cagaagtagctagacacgaacaacgggggggcggcagaaacgaagacagagggcagccaagcgagcactcggtcgagccccaacgcgaacgcaaaaacaagggggggaacgcggacacagaaggggaccacaaaaacccaggga

SEQ ID NO: 60436 - DNA, 1677 bp, Arabidopsis thaliana landsberg
ctaacagtactaagggatgctcacccagtttaaataaaataaaatcaatacttttttggtttgtactaattaacatatatatatatatatattcccaaaattaaagattccatggctaacagacctaaagaagaagaagaacaaacacaataagagattggtgcagttttacttttactatattcatctttgtctttattgaccaataaagtaatttctcccctttatctatttgatagtggtatactttaagttgctttttaattgctggtgtacaattatattggactcaccaacaagaatctgtgtgcagtcagtgtgcttgttactattgttttatctcattaattgatgatcactttttcaccttcatacatgagagctgaattcatcactttgttagttatataagttgggctattctattattaacagtttgatttttgacagtaaatttgtctgccagaataacttatacacattaccacccaaaaaaaaaaaaaaaagaaccatttttggacattacgtggttttgggtttgtctagcgaccttttatgggccaatgatatgaggcccagtaaggaaacaaagaacggcccattataatgtaaacatatttagtacaaggaaaaggggtaaaaaaggaacacggggaaagaaatgagcgcgacgcagacgcagacgcatggaccgcactcgctggccttcagggtgatgcgactctgcaaaccgtctttccacgtcgatcctcccctccgcattgaccctttcgatcttctcgccggcgaggatttctccgacgatccctcttccgcctccttgttccgccgccacgtatcttctgccgacgctgtcgactccgatctcagctaccgaaatagattcctcctcaaccatcctaccgatccaatcggtctctctggtcttctgcttcttcctcagtccttcgggttctctctctctctctttcgtttctcctgcagatttttgccctatatatatatatatattgctgtctgattctgattgtttatttggttgcgcagagcgatctatctcggagaaacattctgtagctatatcagcgtcaacaatagttccacttcagaagttcgggatgttaccattaaggttcctcacctgcttccaacattttgttttccttgaaatctgaaatctatctactaatcgatggattatcactaagattcgtcacctgcgtacttcatatatatgtatatatctttcgttttttctttgggtcttgctcttatttcactcgttcacttcaatctctgctgtggaatacttctaagaagtttttgttgtctgcttcgtcttggaccttgaattgcaaacgtcagaaccaaaacgatgctaagctatgtatctcccatgtattattattgtaggcagaaattcagacagagaggcagaggattctacttctggatacatccaagtcacctgttgaatcgatacggacaggtggacgctatgatttcatagttgaacacgatgtgaaagagcttggagctcacacgtgggttttctctgactctcttccttcttcttgtccttttaaattgctccatggccatgaccctcattcttctcttaggttggtttgctctgcattgtacaatgacgctgatggtgagcgtaaatatcttccc

SEQ ID NO: 60437 - DNA, 584 bp, Arabidopsis thaliana landsberg
  unsure (1)..(584): unsure at all n locations
catctcttcatttgcgtttgattaaaatgaaagttatgcgtatttttttatgtagatatggctagaaataaaggtgggattcggtctgggccttcagaaatatcaaaacagagaaaacagttgaaggcaattatagagtctcttcttccggcatgcatagagcctgatttggaaactgctacgtctttcagagctcaagcgataattgcaaatcctcctgcatatggtaagtccatcacccacttcacaattctgttgttttcattactcctatgaagctgatggtatggttttggttctaattgcaggacatgtgcatgttgctgaagctcttggagtaccaattcatatttttttcacaatgccttggacgtgagttgacttctttgctttttaatctcaaggtcggtgcacctgccttgacgtgttttttggtcctgttttctaacgtcctcttcctgtagacaggccaaccaatgaatttccccacccgttggcgcgtgttcctcaaagtgctgcatattgggtaatgttattaattggattggccttaactggttttttctatgactaanagcattatg

SEQ ID NO: 60438 - DNA, 101 bp, Arabidopsis thaliana landsberg
  unsure (1)..(101): unsure at all n locations
attttcgaattcacatcatcaccttctccngggggggtgtttttctaccaacaccaccactgcttataaaatcatccactgttatatcattatcatcccca

SEQ ID NO: 60439 - DNA, 464 bp, Arabidopsis thaliana landsberg
ctaatattgttactactctacttaagcgagatgaattcgttggcgtactcagtatgctacatatatgcatgtatgaccatctacattcctccaagtggttctcctgatgaagtaatcacttttgggcggagcttcaacaagaatgaaagaggcatctatttgtccacgaagacattagactatacacaggcaagatattcgaagttgctcatataggtgctcatacggcttgtttaggttaaatttacaccatagaggaaacgtccaacatcttgtgctcttgatgttgtcggcttgaatcctggcgtgtaaatctgaaccagaagtgctgttcagttggtcatatttctcgatgactgaggaatgttcccaggttatttcccccaacgcttgatggtacctttgtagaagcggggtcggactttccgatggaccggtccatgagccttggttcaaactcttgg

SEQ ID NO: 60440 - DNA, 564 bp, Arabidopsis thaliana landsberg
  unsure (1)..(564): unsure at all n locations
tatatgatcttatatgcgagtgtccacatacatcatgtgtagcctttaagatctaattgattctttttaatcacaactatacttcgtgaaataaataagatgcatgaatcttaaggcataagaaaaataattatcaacttcgagatgtatttctattaaacataacaatggttctaaaatcgtaatctagattccgtgcatgttcttaattattttggtcagtgtttttccccaaaatcgtacacgaaaaaacagtttttaaacttagtttaagaaacgtacaaaatctttgaacgatcgacgttgttctccgcttaagcatctcaaccacataaatagattttcgaatcgcacccatgttttaattggacatgttgacatttaattatactattcttatagatcgtataagatatttttctccaataatgtatattatgtatatatgaaagtaaatgcataaatattagtgtgggattatatactcataacaactctatttcaattggaaaaatatgctataaagttggctataaaccaaagattaaacangattattagatt

SEQ ID NO: 60441 - DNA, 488 bp, Arabidopsis thaliana landsberg
gatgagatgtagtgggcttgggcggaagactttcctgtttttcgatcttgggtttggtgtaaggcgcaggagtcatgaatctgtagtagaaaggtttcatttcaggatcatcctccgggccagtcatacaactcccgcttgtactcatggagtcttcttcgcttgtactcattatggacttgttgctgtcatccatcgagtcttctctgccatggaacgaaaggctgcttctcttttccatggtcttttcgggttcgtcgttggtcttctctgtttttggttcttcagtttccgtctgcttatgaatgagagagtctggctcaaatcaaatggaatgatgtatttaaagcagacaaagaagacgactcacatggacatgatgatgatgaggtggtgtgtacaatctctgctctaaagacttggcatcccatcttatggagtactctctggcgatttcctgcagcagctttcactttcatttcctttga

SEQ ID NO: 60442 - DNA, 616 bp, Arabidopsis thaliana landsberg
  unsure (1)..(616): unsure at all n locations
ggaggttgatcagtgcagcagaggcggttcctattcagaaagaccacattcacgggctggatcaattgatgagtctaggagtgttgaatccatggaaagacctagatcacatggcacaggcgataattggccaagaccagtagatgatcgaagaaacttccaaggaagcaaggaacgtggattcttcaacaacagaaacttcgacaggttagccttttacatctgattcaatcccattccaaggaacagacttacaatatactcgcattcaatagcttccttcctacttatctggggttgacatgaacccaaaagttagtataaagatccaaacttgggtcattccttataatgtttgcttctgtgtatcaagatcttgagatgcgagtaaactgacatttcagattttcgggtttcacaggtcatcgtcagcaagggaaggatggtaaaaaaggaaaggaaggatgaatgtggaatgagattggagtttggctgacacaccattctcagattttgaagaagacagataagagagaagctttcataacattaataagaaaaattcatctccttttttaaaaaacctaattaggggntntttggttttttggtttta

SEQ ID NO: 60443 - DNA, 464 bp, Arabidopsis thaliana landsberg
gatcaaatttggatgtgaactcacgctctcattgcataaatgtgcaggtagcccaattatatacaccagatttctctggataaccctgacactagccagatgcttcttagattctacagttgatgttgctgctgctgaaggtgctgcctttggcttaaccttttgggtcctgtgcttcttctctgcatttttctctgccactgtcctgcttccatcatcagtgtaaagttaagtttgagatacctagtggcaaggtcaacttcaacagatgggaccagttaactgagacagaaataaaggctgagaagacctacctattcttatatgatatgtaaaagggtaatcaattgcaaatgttgtagtatgctgaagtaaaacacaaattgattggcaaaagagatgcattgtgatggacctgtcacaagtggcagccatcttgacgatcctgtccttgtcatagcatg

SEQ ID NO: 60444 - DNA, 1737 bp, Arabidopsis thaliana landsberg
cgaacctagtgccttgaatgataacttggaagaaccactagtagcagaggatgattcatcattcttacatcccgacactaacttctatggagaagaagaagcagaacagccgagaaatgctgttacaaatgaacaagtgtcttatcaaatcgattcaagtacccaaaattataattctgccacagattctaagacagacgcagtgcaacatgaaccgcctcaagaagaaggtcatcaatacaagttttcgtcttccgaaggttacagatttgaaaacaaccaactgttccatcctccatcagaaacaaatcctcagaggcagaatctcgatacctaccccaacataatggtaaacatcaaacactatttagatttaaaaatctatcacacaatcgaaaaggatcactgaaaagattttaaccatatctactattttttttttcttaatgtccagcagcaaggatatacaagttcgttacccaacactctactcccatcaggcattcaagatggaagagaatctaatcttcactactcgcctttcacaacactatacaacactgaaatttccatggccgaggtaaccaaatccccgtttctctttcatataatcttattctaagctttcctacaataccattgcttacacaaatttgattgcaggcactaagagctgcgagtatttcacctcaaaacgcaatacccagtgcaggacagcaagcagcaactcttgcacaacatcttgccttaaatccctactctcatcagcctgagatgcctttaggacattatggcaatttgataagctacccattcatggcacagtgttacaaccctttcatgctttcagcttttcaacaagtgtttcctactggtaatcatcagtctctagttgatatgcttatgcaatacaagactcaaacaaccgctcctcctgttcctcctccctctgcctatgggttcggtggaggcgctgtctcaagtaataacttccctttgaatcccacaagtgctgcaaactcctacgaagatgtcttgagctcacagtttaatgagagcaaccacttggcatcatctcttcagcagcaggtaaaccataaaattcttctcaggttttataatcatgttggtgtgttttggttctgtttggtttccttcctctgtttagtcagctggaatttatactggagtattcgattttatttatttttgttcgattttggatgggtttggctcagttttgaactgttggattttaagaaaatcggtgcagtttggtttctgttatttgtgcgttctctttttcgcaaaccttaacgagtagctttctttgttttgctttgatctacagaacgaaaaaacaacagcatggcatcaaggacaacaagccaactcgcgagtggttccaggaagcggatattacagctaccctggtcatcagaatcagcagcctcccggttttcgtcaacccaacaactgcaacatcagcagcagtcgtctcaactacaacaacaacaacaacattatggaggacatgggtatgtgagtccttaccattcacaagctgtaatctcactagaacatcttcatcaccaataccaacaacagcaaaacgctagagacgcgtcgaaacagtcccaacaatagttatggcccaacaactactgatgaaaagcaatccattcaaatccttctttcccccttattttcatctctcattccagagcagcgatggga

SEQ ID NO: 60445 - DNA, 464 bp, Arabidopsis thaliana landsberg
acatagcccatgccggccactgcgttcactcgcgatggcacacgggccagtcgcgcggtcagcgagccatacaccgcgcatttaatggtgaagctgtgtatcaaatccgggcgctcgcgccggaacagtcgccacatgctccagagcaacgccgcctcccgcagcggattgaggctacgccggtccatcgggagcggctgccatcgcaggccgagtgagcgcaaccttttgccatatacgcccgggggtgagacaaggagcaattcatagccggcatcatttaacgcctgcgccaacgatcggcggaagttgtagagataccagtcggtattggcgaacaggatgatcctcataccacagcgcacttatccagacagtggagcaaaccggtagggcacccagtactgggcattctgtgcatagttcaaccaaacaaacagcacgactgcgtaatatgcaacgct

SEQ ID NO: 60446 - DNA, 475 bp, Arabidopsis thaliana landsberg
tttattcagatgaaacatacctatggaggattgggggattataaattcataaaacatattcatatttgaactatagtttagtcgttaaggaaacagattataaaccgtacgtggaattatcaattttgaatcaaataattccaataacccaaaacttgccatcatcgtccaggaagcaagatgtaaactctctaccctatgaaatctcttggctcacaaccacgtaaactttttcagtttaaataaaataaaaaaataagacaatatagaaacaaaatcaatctaaaagtcacgtctgaacaacacaaatagcccattacggcccagcccaaacttgagacctgttgaggtacatataaataaatgcatttttaagatcttaaaagtgattacgattaggaacttaaaatgtagaattatttcgttcatcattaaactaagaaatggcgaacgtcattttcaaaacaataaaata

SEQ ID NO: 60447 - DNA, 567 bp, Arabidopsis thaliana landsberg
ctcctgaccacttatgtttcaattacatgttgttatttcgatcgcacttcaatcatttttaacatttgcgactaatttaataacccatagaggaataaatgttgtaagcacgtcgtgatcatggtgaccaattatctcggttgtgtatgttctgtcaacaatcttttcataatcataagtcaaaagtcaacgatcaaccttaatccttgacttgaaaatgaacaagaaatatatcagacaggcgatatctgttttcttgtcataaacacctaaaataaatggagagtcttcaagaacttttgctagctctgatcattttagcttttgccactacttcacatttcattctagctcagcctgatccaaaaggtacactcttataaacactttcctctttacaagtcttgaaattttacatttttcgatttctcttctatatattcgacatgatttttatgtcgcctcttaccagaattcattaacttggattgcgggttacaccctgcggtatcgccttataccgaaccattaacaaacttaacatacctatccgacgctaactttacc

SEQ ID NO: 60448 - DNA, 1506 bp, Arabidopsis thaliana landsberg
tttttctctgcggtctccacttttattttctccaatgcttttttcttgatttttaaaacaactcttgttctttcttcttctgttgttttgtcaagtttcaaacgttgtttatattattttttttaaactgttaaccttaatcttctttctatctctttaaaatgtctcaaaaaatcaacgttcactcttataatctccaatcagctatccctcacattacttattttaaaatgaaaatatatttgttttttttttaatgtcattggtagtttaggagaaaactattccacttcttttgtagactgctttcccacaataacatttggttagtttttaatattcatgttccaaataaaactaaaataacaaatttcaagaaaaaaatagtttaatgatgcgactttaagttattcatcagtgtatcaaatcatcatacccacgtaatcattttcgagtcttaatggacttaagactccgaggactagggatgttaaataggagtttttttgtccggtctagttctatatatttagagtttagtcttagttatctaaggttcggcgaatactaaccataaaattgttaaaaccaaatttacgcgctaacaatttgataatacaataaaaaatagtggagatgtgcaattcaactgaaaataaaatgtggtacggttttaatagtaacaagaatatgtatatccacatatatgtgtttttgttactattagaattttatgatattgtacggttcggtttcgatttggagtctcattgataattcaacagttttcgtttttcttctgcggtctacatacttctcgacccttgcgtcatcatatagctattgtgagatagtaagagactggtttagcacatagctcaaattccatatgtttaacggccaagagtccataacaataggagaaggaaagagaaatatcattatttgtttgcatgatgacacaatgagggcaaacataaagtggaagacttttcttttgtttctattagaacgtaaatttggtgtaacactagttttaacacgtacaacgcatatctatatatttacatatattatatttataaccaaagtgatagtaatagaataatagataaaagaaattgatgagggaaatggcaaaaaaaagtaaaaaaattaactgttaaatgaaacataaagagaaaataaacactagctaaacaaattatggcaaaaagaagaagaagacgagaagatacaaaagttaggtttggttgggtcaaactctaatcaaagcctaaagcttttgtacctaatgaaaaacataccaaacataaaaaagctaatccaaaacactatccatttccttctttttgagattatgactttctatcgtacaaaagatgataaagatcatcatgactactctcatacaaggcttttatgattgccaagagggtgtttctctgagagaccaagtctataatcaccaagcttagacttgttagcagaagatttgttttgaga

SEQ ID NO: 60449 - DNA, 334 bp, Arabidopsis thaliana landsberg
gcagcagataagtccaccgtctcctcaaatccgatggccctcggtgacagcgccaccacgtcgtcggtggccaagctctccatctgcggtgcggacctgacggtgcttctacatagttgcctcagctgcagccaacgactgaaacaacctcctcttcgaccgtgcttcgcacctgcccacgccatcggtagaagcccacgagaaagaagagaaggcaaccgctcaagcagctctggcgcaggcttcaagggaagccagaatgaaagtagaacgtgcagccgttgtgagagcaactgctgaagctcaggagagggcaattgaaaaggcaaaagct

SEQ ID NO: 60450 - DNA, 1610 bp, Arabidopsis thaliana landsberg
  unsure (1)..(1610): unsure at all n locations
cataaatataaccatatatcatatccctaatatgtcacaagacagccattcattctcagttatggtcaacaacagaaatggctattcttttgttcccaatcaacccaattatagttatgattcgtatacacgatcgtcgggttggcgaggtccagctttctcttcgcggaatgcttggtctaggagtaattcagtaaatcaacttttcgtcttgtcatagatatacacctaggaatgttttagcctccttatgttttaatattctctttcagatagttaacagacacttgatcgatgatcccatatccgcttactcaagaacatcgatttcatcaaccgtgtactaaaaatcatcatcctctgattattcctggttttgattttgtttcaaaagtatagtctttacatcctctttcagaacttgaaaaattatatattgttcttggcagagatttagtaccaccatcacatactcggcatcagattccaatccgtaacagcaacaacctgcgaagacaacacctcgaggcactaagacaagccgnnnnnnnnnnnnnnnnnnnnnnnnnnnnnnnnnnnnnnnnnnnnnnnnaaaccaatgaagaagacgagatcctcaaacatctaacaaaagaaacatatagcccagttccaaaaagcacccttctcagaagcctgagcttatactacagaaacaaaaacccgggaagcgaaagctcaagaaacactcaaaatctctcaggtgaagaagacgacaaaagatgctccgtgtgtttagaagacttcgagcccaaggaaacagtgatgctcactccttgcaaacacatgtttcacgaggaatgtatagttccatggttaaagaccaaaggacaatgtcctgtctgtagattcgtcatactcaagccgacaaaacaagactcttctcctccggctaatggatcaaatctcaccggagacatgacaacgaatgatctcttcacattagagctactctctgtggtaagagcaatggaagaaactttccttttcggtaatcctcgtcgccgctagaatctttaattgtacttgaattctctcaaatgatattaaatttattatttgggtttccttttttaaaaaaatgaatccaccattgatacacctttacagtggaaaataaaaaaattgtgtttttttcttttggttttggctacacacacaaactcatctagaactatcacagaaaggaatggcgccaaaatcacatcttcgatgttgctcctccgtcgcaacagtcccacggcggaacacggaggcgcaatcaggtaaatcaccgagatcaccgaacaaagactcatcttcctcttggcctactgaaaaacctctctctagagttacgtcgagtgananaantttnttttccccgggggaaaanaaaaaaaggggggggaaaaaaaaaaaaaaccccccccccaaaaagggggaaattttgggggaaattttgggggaaaattttggggaaaagggggaaatttttccccgggggaaaaccccccggggggcccccggggggtttttttccccccgggggggttttttaaaaaaaggggggggggaaaaaaaaaaaaaaa

SEQ ID NO: 60451 - DNA, 532 bp, Arabidopsis thaliana landsberg
taagactaacaatcatgacctacacaacactcaatcaatagatcttgagcatctctttcttctcgaacatctgcgggtaacatctactttgtaattttcgtcatggtagctgaaagaacaaacatattttttatcagacaaaaatacagagtcattgcattgagtaacctgaagccatagctagagctagatttacaaaatctttcaatttaaccaagaaattgacagaaccaaaaattaagtagtagatcgatccaaagaaggaaacgagaccgaacctttcggaagcgaagcatcttcctttgattttccaactatatccatcggatccatagttttaaatctacatgatcagaattcaaaaggaaaatcagattaccggaagatctagaccgcgaagttataagatgaagaacaaaggagaaaacagagatagactttaccgagtttaacacggatcgaaacagaggcagatcaacgactgaaatcccgtgagttacagactctagagacagattcacggctagatcgg

SEQ ID NO: 60452 - DNA, 479 bp, Arabidopsis thaliana landsberg
  unsure (1)..(479): unsure at all n locations
acagttcatactttgatcaaacaggatactttcatggcaaatctgttaagggatccaaagcataccagagaactcattgcagtatgcaaatgacaatgcattgctaatcggaaaggttagtggatcaaacattctactcttattctttaatgcttatcatattgtggaagtcgatgatactgctttgtgatgctttgggggtttatagagtgacattttgtcatgtttttgttcttttgagcagtctctaagagggtctcttctagctctgttttatgcgtcaaccgtcttgtcaggcttcacaacagctgggcttatcctactcgctaagcagctttcatcagaaaaagagtgaattcataatccttcaggggtggtctctattactctcatgtacagtgccaaatattcaaatttacaatagtaaatttttctactttctctgtctatgncgtaaaactatgaatgtgttgagtgta

SEQ ID NO: 60453 - DNA, 1186 bp, Arabidopsis thaliana landsberg
  unsure (1)..(1186): unsure at all n locations
aagacagccgaaagccgacaaattaaaaaggagtcaaaaaatagatgagatcggaattaaaaaaaactctagctggtttagtgcgcactgcaggagtcatagatatctttaaaagttatcatatttgatatgatctaatctcacccgaaccgaaatcgatcatacaatgacaatgatacaaaaattcactagaagaaccatctctcttcttgttatatatcctctttttcttcatatacgtttcatctatttcctcattagttgcccaaattaatacttttaattttactaattggtcgtcaactatataatcccgaaaagcaaaccttttcttacgactttcttaaccaattaaaaacacaaatcccagtaatatttatatagaatgaatgaatcaacactcgtaagatagtaatttatatcaatattactaactggcagtctctacactctataactgaatcgctgtacagaaaaagttggttcgaggcatttttttttcctgacatcaaagttagctagagctagagaggctatatataaaaataaaattaatataaaagttggttcaaagttcaaactacctttaccaggaaaaagtttgtatttatataatttgcgaaacgcagaaatatgatttttttgaaatacattgtacccaaaaggacagaggagcatacgcatacacacatacatgtacgtgtgtatatacacatacgttgtcgagattgtctaatattattatatcaattcaagaatctagttactttggactttggatgcatatttggttttccagtatttgactcagagcgcaaatctcgccgatgaaccgacacatagcattcgtatacaaacacatgtaattagtgatgtaactagttgctcattttataaattaataatcccaaaaactagtcgataacatgtaaactgtaaaccgataagttatctatattttgcttaagattcaacttatattaatacagaaaatcgcatttttagtcagatttagaatgtgtttaacaatcaaattcttgtatggttcatatgagcaaatatagctaacagtctaaaacagaacanatatatagaactaaacagtcggtatttatgtacgtacacatacatctataatcctataatcattgactctttttttggtttggttagcaacctataatct

SEQ ID NO: 60454 - DNA, 1707 bp, Arabidopsis thaliana landsberg
aaagcttcggtggcattccactaagaaatggatgaatatctattggtcagtgttgatatatcattcatttcttaataataaacaaacaaataactgtgacattatagtctaataatgaatgtttttactactaaatgaaaattaagaatattaattccgagtgggaacttggaagggtcgagagacaagtcacgttagttgacagcccattagtatatctctaattggccattaatattttctgaccattcatctattagaaaagttgaagatcatattccactgacttctgcctaatctatatgtgtctaacttaatttttttttacataattataatactctttctagcaaatacgagatatatatcaaaaactacatatattagcaagaagttgaaacatatcgttagttgattttgaaattgattaaaacgtggttcttaggaaacacttttatgaattaatcaatgttacttaagctttttaaaaactttatctcttcttgcttcacaagtgattttcacacttctcttaaagagattgcatcagcgaatattgataacaagaaattggaattctcataatatttattggaaaattcgaattacttaatcttaactttttttattattattttaaagagaaacatttcaatgtttatttgttcataaatagttgatattaaatatactataatattgtataatgtaaaattactttatatatgaaatgttaatattattcgatataacgaatttgattcttatttttctcttacttcaggaacaaggcgctgatggtgaacgccgatatatgctcaaagcttcccaaaaatgttgaagttctcgaccaatcaacaagacatgcctttgccgagcttctgctttcattgtcatctctaaccaacacacaattaccagtagcttcatcacaaattataccgttcttaatggacacgatgaattcagattcaacagatatgaagaccaaagagatatgtctagccaccataagcaatctctgccttgtgttggaatacgcatgacctttggtcttgaacggggcagtggagacactcctaagcctaatgtcaactaaagacttgtctgagaaggcactagcgagtctagggcaattggtggtgactcaaatgggtaaaaaagcaatggaggattgtttgcttgtgtctaaaggtttaatagagattctaacatgggaagatataccgaaatgccaagaatacgcggcgtatatcttgatggtattagctcatcagagttggagccagcgtgagaaaatggccaaggcagggattgtgccggttcttcttgaagtgagcttacttgggagtcctctggttcaaaagagggcagtgaaacttttgcaatggttcaaggatgagagaaatgtacggatgggtcctcattcgggtccacaaacgggttgggtgagtcctgggatgggatctccaatgagcccgaggtcaggggaagaaggtaggaagatgatgaagaatctggtgaaacagagtttatacaagaacatggagatgataactcgacgagggaatttggatatggagagtgaaagttgtaggcttaagtctttgatcatcagcacaagctctaaaaagttgacttattgatctttgtttgtgttatgacattgccatataaagtgattagtgagtgtcttgctctgaacac

SEQ ID NO: 60455 - DNA, 303 bp, Arabidopsis thaliana landsberg
gaactggggggatcgggggaattgcaacctaataatgcatgaggattatgtgggaccatagatgacacagatagtggctgactaagctatccactatggaaatctgattgactctttgtccctaatcctgaagcttcggctatatctgaacacaacctctggtgccaagggtctcatatatggacactgtacacacctcatatgatgggagcttacgcagtactatgcactgatctgctatgcgctacgcatggcgctactgtaaaaaataccatatgtgacaatggggatggcgcacataca

SEQ ID NO: 60456 - DNA, 967 bp, Arabidopsis thaliana landsberg
  unsure (1)..(967): unsure at all n locations
agttcgttcgtctgacgtgacgttgtgctaagcggcatcattttcttcgttttagtgggacggcgctggggttgctggtattgttgataggctttttggaacgagatctccgacgtttgagtgacgatgtgaatttcgctgttgtggagagttcggcttttcttctgttcgcctagctccaccgggtgctattannnnnnnnnnnnnnnnnnnnnnnnnnggcgtttggttggttgcgtcgttgtgtacgtccagagccgtctggttctttcgtctagcttctcgtagcatgccgacatgatgtgtcttgttagtcgttttggtgtgatcattgctttgctgtattcgcgaaacattggcgtcagtgtcggatcgtcgatgtcggatcgtcgatatctcttatggcgcgtccgacctcatggaccttggagatggctcaattgatttgggagtgaaggtcttgtacttggtatctcgtttatagcggtctgagaaattgccgagctgggttggtttacgacaacctgaatttcttcgcgtaggtcgggtatgcgaataacgactcatgtgcatgcggctgattttatcttgtatgtgctcttgggcggcggttaataatcgcgttgcgctgctttaaatgatcgatgatggtgttgagtagttcttcgccgtgttggttggctttagtcgtatcgtccaggcgatgaaatcggctaagtgaagcttctccttggtctttttgcaacgctaggtattcaggcgtgggcgatgacgcagagtagtattcttcctttatttgagttttcccgtgcgctgacgttatcgtccgagctgccgagctgggagtgtcatcgtcgaggttctccaagtgacgtccgcctgatgacttctcctcttgttcttggttaggcgtgagtgataacgaggtcggtatgtttaatgaggttatgggatgtccccctttgat

SEQ ID NO: 60457 - DNA, 1098 bp, Arabidopsis thaliana landsberg
ccaaattccaattgtctatattatcgcttcttcctcctcctgcttcttcaactccaaacctcaccctctcaatttccctccttcgccggtccacggcgtcatttcacggtggcgcttcacctctctccgtcacctactctcctaaaaatccaatctttacaaaatccagaccaatatagaaatgactttaatcgcttctctgtctctcccaccaccagctatacaaagacaatcactttctgaatttcataatcttcccgctaaatctcaatccttcaattgtcaattccggtcttctagttcacctttatcttctctccattcttcatcgcttagtaactttctagattttagactaaggcggagaaacagcggattggttccagtggtggcgtgttcaacgacgccgtttatgggcagagttggattacattggagagatgggaatatgtctctgttatcgttttgtggtggaactgatgttacagagaaagctgattcgtctcagttttggtctgctttgcttccatttgttgttgctctcactgccgttgctgctctctcttacccacctagtttcacttggtttgcacacaaactctctctatctatctctgtaatgccaaagtttatatctttacaaaattggtgtatatatatgaatcttatcaggagaatcaacgataaagtctatggcttttacttagttgactctgttttgtcatcttctgtttagagaaactaagattttgaatggggttttaagatgattatcagatgaaatgttttcagggtatctaaagacctctatgctcctgctcttggagggattatgttatctattggaattcagctttcagttgacgattttgctcttgcattcaaaaggtacttggagcattctcttataagttttatgatcagtttagttaagctggttttctaacgtttgtgagaacattgtttggttgcagaccagtgccattatctgttgggtttgttgctcagtacgttttgaaaccgcttctcggggttttagttgctaatgcatttgggatgccgaggaccttctacgctggttttatactcacgtgttgg

SEQ ID NO: 60458 - DNA, 516 bp, Arabidopsis thaliana landsberg
aaatccttgtgcaaaacgcaacctaggtcccatgtatgcattgtaaaatgaaagccataccaatctaggaagcgtttggatagagagaatggcgttttcctgtagctgagatccacgcaaacccaaataggtaaggttttgaagagtgttgaaccaacttggtactctctccagtttcccagcaagaaagagcttctcaatgcttgcagttgcgatcaggtcatctatctctaacggttcctcttcatcaatcgacgttaaagataagaatcgaattcttttaatcttattcagtgaatcgcacaagtctcttccatgttctctcctaaccatgacaagacttattcttgtgagctgagtcatacacccgagattttttataagctcatcttctgcgttgaagcagtccatgacttgcaaatccttcaactgccagattttaggaaccacccttgtacctaaaaacttaattccaattgggaatcatgttccattcatttgcggccaaaaaagtaa

SEQ ID NO: 60459 - DNA, 1671 bp, Arabidopsis thaliana landsberg
gacaattcacttgaggttacagaaaaacaaaagaaaagattttagttttgcaagacacttacggaaacaaaccgtgggtcggggggctcccagacatcagtaatgctaatagaactgattgcaatatcttgatgcaaacctgggattttatttctgcgattgaattacaaagtctgcttcttggataaatttccaattagatgataaatccttcacaaagttcataagaagaaaaacgctgacttttagtatcttagagatagccacagtcttgctgattgcctgccccattgccttcaacacaatgtctttaacacttttctcctgaaaccaaaagaaacggatcatcattatttcaagtacatcacatcgcaaatagagtcatttttaggatcagaaatgcaaaaaaaaaaaaaaaaacgaaatcaaagtaaaatggtgcatgatgacacatttgaaaccaaaatgatcggaaagagaaaggacccaaaaaaaccgtacaacagagtagccgaaacacaagtccaatgaaacattacacactccagtgagcatatacgacggtgaatcacgattttagcgaacgacttgaaacaaagtagaagagagagagagagtacctgaagaagactggtggcataactgatgtagtttcggataaggcctttactggtgatacggatctcattctcgttaatcggagactctggtttcggtttagcgactctctggtatctatccattttaccagaagatgaaaagatcgaaaaccctaggttttagagagagaacagtgaacgacgctctggagaagaagaaaggacagagatgagatttaaggatagagaaacccttagtaataaaccctagaaggagaagaaggaatcgcgagtttcaagatgaagaagaaagagtatcgggaaaggccgatagtaataccaagggacaccgaagagccttgagtttttaatttttactattgactaggcccaaaacggtctttcgtcaaaccgcttcaaaacgggtcagatattttcggatccggatccgattttcggggaggttagtatgtcttttacgcgcgttagttgcacgtggataacacgaatgaccagatatccatccatcaataataatctccgttttaaccgccgcggatcgttgataacaagattttttttactttcttcttttcaaaatttcaaaacttttccatcagttaaggagaaatttaaaatggaatgttttggagtagtatttactccaactgtatctggttatttcgattagtgtaaaggtcctaacttttgggattgtgaatgagccactttcatttagaagactaacacggtagtggaatttcttggttgaagccgatactcaaataacaatgtcaacaatattaaggtcttaacaaagtaatgtttacacagaattacagaacaatcagctgaccatattaaatcttacttaaatgaatttcgaaaaaaaacagtggaaactgctgtgaagtgagctgtttagtcattagcactgactcatgagaccagcaaaaaaatgttgtctttgagtgaagagaagacctgattgttgactttcaaagacaacacatgacaatcaatctgtttggtaagcttatggcgtttaagagttatgtgaaaaaccatccct

SEQ ID NO: 60460 - DNA, 484 bp, Arabidopsis thaliana landsberg
tatttcttgaatattgggattatattttgcttgtgtcatattgaacattaattatatttttgtttgatttaaaatattttatagttttagcttagtagctcccttttggatgaatgctgcatccgccgctgactgtggcaactatatgacggcggcagtgcagtacctgtcgtcgggggttcccagcaacgactccggcaaggtggcggcggcggcgccacagagcgcgacagaagggattgtgcagggcatagtgacgtacatggtgttaacgacctgacggtgacgccgatggccggcgtctccagcgttactaccgtgctcaacactttcgccgtgagggacatcggcgacctccaggagaagaccgtgcagctgggccgcaaagagttcggtggtctgtcgctggatcctcatccttcatttatctccagcatcacccttgctcaatataatgcacgttgctggttttggttttgacgat

SEQ ID NO: 60461 - DNA, 522 bp, Arabidopsis thaliana landsberg
tgcctcagaaaaaaacggagcacggtgaactgtatatgttttatatatgtatctatataaggaaaagataaagttgaaaaatatttcctccaaaacatttgcagtgaaaatatatagatttgccatctaaagtcttttaatatctcttattaaaaaaaaataagttaatgtatattacatcaaaatttatctagtatacaatttcctctaaaataaccaataacatgaaataaaaatgttaattaaattaaaatcaaataattaatttcataatatttattcaaatttaaattaaacagctagtaagaccaattaatttaagcaataaactaaaataaatgtaatttcaaaacctatctgattaattgtgatcatttaaatttaaatatattttaacaactttaaggccaaaaaatttataattagttgtaacacatacatagtcaataattataaaccaaatcataaaatatatgaggaacatacttttttattttcattgagaatttatatactagatta

SEQ ID NO: 60462 - DNA, 290 bp, Arabidopsis thaliana landsberg
  unsure (1)..(290): unsure at all n locations
acaacccgagcangaggaagcangacanaaacaccacagagcaaaccggaaagcaaaccagaaaacacagncaaacccccaccaaaagcaaaacccaaacccaacaagaaacaaagacacaaaanccgccacaccaacaacagcccaagcnacaagngaagaacaaccaacagcaacccaccccacagcngcaagaaacacacccaacaanacccaaaacaaaaaagaacccanccaggccaaaagcaaccannccaagcngaacaaaacgcaccaaaacagacanaaaa

SEQ ID NO: 60463 - DNA, 1273 bp, Arabidopsis thaliana landsberg
agaactgttccgttgtaaaaacatgaaagtagagcagtattggttatgtggcccacgctatctatcctcatcatcatggccatgtccatacaactctggagaaggttcatataaaattgacaagtttctttatcctcctcatatatataactcgtatctctgattgggtaattactacttactctactgatcacatttgttgttcttttttttattaatattttaggaacatataaaaacatagaaatgataaaaagtattttgcgaaatttatgactttaccacattttctctaaagcttttcagaatcatttttttttctcccttctttaccaatttttgatcaccttaatatttcaaaagctagtctgtttttggccagtgactatacaagcaaacaaggaacaaaaaccagaggccaaaaatacaaaatatacagcaaacaaagaaaaaaaaaactttaatcaactgaaagaggatcatgatgcgggttttgaggtggactagtatctgcaaacacttgtgcttcatcttcatctctcacatctctaaacatcgaaagaaacgagttaagtccttctgacgaagccccgcctaaaatccatagaagcatcgagctgaacgagctcattgcgcctgcttgttgtgggttaggctctgcaggaacggtgtttgcttcattctcttcttgctgctcttgatattgtgccggattcccgacacctcctccatccgctgtaaaagatcttgtttccgtgttttggtttggggttgtgtggttaggaccagacggagttcggtttcttgttgttctgttcagccttgtgatgtgaagagttgatgctaggattgttgaggaagcgatgtgaaagtctgggtgttgctgaaggtgtgactgtcggctttgaaggaacctctgaagagctggtacctgtaattttgtgataaaaactttgaattgaagcttagcttctctggatttggccaatcttcgagttgttggaatcaaacgcgtacctcaaaacggttccagaagtataaaattaagtgttgcatgaatgcagcggttgtcattagggcgagataagaaaaacctgtggagagttatgcagtaagtgaacgcgtctgcagtttcagtagttaatgagacaaatataacgtaaaaccacatctcttaccatatgcatatgagaagaaataaatatggaacaccaagaagtacagcaagaagaaacgcgggaagaacttcatcgatattggtgtcctgacactg

SEQ ID NO: 60464 - DNA, 396 bp, Arabidopsis thaliana landsberg
actattgggggtaatcgtttagttaatattcaattttgatatgaaaaaaaaatgctcatcaaatttataaatcttttacgtgatttgaaattttgggaaataataatggtatgcgtatctgatcgatccaaaaccaaatatgaatatttgacatgtgaactaaatcatgaaaataaagaatttaaaaaaaaaaaaaaatgtggattcctatattaatcaattgatattgtccgaccctctactctcaaaaaacaaaaccctaattaagctcttgaagatcgatcattcaacaacaagaagatggttatggttagagataaccaattccttaacctcaaactgtgtgctatacaagctcctactactatccccccttgccgctttcccatcataccc

SEQ ID NO: 60465 - DNA, 120 bp, Arabidopsis thaliana landsberg
  unsure (1)..(120): unsure at all n locations
acaccaacanacaaaacnngaaancgnaaaaagcanaaacagaaaaaanaagannannancngaagcaagngancaagngcaaaagaanancaaacnngagangaaaagagacaaaaaaa

SEQ ID NO: 60466 - DNA, 2130 bp, Arabidopsis thaliana landsberg
gcaaaactaaatcaagaaataagagtgggtcgtgccaagcaaagcagcatgaagacacatcttcggaggtatgtaaagtcgggtttgttgttgtttggccatcagtaaacaccgatctgcgaacctggttttccggttgggtttagttggaagagaagaattggacctagaaagacacatttcaagagagcaaaaaatcgatggtgttttggaattttgggtagatgtgaaaaagaaggtattgagaatgagagaaaaagtgatgtgagaatatttatagaagagagcgtgtgatgtcggacgcggctgctacgtggtcctacctacgtacgtttatgttgtgtgtttcttcttctagattctttcttcatctttctgggaatattcctcatccttttctttatccaacacgtttttttattcattgtttatatgacgttattgcccatcttttttacacaaaaattcaagtagatttaattttattttgtactttttttttattttttattttgactgtccatgtacactcttaacacacacaaaaaaaaaaactgcatagtgaaaggatagagactagagagtgatgaagcagtgacaaatatttcataatgtatataaaagtgaaaatgcgcaaaacgatgcaaatttctaattctaaatctcatattctcatttttctatagtattcgtaattagatctttgataataatattaattattattatttgttagtcaaattacaaatataagaatttccaaatgtatgaaattatacttggtattatatatgaaattattaattttattagatttagtcaatattttcaacgaatataccaaatatatttttatacatttggaaattctgaaacatttagtttgactgaaaaaataataataattaacatttattattaaacatgctaatgctagcatagttttcacttttcatcaaacatctaattattagtattacttttggtagcgtctaattagtaatattatataattttgactaatcgaattatcgaatgaatattattctatataagaaacagtaaagaaaatatgagaagtacttgacgctagtggatccaatcttattatgtataaaagatctagaatcaaatcgatcgttacatacttatttgactcttctaccttacggagcgcagactttggaccatataatatacgtataacaattgtcgtttcctatttaatttggttccatcaatagcactctctactttttctccatcagtgcatgcattagatcttctagaaaataatatcacaagagacatattcagtgtctttttttttgtattttcttcatatttatggttatggtttccttctaagcgaagtgataaaaatagaactagaaaagattctgacaaaaaaactactaggaactgcgaaaggccactagagagttcaaagcgtgtagccgtgttgccacgtcggtctcttaaagtattgtctgaacgtagtactaacttttgtcctaccttatccagtcgtccatgaggactcgaaagcgacgtctccatttgactacaaattaacctatccactaaaccggattccaaacctcataaccaaccggtccaacccaaattcataccgaactatatagtattcggagaagcaaagagcccactttaaagctgtctttaacaataagacaaaaaaaatgttttggcttgatacgttctttgttttttcccctagattatattcattgtagtatttgtatgttctcccataacattgaaccaaattcattgtaatgtacatggaacagaatccaaaccaataattgtacttctgtaatttctatatggtttaaactgaaaccaaatttcacttctaacgtactaatttggtgagatttttcttacaccaatggaatcgtcatttacacatataacttaaaaggctactaagggttttgtatcatagtatatgtggagcacgttctctgtatattttccaaacgcaagacttcattagagagagataactcttcatgtattgaaacttctttgggaaatgaagcttttgacccttaaacaaccacattcccttttcggggtattacttttgataacaacaatttt

SEQ ID NO: 60467 - DNA, 282 bp, Arabidopsis thaliana landsberg
ctgctatcgtatggagggctttctgggggacatgacaaggtgcccctaccataagttaacgtacgttgcccaaggaggggccccttgtcatcgttgttggcggtggcaatggcagcggtggtggtgttgccaaagctgccactaccatggtcattattgtgatgcgtgtggttcctctttctattgatggcgtcagagttggactggatggtgtcgttggcgtgaaactcgacattaggcgcgagacgaggtgaggatcataatgactttaaagctggctgg

SEQ ID NO: 60468 - DNA, 573 bp, Arabidopsis thaliana landsberg
gattgaccagatcattcaagttactcagctacaatatatatttgctgaaaatttcaactacaacctttgaattatatattatctttttagctcgttacactgcttgtaggattcatcattgaaccggaagtgtgaattctgattacttgatctgttgatggtttttattaatggattttgtttgaatagtttcatctttttttgctcaagaatttttcatatattacatccaacaaccaacaccttggcaaactttatttatgcgacgaaattgttgagcctagaattgtaacataatgttaagttaaaggcaaaagaaaagaaaaaaagttccacttatctttctttcatttgcttagatgccattttttattttttatttttttatttttttatttttttggtgaaacaccaatttattataataaaattatctttcaaagaaccatgaaactaggccacttcatcaagtagggtaacctttacctaatctcgcttttggtttggttcaaactccaaactctttatttatgttaattaatagggtcctaaattttaaaaattaagatctac

SEQ ID NO: 60469 - DNA, 928 bp, Arabidopsis thaliana landsberg
ctatcttgtgttgtattaattagtaaagagatacgtttactttatttgtattttcttaataattatgattggaatggaagatagaggcaaattacaaaatttaagtaaagattagatggaaatatattcggaaatccaaccaggctaaaaatagattttgatttaattatcaaagtctgattatcaatacggtgtcgttccgggtcatcgaacattccacttctttcttcttgtctgaaaaatctagaaacagcagcaatttggtttctctatccgattcgtctctctcacgccctcacgtttctccacctcatcctcaaactaaccacaagacctcttttttagagtaaccaatcacagagagatagagagagagaacagagtcaatgtcaatggcgtctatagcttcttcttcttccaccaccctactctcttcctctagggttcttcttccttcaaagtcttctcttttatctcctaccgtctctgtccccagaaccctacactcttcctcggcatcatcctcttctctctgttccgggttctccagtctcggttccctcaccaccagccgctccgcctcacgccggaacttcgccgtcaaggctcaggctgtaagttgtagagtaattcgttagcttgtcataatgggctccgtactattttctcgcttcttatctattcgggatttataaactttggattaaaaaaactgaactttatagagttctgcgatcgtggaagtcttgaattgagcgacattttgattacacttcttttcgagttttaactaaagatgatttgaaatgctctgaaatttacaaatttgattcacatttggctcatacacataaatgttttgagacctgcgtagtgaaattgcggttagaccagttaaagcacatttgtgtggttaacaactctatgc

SEQ ID NO: 60470 - DNA, 573 bp, Arabidopsis thaliana landsberg
cgagcggaattttattttttgccttacttatagcacacgcgatagaccacccccagcgcagcttccagctgagaggacttgtctcatggacttctgtcgcctgttctggagctccctcgccaaccactggctcgttaggcatttcatctacggatgtttgaggttcttgcatgctatacccctatgaattcaacactttttcgattcacgatgagtccagcatggggatgcccctactgatttcaagggcaaagcagcgaattggtgcaccagcaaattaaaagttacaaattatgggatagcgtataaagtggcctgaccgactgcctacaccaccgcaggaacatccggtacctgctgtttaccgcccacattaatggccgcagcaagacgtccgccagccacgccggtcaaacctgggtcagtatcggtatataacgccaccaccggaatatccagtgccgcagccagatgtgacaatgcagtatcgaccccaacagcaaatgcggcctgcggaatgacctttgccagctgctgcaaagtgagttttggcaacactgaggctgttggcac

SEQ ID NO: 60471 - DNA, 969 bp, Arabidopsis thaliana landsberg
tgaagctcgctccatgtgctggtgcagctcaggacgctaactccgccgtgccaggaggttgctgtactcagattaagagattttctcaaaaccctaaatgtctctgcgccattcttctttccgacacggccaaagcctccggtgtcgatcctgaggttgcccttaccatccctaaacggtgcaatttcgctaaccgtcccgtcggttacaagtgtggaggtaagtgactttctgttacatctttatattatgcttttacttaataattttcatgatatatctaatgttctttgtttctttttttccctttggttatagcatacacacttccataaaatgttgacgattagaaggatgaaggagataacattgggccttatgtggaagcttgaagtttactactacgtctccatgtaccttataatatatgaataacgataatgtttatatgtgtatcagtgtgattgttgttattgaacctatatcaataaatatataaaaatgattccactctacatttcaaattacagaaacacaagtatccaactttgtgcttgaaaatttgacattgtttaaactggtgtcgttttggcaaacactagtacgacttagtttacaagtcagatctatcaccaatatatactcatctaacacgaagcaataagagatgatgctatagttttcaatttctcaaatatagtcaagccattgtctataatctatatgacgaccgattctgacttggccaacggaaatttaaaagcgaaataaaccaagtctttatttatatatttattgaagttataaaaagtgtgctggggaataaaaccaacaacaccaccaaacaaaaaaacagctgagaaaaaacaaaccacatagatcctattgtctatatgtagttactaccatactttaagttgtgcacacactttctctatttccttggcgatggctttactttactatata

SEQ ID NO: 60472 - DNA, 424 bp, Arabidopsis thaliana landsberg
attcctcatcccttcccgaagctgctctaaggaaagggatccaccattactactactattcatatataactataaaaataaataaactttcattgagatttgagccaaacagagaagaagaagaagaagaagagaagatctccagcggatcagtccccgctttaaaagcattggcggcgtctgatttcatttctctctctctctctatctctctttaattccctcaaagacaaagcctttttctctatatatatatctctctatcttacgccattttggtttttgcttttctctgtgtgtgagtgattatgatgatgggattatctttctaaagcttgaagttgtcctgaaaaactggaaaagaaaacttttatggttttccaccatctattatgtgatggagttgtgagaccaaataaatgct

SEQ ID NO: 60473 - DNA, 164 bp, Arabidopsis thaliana landsberg
atatagaagaaacaaaaaaaaaaaaaaaaaaaaaaaaaaaaaaaaaaaaaaataaaaacaaggaaaaaaacaattaaaaaattacaaaaaaaaacaaccatataaatgcaaaaattataaacaaactggatgaagatggaatgaatacattgaaaaatttgatt

SEQ ID NO: 60474 - DNA, 1173 bp, Arabidopsis thaliana landsberg
tggctgtaccgattctggtgggactactggctataactgctactcctgaaggtaagcgagggcactccttcttattgggggcaattatatcactgcacccatgaacagtcaaggttacttgcagcaaggacacaggccatccagggtatcattgataatttgcagatatccacacttgaatatcgaaatgagagtgaccatgatgtttgcccttatgtccacgacagaaaattagaagtcatcgaggttcaagctggtttctgcattttccatttgtgttcctttccaaattgatgtctaataattttagtatctttctggcagagcaggttcccttgggtcaagatgcagatgatgtatcgaaacgcctgtttcatgttatacgtccatatgcagtcaggcttaaaaactttggggttaatctaaatagagatatacaaactgtatgtgcctcaatgcttatatcttcaccaatagcgtcaatgctcacattttcttatctatgcaaacatcaactcatgtttgacagttaagtccacacgaagtacttatggcaagggataagtttcgtcaagcacctctaccaggccttccccatgtaaatcacggagatgtagaatcttgctttgcagctcttatcactctttatcatattcgtaagctcctttctagtcatggaataagaccagcgtatgagatgctagaagagaaattgaaagaagggtatgctcttactttcttctgttgaactgatttttgggatggcttcagtggttttaggtataatagcttttgatatcaagagcatcgcctaaaactatcaccctttgcaggccatttgctaggttgatgagtaagaatgaagatattaggatgacgaagcttttgatgcagcaaaggttgtcacatggagcaccaagcccaaaattgtcgaagatgttagaaatactagttgatcatttcagtatgttttctttttgaattttgatctggagttgatgttagtactcagctggttttacaactgaacattgatatgatcttattctatgactgcagaagtgaaagatccaataacatcacgggtcattattttctcaaatttcagaggaagaaaaaggtcagtataattgttgtttgttttcccttgtttagatgctcagcagttttctt

SEQ ID NO: 60475 - DNA, 400 bp, Arabidopsis thaliana landsberg
gaacacctgctcgcaggagattatgctttcgatgatataatgataagacaataaaatattcaattattaggaaaatacaatacaacgttcaataataatggatacaaaatgttttgaaatagtaggcattttaatttgtatacccctccacagattatcttttatttttcagcctttcttttggctgatcttaagttggtttcctcatggggcatagcctccaccgccgtgaccaccaccaccgccgtgacctccgcctgaaccacctccatgttcaccaccgtaactaccgcctcctccttatcctccttcaccgccaccaccatatcctcctgctgcacctcctccatagccacctccttcaccaccaccacttgcatagccacctgcatgtgctcct

SEQ ID NO: 60476 - DNA, 338 bp, Arabidopsis thaliana landsberg
ctaattgtggcacaacattaattacttttttcttaagtgtataagaaagaataataatttactaatcataattaaaaaattaccctctaccaaaaaattaattaaaatactaatattattttttgataaagaaatattaaaagtttaaaaaaaatatatatatattataagtttaagtataattataaaggaacaataatactattatctaaagtcggttgtcacgacatgggtcaattatttcaatacaatcaatttttgttgccatatgaaattatttaatataatttttgtcttttgttttcgttttttcttcttattagaattatgttatagtt

SEQ ID NO: 60477 - DNA, 331 bp, Arabidopsis thaliana landsberg
gcaacatccccgtgttgaacatgatgaaggcgtgcagcgcccacgcggcgcagagtcttgttgtcacctgacctgcacagaagcaacaccggggtgcaacactgacaggtgatgttgcacaaaacctgaaaatagcattcgccaagctggtcgcagaaatatagttacgttaggggttgccaggaacggggttccatacatgtccgctgcaagtatggaacatgcatattgaaacgcaaggaggtgctttcgcaaaaatgtgggtcagggtctgccaagaaccggtgttccatggctctgcaagttaggtatgagctagctgtaagggttt

SEQ ID NO: 60478 - DNA, 986 bp, Arabidopsis thaliana landsberg
atgcaagaattgagacactatctctactataatcaaacccattagatagctcttctcaaaacatccaatcctaaacttgctcttgatttcactagtctccttcttctgcgccttataatctgtgtattgagctgcaaagccgagccacattaccacggaatgcaataacagcaacagaaccttgatcgggtactcctgcggttcatataagagtggatagagcgaatagcaagagactgcaggaaaaatacagagattaagtacaaggaatgaatgattatgcgtaaaagttgattctggttagagaatagtatatacctatggaaaccagaaagtaatgtttagcatcttctagactctgaactgcaacgattgcaagtgggatggtaaagtgaagcgatgctttctcatggacgtgccatccaaacagaaaaccgcatgtatatgcataagctacccatctagcaacgagccccgattgtggttttttccaggctttgatgagacatggagatatagctagtaataccattgcaaatgttgtcaatggcgtgatctgtcattgcaccagtccaacagaataagattgagtgaaacaattcatgagatatgacagatactcatgaagagtagtacctgaggaagaactgcaaaaggcgaagaatctccaactaatcctccagtgaaagatgcggaaggaatttgaatttcatatcctagcttccgcagcaaaaccgcaagccctttgtcgagtattatgtagaaaacccaaaaattaggtgcccagtatgcatgacacaatcctctcccgaaaggaaacattctactgatgacttgctgtatctgcaacacaacgagagaacacgaaaactaccaccataagatgttttctcaataaatctatttaggacaaggtttgacttgattgatgtatagagattcactgattcgtctaggataatttccattgataaaagtagtgaaat

SEQ ID NO: 60479 - DNA, 349 bp, Arabidopsis thaliana landsberg
  unsure (1)..(349): unsure at all n locations
ttcacatccaactaangattcgggggggggtggattatccagctacaggagaactatcaacggagagctttccccccactttccgcccgaactctttctaatgttgggttnnnnnnnnnnnnnnnnnnnnnnnnnnnnnnnnnnnnnnnnnnnnnnnnnnnnnnnnnnnnnnnnnnnnnnnnnnnnnnnnnnnnnnnnnnnnnnnnnnnnnnnnnnnnnnnnnnnnnnnnnnnnnnnnnnnnnnnnnnnnnnnnnnnnnnnnnnnnnnnnnnnnnnnnnnnnnnnnnnnnnnnnnnnnnnnnnnnnnnnnnnnnnnnnnnnnnnnnnnnnnnnnnnnnnnnnnnnnnnn

SEQ ID NO: 60480 - DNA, 1161 bp, Arabidopsis thaliana landsberg
tgcagcattcttttcggttttgtggaatttctgcagcttgatgatgccctcagtgcaacgagattgcaggatggacggataaagatctggatacatgttgctgatcctgctagatatgttacacctgggagtaaagtggacaggtatgttcgacgcatgtctctgatcactataagagctaactttttggaccctctaatttattaatatgtgcttcagagaggcaaggagaaggggaacttctgtctttctgccaacggctacttatccaatgtttccagagaaacttgccatggaaggaatgagcttaagacaaggagaaaactgtaatgctgtctctgtgtctgttgtcctgcgttctgatggctggtaactcaataatcatagctcttttctggagttctaatctaccaaatgctgagaactaaaaaagtaccttcaacttcttgtaacagtattacagaatattcagtagataattcaatcatcagaccgacctatatgttgacgtatgaaagtgcttctgagctgcttcacttgaacctagaagaagaagctgaattgaaattgctgtctgaggcagcattcattcgctctcagtggcgccgtgaacaggttggcttgagttttgtgttgtctgttatcaaaatcttatcatagaaacatagttttgctaatggttttatcttgtctaaaattttcaacgtgaaaggttcattagtcttctttgggcattaggttcttgctggatgcttttttcatatgtcttttatttaatttgaaacacctgtttttcctgggcttacgcagggtgcagtggacacaactacactagaaactcgtatcaaagtggtgaatcctgaggatccagaacctttgataaatctctatgtagaaaatcaggcagatctagcgatgagacttgtctttgaaatgatgattctttgtggggaggttgtagcaacgtttgggtctcagcataatattccattgccatatagaggacagccacagtcaaatattgatgtatctgcatttgcgcatcttccagaaggaccagtacgttcctcatccattgtcaaagtaatgcatgctgcagaaatgaatttcagatgtcctgttcgacatggagtgcttggaatttctggttaattcagttcg

SEQ ID NO: 60481 - DNA, 1337 bp, Arabidopsis thaliana landsberg
aatgtcaaaattaaatcatagaatagattcgttgaaataaatcaaaagcaacaactttcatataaaaatcaaagaagataaaaagaaaagaggtgaagtgtgaaatgagaatctagaaacggtttgctttatgagcatatgattcgttctaaattcttaaggcatcaattatacatatcattcttgtcttcttactttctttaggtccaccattgtagtcgaagcaagaaactaatcaagagagctacataattcagtgcaaggaagagagattctaaaccgaaccgaatatttccggtttagattcaattcaagaaatgtgatccctggttgagatggattaaccaaaaaaggaggaagtttcaatacctttttgtgttagactgtttcaattgcctgaatcacatacacaccataagttgcaaattttacctgaaactttatttcttttacaagtttctctattaccaactacagaaatatgtatgcagaagcatactgatgttacatattcagaacttctgcaattgtactgctaggtaatgtactgctatagtatatttgcgcatgtcaaaaatttcgatacaacagtcgcattattatatatttgtcacacaacattttattactcaagcttactttggcagccaaatgccagaagaatatatcatcgaagaattagacgataaaatctttggaagaacatctcataagcttcatgtttttgcttctggctgtacacagagattcttaatggcccacgagaaatgggcaaagcttctgatgactttatatatctataacttggcagctaacaagttcagcagcaccaaagtccttggttgcaatgagtttccatgtaacagtgtctgacttgttaggtgcattggtctttaagtgtgggattgaaacagaactggagctaaatgatgatgaggagactgggatgttggggacatcagctcgtaagactgtaacgttatgattagggtctctagtaatgaaatgaagcttgccatgaaacccagcaagcaaataaggagattctgaatctgttaagtcatacacagggacttccccaataacaaccttccaagtatcttccttttgatcatacactttaatctttccgttctccatcgaagaagaaggatcaaaagcgtataactcaccatccaccacaacactcagttttgtacctgcttgcctcgcacgccaaccttcacccataccagacggcatttcaacccagagatttgtatcgggatcataaaccttttctccaacatcaacaaagaaaggccaagagtataaactctgaggaacacataacctac

SEQ ID NO: 60482 - DNA, 1153 bp, Arabidopsis thaliana landsberg
tccatgacagggatatcatacatggacaatcattcatagaagatccgagtgtgcaaagagacctacaccgtggaatcgttgtttgttggaaatgttcatcatattcgcatatgatgctgattgtatgtagttgaatatcatcttatgatgtaataagaaaacaaaaacaaaaacatctataacactaaaaaaaatgttacaacagaaacaaagatttttatggaataaatttaagaattcttaaatttgtattttgaaaaaaatctatttaatagaaaattggttgagaaaatttagctaaatttgtttgtttttcccctatccttataaaactaaacctttttcaaaagtttggtaaactagatttcattttcatagagcgaatgtattttgattgaccaatacatatgatccagtagaaggcgtgcatatcgtcaagttcgaagctattagagaataatgtaaatcttctagcatatattatcataaaattcagcgatcttgagtacacataacaccgtgattcttccatgttcatcccatgttctggtttatattatcataaattcagtgatcttgagtacataacaccgtgattcttccatattctggcttatattatcataaattcagtgatcttgaagatacataacactgtgattcttccatgttgatcttgagtacacataatacgcaatagaacatttatacatataactgtaaatgttttacaatcacatacactaggttttctaaattctaaaaaaatgagttgaactttttgccgcaaaacctcgatttgacattttaataatatttttttacggtggcggaaaaaagatacattgtgtattatttttgactttatataattactttacatctttaaaagtaaagggtaaagtttcataaaactcttaccaacatcgaataactattttacttgaaatcggttttggtaactaacgactcagataatagagtgaagaaccgcatatatgagaactgggtaatagttgtcggttccttgataccggttcaggtatcttttagttagtttatagatccaaaatacacaaagatattctgaaaatacccgagaatcaaaccagaaaactaatcaaactaatcgagaaactaaatattttggaat

SEQ ID NO: 60483 - DNA, 455 bp, Arabidopsis thaliana landsberg
gatgaccgtattagtttgaactgccatcaaagaaaagtttcttactcgaagttgctagatggagatcatacacttgaggtttgcgcaaataggatgcatggatttggctgcaatcactataattggactgttggtaaagaaactattcttatacctctttgagtctcttcctggattttcttgtctagcattgatcaaaactgtctttcgtgtaaaattgtgtatgcagatacggtttctcctacagcctttgtgactgcatcaatgccatttacaagtgcacaaaacgtgtctgttaatattacttttactgagccatgtgttggtagaggaggattcggctgttcatctgtgaattcctgcgacgtgagtacgtaaccttatttacatcaatcacaatcttttgagttttttcatcttaggttttatactcttgacaatgtttcaaattatgt

SEQ ID NO: 60484 - DNA, 631 bp, Arabidopsis thaliana landsberg
ttttgctttctgtttcttcacattggctttctcctccttgctcgtctgtccataattctgcacttggtcttcttctcgttccatcaggtctttgagtttcttgtccgttgcaagacctccttggttctcattcttctcgtttgttgtgtctctagactcaactgcttcattaggttcttcacaagctccccacgcaattttcagactctcaagtcccacgagtcctgtcaacgactccatcaaactttccaccttaaaagagtatttgtttacggttatgcttagcttcctcagattcactaggtgtttaactgcacagttattttcatgatccgactcactgattacaaatcccttcagaacttgtaatctggagagttttgcaatccccttaggcatgcgatctagcatgtagcactctgatacatccaagtaaatcagtttctcaaacaagcctatatcactaggaagaacctctagattgtagcatgctttaagatccaagatcactaatctcgggagtgcgcaaatcgaattctcgagcctttctatcctcgagatcccttgaaaacctgcaagcctcagatcttcagggacctcatatgtttagaaactctgtgctctcacttca

SEQ ID NO: 60485 - DNA, 759 bp, Arabidopsis thaliana landsberg
ttgactcctgagagtttgtaactttcttaacttcgtgtgcaggagtgttctgtgaatccccagggaatcgcggccttaacagttccacaatcacttatcaaacacatgcagagtcattccattcactgtatcgcatcgggcggtcaatctccaaacttcaagttcttctttttcgctcaaaaggaatcagaaccatcgaactatctcactgagtgtatcataaacacttcatcagcaaaagctcagataaaagtgaaagcagacgagcagagtacgtgtcaagcattcacaaccgtatttgaaacagccttgtccaaatttggtatgccttgaaaagcattcaatcaatagaattctctggatggatctctacacttgttgtaaaatgcgatgatactttttcgagttttgtagtttctctcacctttgatttcgtttcgttgtgttactaagatagtttgtttgaggtgttatgaagatgtactttttatccttagattaggaaatttcaaatgaaactatatcaacaaaacctcaatacacgttacgttgcaccatgtgatctctctgaaatgtaatctcggatcatcataagggtcgacttctggatattgcaagatcaatatatgaagttgtgcaatttttcaaggtcaccactcggtcactaaatgaaataaaagttttaggcctcaaaagtaagatatgtataaataaggggtaggtttggaaaaatattatttataaggcgaccgaagaaaa

SEQ ID NO: 60486 - DNA, 618 bp, Arabidopsis thaliana landsberg
  unsure (1)..(618): unsure at all n locations
gatttagcttggactttgaacgagcagaaaactttgaattatttatttattttgtcaacatgaagtaaactagttttttgctgttgttatgcctttgttgactaaaaagaaaaaaagtggtgcatatggccgacacggtctctcttttcttctttggttgttcatatctcattaaaacttttccatgcagttaatcactcttgaatttactttggtaaaccaaatgttagatcttcaggaatacttttaacgatatctaatcgatgctaattgttatattatacatatcattcgcaagaccattcatgtgattttttttttggtgtgtagataggactttataatttgattaaacaaaattaattaatgtactaatacgcgttaagtgctcactagtcgggagacgagtatctagcgccttatggtatttgtaccatacagttttttttttgcatcaaattggttaaaacatgtcaaataattaagtgaaccacataatctaaactattctataaaatagaattttggtttttggtacaagaacattatgaataaagtaagctcccgaccatatattngatgtgacttgattacatattcatatatgggccactcatc

SEQ ID NO: 60487 - DNA, 370 bp, Arabidopsis thaliana landsberg
tgtaattatgcaaaagacacgggcttcacttgggcgtattttcaacacacgtatctgatctatgttactcgcctgctccataaaagacactctttttctattttattgttttagaaatcgttaaggctagaggtatcaataaaaataaaaatacaaagattccactactactcaacgagtttggccatatcatagggtctaaaatgggatggattatagggactacaacaaatacatatattagttggcgttgcgatttacgggttaatgtgggtcaaaatactcttaacgttggaaatctatataactttattatcatataaaaactaaatatactaatataagtgactcttggatttagtgggttttt

SEQ ID NO: 60488 - DNA, 370 bp, Arabidopsis thaliana landsberg
tgcggtcgtttccaagaggaaaaatccacgatgaagtttggttcacaactttcatattgatgctagctaaagctgttatccaatgggtagatttttcaaacgaaccaagctatggtcagctgtcagttctcgttctgatacctttttctgatggtgatcgacgataatctgtttagacacaatcatctcttgcactgcctgcatgtccttgaacagaactgtggatatggtgactggtcttagaatctgaacggtatctttttttttaattaagaaactagcaacgacaatttgctgcgctgaaatagttgctgttttagctgacatgggcacggactgaaatgtgtctgattctagcttcaattctccc

SEQ ID NO: 60489 - DNA, 1527 bp, Arabidopsis thaliana landsberg
aagtttttgttcgttttcggaagcaaagtttaagaaaacatcaagtggactcacacacccggtcttaagtggagaaggtgatgaaagtattgggcccataagaggctgcggctgctcgtggcttttggcattaaacacgaatcttgctaatgttattttattctcattatgcttgatggattcatgtttatccatccatattgttatgttgtattccccaaatttttaaaaagcgaattcgtctagtatagttagctccatagtttaaaagtagaaaaagaaatttagctccataaattttgtaactcatgattagacactaattagatgtaaaaaacagacgagattgaacgaatgatgatacccggttgttgataaaacttgaaatggtcagaactaaaaacttatatttttcaaaaataacataaagagtccggtggtcggaaaaggaaaggagagtgacgtggaccacaagcaattgtttgcccactagtgactggctggtcgaaagtatatttaaattatgtcccacttcataagatcttcaaatcacttcttctgttccaacaacaatccattctcatttcaacgtttcaaaagcaaacatgttattggtcaatttcattgtttctacgccatcatccatagagcaacaataccttgttgtttttatcaaacaaaatgtgaagaagaatagaagaacaataaaaaaaagagtgcttttgaagattccacgaaggtatgaagtgtgacataaacggctctttgcgtcgtccaaaagccgcctcccccaaaagctttccctttataaccccaactttttgggttcaacccaactacatgcattatataatgcatatctactctatacatacaattacttatattatgtaatgcaccttgtttaatcttttttagagtttgtattcatccggagaatgtgtggtagactaatcttaaacatagaaagaaacacatgaagatgtacatatgccattgagagtgttgcgaagaagaccgttgcagtactagtataggataatttgagatatcacaaaaagatcatcacatctcgaggaatacgtactattgtgttatactattacttggtatcattaaaccattgaataacaaatgtagtatcgaaagacaataaacctggagataataaatgctaatattttgttttgcgagtagtaatcaagatgattatcaaaatagcaagttgtgtatgattgtgtgtacattacaacatgttggtccttaaagaatcgaaatatgttgggtgcgaagactttgccggtgctttggatttggagagatgtatattttgactccgattcgtgattattattattaatgttgaatatgtcgataaaaacaaataatttagtagctaataagtattgatttatcgtacgcattatcattgttatcccttaatttgaattccatgagaatgatgataaattgattatgaactaaaaataaaatagtacaccaccgacgaattatagtcattattct

SEQ ID NO: 60490 - DNA, 407 bp, Arabidopsis thaliana landsberg
acaaaccatgtgttaccgtcaaatcaatgtgtttaaaagatgttaaccactaatcaagcatttacgtgtaaccggatcaaccggatttgggttttgaatatgttgtggagatgtatataaatgataaattaattgaatatcttaattaatctgtgaaagaaactacatcacacactttgttatttcccctagcttttagtttttttatcatgcaaaacttatgaagtaactagatcaagatcacaaaaaaaaagcatcacttcacttcatgacctaattattctcgaagcccaaaactatttacatacacttttattctataaatatagatgatggaattcaccaatccaaaagtgaataaaaaacacaagtacaaacaatatagtgtctaattagaatggtatctc

SEQ ID NO: 60491 - DNA, 289 bp, Arabidopsis thaliana landsberg
aataaacggggtgaggggagtctctttcacaagacactcttgtcctctcttttagaaaatcagaacagagcgcactgcatgttcttcttctcaatctgactatcttcttaaacccataaagatcatttccatcgaaagatctattaccaatacttgatatgttttagatggagatgatcactcctatgcttgctgcttgggatctaggacgaagccttataaccagaacgatccatctgaggatcttctgtgggaacacaccttttcacgaaccggtgcaccgacccat

SEQ ID NO: 60492 - DNA, 1349 bp, Arabidopsis thaliana landsberg
  unsure (1)..(1349): unsure at all n locations
tgctaacgcaataaagagtttacaaaatttcaaaataccaatttacttatatgttgtgggaaaaaacatcctcgttttgttttttgcaaataaaacaaacaaggggatatatgtcattgaaactaancaaaataaccaataaaaacactctcgacacattggcaaaacatcttcttaaaactctttgaacaagacatgttctctcttaacttcttttttgatagatatgagatgatatgatttatacttactttcacgtataatggtattaactaatgcatgacaaagttataatacattcgaaaaataacaccggatatggaaaaataacaccaaaccgaatcgtcaacaatgttgatggctgcactttcatacgatttgtcaatttatttgcaccacttattgaatttgaatgcaaataggttacgtaaggtacttacttaacaccagtagctctcggtcatgatggcacatagaaatgtctgaacttgacactaataatagaatttgattttgataccaccaaaagttatagtctcaaaggcatattttctcttaaaacattgacacggagaataaactctttagcgttatatacaccttcttgtttttttcttcttctttaaactcaagaagggaataaattcaaaatggaatgtttgttatatacattttttttttggacagagtttgttatatacataatgatagagatatatcagttagtttatattctgttattgacaacacttgaattttccatcagtatatattgtcttatgattttatgcatgacctttcgaatattgttgaaacttaactagataattgataatgcttcatgatgtgatttaagcttaccaacccactaataacacataaatctattcataatctcacacagcctagattctacatatatgcgtgtaatttcatgtaacgttgacatcacaaactcatgtatgcctcggagataacatcacaagatttgacaatattttgaattttccatttcataattttgtttgacttcaaccacacgattaaatcgtatatgtaacattcaaaagtttcgacgtgtattactctgatagtcaatttctaagatttctcaagtgactatcatgtattacatcattcgtgaacaaataatatattaaacaacctcaacattagtggtccatattttcgatcaggcccaataactgatgatgtgcataaacaggcctacaagcatctctgcaacttgttaattttacaaagaaaaaagcccaacaaaagcatacaaagtgccacgctcaacaacgtgaatcaattagtggcaataaagtccttaaagctaacggtgc

SEQ ID NO: 60493 - DNA, 321 bp, Arabidopsis thaliana landsberg
gaaggtctgaggactaatccctcgggagaaagtatcccacaagagaaatttttgttcatttaaattttttatatatatagtataatttgattatatttaggtagaactttaccattagattgaataatatttaaatttgtaaacaacaaaatttaatttggtttccatactcttgatgaccttctcttcacattttgctgatataggatgctttcttagttagattaatcaaaatacaacagaatactttttcttcttcttttctgccaacagactacaaattcaataatatatcttaacaaaagaaagaactattaagct

SEQ ID NO: 60494 - DNA, 590 bp, Arabidopsis thaliana landsberg
  unsure (1)..(590): unsure at all n locations
aaattgtttctgcctaacctgcataacaactcctatgtaagtgaaaactactagactactaccatttagttattgaaaaactatcagaactataaatatatatatgcaatttaacatgctagggcataactttggtgaaaccattttgacttttctaggagttacagtaatagcataatacatatactctattatgtaaattttgataataggatccttgttaattatatctacgggaaaacagccagttctcctatgaagtgtgcttaaaagtacactaacttaaataaaaattacatttcatacacgaacaattcaaatatgacaaaacaattaaattggcaaagattgttacatttccgttaacatatgcttactaggatgcagcgtttacaatttaagatgccacttcatttaaattctaaaacaaaaattatggataaaatcttatttagaaagaactgagcatatgacctttatgcatattttgcacactcactaccaatttagattggacaacttctttgtcaattaattacatacacanacgtgtaaatatattagtttcctttaattttgccataagtttt

SEQ ID NO: 60495 - DNA, 418 bp, Arabidopsis thaliana landsberg
tattccggaaaataaagtagcgcgacccgattacgtgtttgggctaagcccattcaagtccaatagacccactaagaaaccctaaccctaggattgcttctataaataggagctctctcccttgcaaattggcaatttttcactcccacccctccattcttcccagccgccaccctctcccttcctgcctcttcttcacggcagcaacatccatcagggagccgtgcttctcccatggcgcctcctctccttcccttcctcgagcaagctctagtgagcgcgcagtgcagcaacaccttcttccccatggaagccggcgctccctgtccatggcgccatctcccagcagccactcccatggcgtgctgctccagtcggtctccttcctccctctgtcccttgccgcaggagcagcagc

SEQ ID NO: 60496 - DNA, 463 bp, Arabidopsis thaliana landsberg
tactaattaagataacaccgaactgatctaaacataaaaaaaatttttgtttaacttaacttattttgggcaaattttcatgtaatattttggtttccttaaagttactttagtttttgattatatatagtatcaataaatttgtacaccaaatatcaattttgatgttgttaaattactaaacttatgattaaaataatttaaacacattaaaaagctttaaaatttggtctcacaatttcggcaaggctaaattttgaacattcttcttgtgtaaaacttttagttctcatacttaagtagcgaaccctttacaaaaaccaaaaaaataataatagttatttcaaagaaaataatggagcaagaaaaaaatcttaatggagcaaattttactacttcctttgccaaatttttctcgagcttatggagcccacaggtgacgtgaggaaggaagattattact

SEQ ID NO: 60497 - DNA, 1287 bp, Arabidopsis thaliana landsberg
actgaaatctaacgtagtcaacgacgaccgaatcaatgtcgggacaatgagcaagaaaaactattcgccttgggagagagcaagaggctcgtgaccgtcacggaccactaggcgacaaaagtaacggtgcgttagggaggtggaacccacgcgcaagaaccgagagattcgatcttgaaattacacgcgcttcgatgcacgcgtgagaatttgagcccaaaacaaaatcccaaactctgtacttctgttttttccttacatgtgactgacagacaaccaaactctctgtttttacacatcaccatttttttctattatatgtttttaacaaaaatttacattttaccaacatctaaaataccaatactatttattaattttttgttttgttaaatcattaaattaaatatcagtaaatgtatacaacttattttttctttagttgcaagactaatgatttttttcaaaaaaatatttgcttcgatctttaaattcaacaagttcttagtacagccaatcataggataagaaaacgaacggttgaaattatatccgttttatcttcatggtcgtatactcgatcgtatcataaatattttattcgtatcgaagtcttagattcggtcataggctatgactcatagtcataacataggtagtaaaatttggtacaaaccggtctttgaaaacggaccagcgaatctgaataatgttttgccaaattgggttattataggtaactgtttcttgaggataaaaatattgcatactagctaacgtcacgtggaaaaagatgatacacacatatttacgagtcttgtttggtgatattcattataagaacaatatatgtactctggaagaagtaacaatgaaaattacttgtcactagaagcctagagcatggaaccttcttggctcaaaaaaccgagccggatctttacattatagtatcatatatttacattttttacactcggaaaaagatgcctccatgtatagttttctgcgaagatcattctctctttacagtaacttcgcagcttttacttttctgagactaggtccttcgcttgactgatctcatttactcattttatagtgtgacagtgtagtgttgtggtacttggagttaaggctctaattggtaatataaaaacataccgaagtctgtgcaagagtatttgttgtaggaatggaatgacagaatcaatgaaatattattttctttcataatttataatactttaagaaatgggtgtacaaaaaaaaaatcaagtgtgtgtc

SEQ ID NO: 60498 - DNA, 247 bp, Arabidopsis thaliana landsberg
tgggtaatgcgtctttgccatcgcagccttccacaacgtcaaatccctggcttttcaggggcatcgagaccacccgcctgagggattttgaatcgaccacagtcaaaatggctttgctcatagcggctctttctcagaaaaaagtaatgccgtcgtctgcgggtttggccacgggtgccgcggcctatggcatcggcttggccgcccaaccgtggttgccgcgatcttgaagcggggggccaagcgg

SEQ ID NO: 60499 - DNA, 1982 bp, Arabidopsis thaliana landsberg
ttcatcaacattatattgctcataacccaaattttgtaagaagaatcaatatatctgttgcagactattttttcattaatatttacatgtcagctccaatgaacgcaattgatgaaccatatgaatactaaagcattcttacctgccagtcattttttgcatgagattggcgcatgtaaaacctgtggcacatcaccattgcacatgatattgtaacctgggacctgaagcaatgagattgtcaaaaacctttaacatgaacaaggtcaatgttatgatatctcgggcagcaactaatagctagacatcactttcaccgaaaccagcatttataaacttttccgacacacgtgagtaatgcagaagacaaaaatacaccagtacctatgattagatgattcaaaaaagtaggccggagagagacgtgcacttgctcagaaaactaagaacatcagttggtaaaggtaggaacacagctgagggttttgataacccagcagagaattacaaatacaaagacatatagatcagaaggtcatgtctaaacaggtgaacagctcccaagcaaattcacaacagatgcaaatcctcccattgccgatgagaagtgacaagtgagtcaatatatgatgcatggacaccaaattctgactattattacataattcttccattcacgagatataaatgtagacaaaatcgagaatctatagttggagaacctccagaccacctcccacagtggccctacgacaaaattcaacagttaggctatccattgtcatgcattaggcaccctctttagctaaaaaaacgtaccaagaaatatcagaagacaaggagacgtcataagtagattttctagcaaacaaccaaagaacaaacactatttcttcctagatgacaaaacaacaaagtaatactatggtgagcttacacatgaagcttcatgccaagtctttgcaggaaggtgcaatacgaagaccgtaaaaacgactccttcacaagatcaatcccatcttttctggatggagagaaacgctcaatctcttccctgctgaaataccacttggaggtttcgcattgaggggattcaaacaacgatacgtttctcgcctccgcttcaaaatgttgtctagaccgctttctcggatgctcctctcccattgtaaatcttcttccgccaaacaattaaccaaaaaagtttcaatctttgaactaacacgacaagtcccaatttagctgcagattttgctgacaaatatctgcaaatagcaaacacagattcattgttaaatagctttgggacataatacgacacaaatctgatctcagcttcacatatatattttttgacccattatcgcaacatcaagaaatttccaacagattctatcaaatcacgaaatattaaaatcgaggaggcgattaaattaaattcacgaaatctgcagaaaacagatcgaataattacgaaacgtgaaggaggtaacggattagaggagccgattgattcaagagatgagatcagaggacaacgaaatcgactctaacaaatggaggattaacgaaattggatagcaaaatttgagatttcactaacccaaatttgcttggtgatggaaaagctctttgaaacttgaaaattttctctgctgctttatgtttgtctgaaacttggggaaaagatctattgcggtgttgcgacctaaaaaagataaatatctaactctatttataaaatggatatgggctttgactttatgattgtaagcaattcatcaaattcgataatggatatgggcttcgaattaatatatagtgtcgttttttgtgtggttgagattgaaatgatcaaactacatagaaatagtcttaacattatttgaacttttgcagaaaataacactttaaccaatatattagcatttagcaatttgaatcattgttaatttttattttcataaagctatatcgaagct

SEQ ID NO: 60500 - DNA, 1718 bp, Arabidopsis thaliana landsberg
cgatctggcaagttgtatttctaatgaattgaaaatatgatattatatatgtctgatacactgcttgtctttgatactggttttgtgtttgtatctaacattttccctgtgtttagatttataatttgtaaataattctgttgaaaaatatgtattgtttaatttttagttgttaaacacaatacttgcctatctttgaaacaaccaaactccagctatcatactaaaatgaaaagtaaaaagtttactgcacattatagatacaaaaaataaaaataaaatcaagatgcccttatccaataggaacatacaaatcatttgaagcaagtcattacacattacatttcttctattaaatcaaacataaaagggagctcacctcacaaaagcgtataccatctagatgttcttcgagaagacctatttaaataattgcattacttataaattcaataaataaagcgatgttagctttataatcggtcatgttacacattctccaaaacatataactaattgctggattagctgatactagcaatttttcttaaaaattttcagagttgtattacttttacatacaataatgtctatcaaatcacttttacatatcgactaagggaagaacatgcacaaatttgatttccattcttttttttcttagttttgaaaatcaaaagagattgaagtaaaatagtcactttcactcgtaaaaagaagtttttatttgactccttcgctttttgttgattgcggcagagtttgttgttttatgactaaaagagttcaaactaaacacaaagtagagagtttgatatctcggagttgaaaaattaagcataaaaaatggaaaagaaaattaaagaaaaaagttgaaataaaaggagaaaaagatttctttttcttttattttgctttaaggaaagagccaaacagcttgcttgcattggcccttttacttacgacgtacgtacacccgagtttttttttcttgtctcataaagttttttttttcttatacaagcacgattatattattacaagtatgcaaatctcttttctgtctatgtgacatttaaataagtaagtaaataacgatttttaacaatcactagagattataaagttaggtaaatacatatttggtcgtagaacaaaccagccaaatcagggcttacaagcacaaaatataatacttcatacccgaaatttttaagatgggacacaatcatttggaggtctttgacatgtacatgcatgttcctctttatgtgtgttgggtttccaatccacgtcctcatgctcaacatttttgtgcatcaaattcggcttgtgtgggttagaagtagaaatcattattatgcaattgtaacatgactaaaatctatgagtgtaatcttgcttttcacaactttgattaaaatcacatttccactaaattttaacacaaaatgacgattttaacatttaattattttgagaaaatctcatgattccattattttgcgggaaaatctactttgtccaaaatcatgtttcaacaaaggagcgttcgattacgaaaatgatatttttgtccacgtctccattagccatgtcaccatcttcccataacggaaacggtgagtccgtaacccgtaaaggcactaagggagtgtttagttcaacctcagaaagctagaaaacaacattgtcgtgttacatcacggttttgtagg

SEQ ID NO: 60501 - DNA, 1269 bp, Arabidopsis thaliana landsberg
ctccactgtcttctacactgaaacttccatggtacttgatcctgtggaattaatccttttagttaacttaagttctgttgatggaacaaggagactgatcactttgttgtgtattaggtacattcgaaagaaaggatctggatatttcagagagcacatcaaaatgccttttggtggatccttggatgttgttttcgtagacactggctcagtgaagcaggtaggatcagtttgtatctgtgagtttgatagaaatgtattgttaggcttttcttctgattttgttgtttcattatgtatgattaattgaaactgaaggaagtgcttggtggagcagtgaatgcctatatgatcagtcaattgaaagggttgacaaggattctaaaagcagtagacggagactggtaagttggcttttttcagcgatagattgtcttgatctctcattaacttgtataaaataccgtctctgtcgttatttggtgaccaagtttgctttctgctctccaaaatcagtccttataatctgtgccatgtgcttgatattacaggcgtattgtggttggatcagacccgttactcgcctatactctaactaaggaaccagaggaacctaagagagtggcaaggacatttcatcaaatcatgaccaaatatggagtggtaagacattaaatatcttgcattgccgagaaatttgatggaatgaatcaagtatatgattgatctgagaggaaaaactttgatgaatacaagaacttatatataagcgaaaaaggctgcacaaggggaggcagcaacgagagcttgacttgcattacggttcctaatcaacaagagaaccaaggtccaacgaatgatagtaagaggtaacaagatctcttatcatgacattataatcataaactatgaaagctcaatcttaatgactgagagaagatgcatttttttttgtgtcagagaaagggaagatgggtttcttcttcacagagttagcttctcagagtttgtaagtcccctagtttctttcttgtgttaagatatgtttatcaagaccaagaaaaacataagaaaaaaggtcaataacgtcttctttgttttaccatatacaggttacttatactatcaactcatcaggagaagtcattgacacaaaattagttaagcagaaaggcaaagagaccatctaaggtttcattactccattgctgtgaagcgcacaaacatttcgtattctttgcttaatgaccgaactaccctttgagtggt

SEQ ID NO: 60502 - DNA, 1197 bp, Arabidopsis thaliana landsberg
atgatgaaatgggtttagggaaactttaccgcgacaagttgtcacctgatgctgatccagttgtgcacatgtcagtttccaaagcagagaagcgactgaaaaagctcgagagggattatcaacatacctacgagaattacaatgaaatccgagtaagcatatctatatataacagaacaatgagtacttgtactgtttttaaaagcttatatattatcataatgaattttttgggcagtcaaacaggtataggttctacattgaagcaaagcattctacgtatcgcagtcgacaggctggaaactgtatcaaatattacaacaatctgcgagagcaactgcagaataatcttgacaaattgaaaaaagcagaagaaacacagagaggagtagaaaagcctgatcacgtaagtcctcacaactaatcaaaaacattttgtgttttcacagtacaaacagggttataaggatttagaaaagagactaatcagcatcttgccttaaatgaccagacaataagtgtcttctgttctactaacggaaataacatatagataagtttctataagaacctagcctaggatatataggtgaaggaaatctcattcttcagtatggaaatcatattacatctgttttgcatgtgttttgatgcaccatgccggtttagtgcaagcgagtgtcgatgcagcacggttgtaaaagcttgacccaagaaaagaggatacttcaactgataggagaaagacaacaacaacacctggaaaacaatgaccttggtcaagaaacaattcatttcacgaaaataagctgggaggtactactactgttacttgactagtctttagtttatatcgtagaatggcctttatacttaaaccattattacaaataaatcagttcgactacagtcaaagtaaaattccaaaaagtagcaacagcaaaacagtacataatctgctgaggagatttaaagacacggagaagttgaaggataaagccgttgccaatggtgaacttgttaacaacccaactagtcaggacaacttgacaatttctatagagatggaaataaaagtaagcaaaatcatggtcatttcttcctttacaagacatttattgtctcctttcttaaaacttgaaactaagcaaatgatcttttgtttccaacagcttttgacaaaggtaataaaaaggc

SEQ ID NO: 60503 - DNA, 1727 bp, Arabidopsis thaliana landsberg
tgtgagggaccatggtgtgaaacagaggcatctgattctaaaggggccatatgatatccttgaaagtgcttgctcaataacagtgactaactccgggtgagtactacgcagatgagatatttgcaaaatatggttacagtattgaggcaattcaaccagacgattcacaaactgttccagagctttgcttccaaacagaaacatctgcacgaatcaggaaagaaagaagatgacagatctctcacaggaaaagccgggagacagaaataaattacaaaagaatccatacttttgaatctgcaggtttacgcaaagaatccaacactagacgcagggccatccccagagtgagcgaacttataagctggtgttttataacagaacctgaaatttgtataagtcgcagtagattcaagagaatgtcacgacaacaatacaaatctgaagagacgctcaaatagtacagtaagaaatgttgggggctacacaatagcatagaagatatgatggtctccccctccccaacaaaagccacccgctatatcaaagtaaaatatcctactcaccaaagagtatggaggctattttcagctgtctctcaggatacttggggaaaaaccgatattcttcaaacagattagcaatcatgcattcaaaaattaatttttccctgcccaaaaaaaaaacaatctcgttattttcattatgcatgaggagcatgacaaacatgacgagaaaaattaaaattctcaaatatgtatagtttgtcaatatcaaaccttggaaccaaagattccttgtatcgggaaagcatttgaaccattgcgtcaacactcaaatgactagaaaacatttgatgaaaatatgcgtttgcctctgcctcaacatcatctccatatgcattgggagctgatgaatctttagcctcaccattctgcagcttaggattacaatccaaaatagctgcattgactttttcaatctcctcgaccagttgagatgaagtaatcgcattatcatgagctttcaaaacctttaatacattatcaaacaaaataattcagtagatatgaagttaaggacgagccgaaaaccaaaccaaaaagggaaactaactaacttttaaaagggaagttgttgcttccaaatgaagatctgataatggatcagaaggatgaaaaattttggccctgaaatcgtctgattcgctaaaatgcacatttttgacaaatttgaggcactcctgaaatatgaaaaagaaaaagaaaaaaaaaatgttagattagcatcttctcaactctagaaaattagaaatagaactatgattgtgaaacgatatgttacctcagcaaagagatccttatacatatacaagcagttaggcaaccagttctcaatgtccaaaagacctctcaatgaggcaaggactgccaatctgatactggatgagactggaactgattctaagacaacagagagaatctgaaataaataagccatgattagtacatagacacagagaggctgctgtaagaaagagaaaaacagtgtaatgagataatttgagccactgccacgcatttttctattcacctttagctcatggcagatttcaattattcggagcatgctgtctgctttgagatgttggggcatctattaatccccaacagaacgaagtttggattttggatgccaaagatattggttaaaaccactatccgggg

SEQ ID NO: 60504 - DNA, 1323 bp, Arabidopsis thaliana landsberg
tcgagtatcggggaatttgggttttaagatagcgtcgatctgtaataataagtggttcgcgatcgtgatcaagaaactggtggctgaggggtgagttttttcatcgcaattgacttgttcacttaccgatctgtaaaattcttggggttttgggtggtttttgatcctttgactctgatccggttttcaaatttccattaaatttctttggcgggtcgaaataatttgttcgagatctgatcaggttactgtttcttttcatcttgtctcgaatcttataattgaatttgtaagcagcttctagcatttgagtcttgttcaattttaccaacgcttttccatttgcgtgatccatttcttgtttcagtgtctttcttacatcaaaggctcggatttggtcgtgttgatctgatctaaattggtgtttactgtttatgattcttgttgctactttctgattctttacagtgttctgttctgttctgttttgtttttgtgttgctagtgatatgcatatttgagagatggtgttcaagagaaagttagattgcctttccgtgggatttgattttcccaacattcccagagctcctcgttcatgcagggtaaattttgattcatctggatctgttagctcaatgtcatgaatttgccttctgatgaatctttttttccagaggaaggttctaaacaagaggattgatcatgatgatgataacactcagatctgtgcaattgacttactagctttggctggaaagattctacaggaaagcgagagttcctctgcgtcttctaatgcatttgaagaaattaagcaagagaaagtagaaaattgcaagactattaaatctgagtcttctgaccaaggaaactctgtgtcaaagcctacttatgatatctctactgagaagtgtgtggtgaacagttgtttttcatttccggatagtgacggcgttttggagcggactccgatgtctgattacaagaagattcatggtttgatggatgtagggtgtgaaaacaagaatgtaaataatgggttcgagcaaggagaagcaaccgatcgcgtgggtgatggaggcttagtcactgatacttgcaacttagaggatgcaactgcgttaggtctgcagtttccgaaatcagtctgtgtgggtggtgatttaaaatcaccatccaccttggatatgacccctaatggttcctatgctagacatgggaaccatactaacctaggtagaaaagatgatgatgaaaaattctatagttaccataaacttagcaataaatttaagtcgtataggtctccaacaattcgaa

SEQ ID NO: 60505 - DNA, 206 bp, Arabidopsis thaliana landsberg
aaatgcgcccttggcgttgtgattcccatcccctttttccattcaaatgctaatcagtaaatttaccaaagttttttttattttttgaggagaaatttactaaagtttttacgccttcatactaccaaagtttaaacaaaaaatttacagttttaggttgtttttgtactctaccttaaacatctattttaagactgtctgatcta

SEQ ID NO: 60506 - DNA, 663 bp, Arabidopsis thaliana landsberg
  unsure (1)..(663): unsure at all n locations
tttttaacttgaatctccagacattgtacccataaactgcaataattttacaaaccttattttttaccaatattagaattttctacttaacggtctatgtaaataatttttcttacaaaaataatagtcactgctcacttgattaaatctatggatcttgtatctatactcttcttcatatttttgttgatatggatttacatatctaaaacaaaacaaatttatatttttcttattctttttaacatattaagaaagaaaaaatttgtaactatcgtagagagcaagacaacaccaaatcaaacacatacgcaaaaccaaaactatcggactcataataaaaacgaataaatcaaagggttttaatgataacatattcatccatctgccattccactaagttagatcaactaatcataaagtaaacatcggaatcatgattatgaataagtaatcactcattagtctatctcttctctctctcgngcgtgtgagttgtgacttatctttgagaaataaaataaaaaatagacaccaacccatttagaaaaaatggcaacattaataaaaagtaaacgggctttttctctttctttagttttgacatccccagaatctttcttccttttggttccaccaaacaaaccttatcaccttttctct

SEQ ID NO: 60507 - DNA, 941 bp, Arabidopsis thaliana landsberg
tggtactatagtagaagaaagaaaaacaattgtaatacaaaattatgtacatcatatacataactattttacgcagaaaaaataaataatacaaaattgtttacatcatgtaaatgcagaaaatgtaaagctctctagtacaaacaaattattgatgataatgttaaattcctattggttaactcatgagttagattaatagaaagttagaaacggtaactgtatatatacccaaaataatgaaatatatcaatagaagcagtaatacgattagcggctaacaaaaaaaagaatggtattaatatttttttttttttgtcggcaatggtattaaaatggaatttattgtactatcattttaaagggcccaaaaatggcctataaaccaaccagacaattgcacacatttgtcggtaagagagcacaataaatcgttttaacaatgggtacgaagaagcctctaggcccaataaaacagacccagtaagataaacaggccatcaatacggcgtcgtttgataatattcaatcggcgttagaccaacttcttctcctctctttcttcccggcggagcgactacgatgtttgcggcggtgagtgtacgagcttctctcaaaactttgttccatggaagacgcagctcatcttacagccgatattgtacgttattcgttaatttcttgtatcaatccttgctctttcgagagattttcagatatttgaatatctggaaaatgacacttttcgcaatggctaattcggagtttctcaggtgaaattgcagcgatttcgaagcgtatttcacaagataggtgaggtttgatttcatatttctcactttcgtcagtgtttttggttgcttgacatggtttcgttaaggtattagatatcttaagcttaggaacaattgcatgtgagtttcttcatgctggtagattca

SEQ ID NO: 60508 - DNA, 1114 bp, Arabidopsis thaliana landsberg
aaagcatagactctatatggttggtgactattaacaacatgaagagattcccgagaatagctacccactaatgtcatgcctatttattgactgcaggaaaaggcgagatcctaaactgtacaaagaggcagaacagcgacttatttaatggtgttcttggtggtttaggtcagtttggcatcataacgcgggcaagaatagcattggaaccagcaccaaacatggtaaacaataaataaataaaaaacttaaaaactgaacacgcgtgtgtccttctaactctgtataatggacaggtaaaatggataagagtgttatacctggattttgcagcttttgccaaggaccaagagcaactaatatctgcccagggccacaaattcgattacatagaagggtttgtgataataaacaggacaggcctcctgaacagctggaggttgtctttcaccgcagaagagcctttagaagcaagccaattcaagtctgatggaaggactctgtattgtctggagctagccaagtatttgaagcaagataacaaagacgtaatcaacaaggtgagaaaacagagtagaagcaatcggtagaatcttctttggtagatgacattcattggaactgaaaatatatatatatttgtccaatccaggaagtgaaagaaacattatcagagctaagctacgtgacgtcgacactgtttacaacggaggtagcatatgaagcattcttggacagggtacatgtgtctgaggtaaaactccgatcgaaagggcagtgggaggtgccacatccatggctgaacctcctggtaccaagaagcaaaatcaatgaatttgcaagaggtgtattcggaaacatactaacggatacaaacaagggcccagtcatcgtctacccagtgaacaaatcaaagtaagaaagaaagaaagaaagaaagagctagtcatgattttgtctcttttcacttgttgacaaaacaaaagcatgttggtgagcaggtgggacaatcaaacatcagcagtaacaccggaggaagaggtattctacctggtggcgatcctaacatcggcatctccagggtcggcaggaaaggatggagtagaagagatct

SEQ ID NO: 60509 - DNA, 1246 bp, Arabidopsis thaliana landsberg
taaaataaatctgattaattcaataacttacaaaaataaaaatggcggtgtcatcatgcattggcgtgaagctagagaaagcatatgtgaataatagtgattacgaatatcttatttgaaacaggaataaaattatagaaagttgtcgttgagttttatatgtattcgtttggttaaagaatgatatgcttattggagtactcattagtgtgaaattctattataaaacctaaacattcaattcatatagaaaacctacatgctaaatatttagatttatcagagtcttattaggatttgagttttactaagttttcaaaatttacatacaaaaatattcgaagaagaaatatagatctaagtatgagacttgtagtttatcacacaagttaggttaaagtacaattaacttaaaatgtctttaatcagcacacaaaagccatttagtgactagtactccataaactatgcttttaaatattttatagccaaattggagttgagatatcgatgtcatctgataggatctattcttaatcattttagtgtgtcatcatttttttaatgacacaagtctctttaaccacacaacgaattagctttgattattcttttagcattaatctatatgtgttttgagtttggaggacaagttgatttaaccacaaatttagatataatatcacggaagatttcataaatcttggctcgtggataaagcattagaaaaattagattatatattctatacccaatacaaagattttaataattatttacgaacagcaatggataacgacataacaagattagactgtaataaacctacttaactcagtaattaattaccgattacgtaaaagggtatttcggtaatagtagtattgatcggtttagttttggtcggccgaacttaaacagacgaataagaacagaggaaaaagagagagagtagtagtttctaatttcgaagagaaaaatcaaagattaattttcgtccttaaagcaaagcgtctaactttcttcttctccttcttcctcctcacacaccctcttgtctccattagaatcgtttctacgatttttccccttcttcaatttctttccaaactcgtataaattgtacatactttaggctttgttctgttcttcctctgtattaaagttccttgtacaactcaaaatccatctgcgtttcgtgttagaatttgtgggttttgtgttaatctgtttgtttcaatagaaa

SEQ ID NO: 60510 - DNA, 349 bp, Arabidopsis thaliana landsberg
tctggttgagctcaaccaggagcggccaacctcgatcataaccccactcccattatgcgtctagtcgaaaccgtcacccaaaatctgagatatatttttttttgtagaaacaaacccggacatgtcctgcactctagggttcaagttggcggggactgctcacttcttcaccccggcgcctccactacaccaccacgtttccatgaaccgcccgctcgccggttcatcgtacggcgtcccgcgtgcatggctaccgcagatctagccccgtctgggatgtggcccacccgcaccaccccccgtacggtcgacgcctcccctttctcgtctccgcggcgtcgcagtcgca

SEQ ID NO: 60511 - DNA, 648 bp, Arabidopsis thaliana landsberg
  unsure (1)..(648): unsure at all n locations
ccaaacttactttaaggaaaacatttcgcctttttaccgagcctgcatggaccatcaggttttatttcctattgacagtcatcacatataccttgatctctctgagcatcatatatatcaaacgacttgaattgactgtcccattggaaactgcaaaagaacaatgttgatttccaaagatttggttgaaacttgaagtggtactcttgcttgaaaggcaccacgtgaattcctagatcgtttgttggatttgcaatgtatggtagaggtggaccgccaatcaagtttgtcatcgtgacaaccgtagcgcgccataacggtgggaggcccccataacccgaaccaaataaaagaaagaagaagaagcaaacaatagaaactttttccattttgatgtttgtatttatgaatgtggcttttcaggttgctttggagttgattttatagtattccaagggctcgacggtttcttacatagtaactatcccattgactattgaccaaacaaacaaagaatncagtgtaaaagntcatgtgaccaaacaaacatccanatcagtaaaatgagaatttgtgtggttttgacccagacaaaaaaaataaataataatataaatcttaatggatatgcgaaatgatcgtcaaaaa

SEQ ID NO: 60512 - DNA, 1325 bp, Arabidopsis thaliana landsberg
  unsure (1)..(1325): unsure at all n locations
taatatctaaagacttccaaacagattcctgagtaagaaacccagtggaactatagtactgtaacatatataaaatcaaagaaaactcaggtttatagcattatccaatcctgatttctgccaatccttaaccactctcccatgctatcaaaaatctcagctcaagatcatactacctaattgcctatgagctcttgggaagatcattatggatttgataactgaaaaaagtaacagagaaatagcagactgcaagaactactccaaacttctccactgatatgtatgtagtctaacaataataaacagacataaattcttttatcaagcttcaagagcaagttagtcagaaaacatcacagccaaaccaaccaggaaaacacataactttatcacataaaactaaatttaatgtaatctgacttaacataaaccatcctttgggacgaaaggaaactatataaacatgcagtctttctttccctcagctattctttcggatggattataatgaatctcaaaagtgaaatgtcttgattctcagctacattactcaaaggcgaagataaacttaccacatacaaggccacgcaagcaaccaagttccaatgggtttatccaatcgagcaagcttagcataacctctaacttcttctggtaaatacaaatctatccaagaagctttcttaacaacaacaccatcactcttctccttatcatctttcttcggctttccctccaaaaccgaagaagacgacgacattccacaaattaatctgtaattccaaccaacaccaaaaaacttctcctgatgcaattctcttcctttactccatacttggtaattatcattccatgaaggataacacttagtgaaaggatttgtgtaatgggtagtcacaggattggacaaggatttatgttgtgattgccaaagagcagaggaagaagatggagttacggagacggaagatnnnnnnnnnnnnnnnnnnnnnnnngagagcccaaaaaacgccatctttgagagaaattgttgcctggaagaaacaaagacttgagatttcaaacgtaagtgaattcttacgaacgaaagctaacttctcaagagaatcagattagtgattccccaaaaacaaacaaaactatctaatttcagtttcgagtgatgaagccttaagaatctagaacctccatggcgtttctaatctctcagagataatcgaattccttaaacaatcaaagcttagaaagagaagaacaacaacaacaacaaaaaaaatcagattaacgaccgaccagagagcaacgacgacgccggcgagaaa

SEQ ID NO: 60513 - DNA, 506 bp, Arabidopsis thaliana landsberg
caattgatggtatcaaagcaaagtattttaaattccgcttgagtctgaatatccctataaatgagattttgaggcaaagcaaagtgatatattttgataatacaacgaaaatgaattataagattggaatcatgagcttgctcgtgattacttcaataatcttcctctttctggttccaggatagaccttctatgagctgcacatttcattttgtctatagtaatattatgagaaatatcaatatggtgttattgatatattagttgttttttctaattttgaatgaattgtagataaagtagaagcgcaaaaagaatgcattggaccatgtgatatgtttacggactgtcaagccgcttgcgtcgggattaggaaaggatacaattatggtcaatgtgttgcctggaagcccaaggatgacgatccctttacatgttggtgctacaaaatgagctgcataactaaggacaacatataatgttgtgaaatcatcaatacccaattt

SEQ ID NO: 60514 - DNA, 1132 bp, Arabidopsis thaliana landsberg
acttacccccaccggatatccgcatttctttacgggtcggatattcgctttttgttaataaagctctttacgttatctattaaactctgtttcctttcaatatatccagattctattttttaaaaattactgcatattatattaacatttttgccacttgtaaacatataatgcaatatgtaatttgaatttgagacaattacgtaactagattcttaattcttcttcttcttcttctttttttgaatataactaactgtaggatttgtcaagttaatagttagtggctaagaatattcgttttggtttagataaattatagtagcataatttcataacaattttaaactatttgtttcaatttttttaattccaattaatccttgaatttcactggcttaattgattactgaattgtatatttttttttcttaaaagatattcattgaaatgattatattgaaaacccttaaaacattaataaggtcgttgtcaaatatatcagaaaataaatatataaaaaattaataagacaaatacccttattgcctttgtttgaatgggcctgaaatattattattaggcttaatcgtacaacttaaagtaaaaattgtaattgaaatttaataagacaatacccttattgattttaatgggcctgaagtattattattggtcttaatcgtacagttaaaataagatttgtaattgggccttgtgaaaacgattggagtggatgataatatgatcaaatgacgtcagaagatccaaatataattgttttattaagtttggccttttcccatctgaaaaaatctaacacgtgggaaaaaaataatgaatgaataactctttatcccaatgatccaaaaacaattgggtaaagaactacaaaaaaaaattaaaaaacccaagtcaaaattttcagattgtgaataatggaattcaaaaattccaaagaaacatggaaccatcggcgtaagtctcttctccaagctgataataatcttgtgtaggcgaaagctgctctctgaaacgatcaccggagtattcatcggagaaatcatcaaacccagggaataacccaaactccgaagcgaagttacccgaaccaaccgtcggaagcatactc

SEQ ID NO: 60515 - DNA, 1107 bp, Arabidopsis thaliana landsberg
ttgttgtttaaaagaatctgtatttgtttgtcactctagatcccaaaaagcccatcgagaagagggggtagatctgttataatgtcttattaaagattttttcgaaatgtccaaaccttggtttccccattatatccattaataagcccggtggacttttgatcctgcactactgcttaactgtttaaagaagctgaaaaacgaggtaaagaggtggttacaaaatcttgttgaccttaggatcttgaagttgggagacttacaatagactctgattagtttttaagctttccagggctcagtttatgtgccatcatttgatcatggagttggggatccagttgaagatgatatctttgttagcctccagtaagtagtcagtagcttcctaaatctgtcaaatccgaatctagtgtaatatgaaatggttttgtttgcctattccggagacagtcagctaacttatgtcctcttcttaggcataaagtggtaattgtagaaggaaactacatcttgttagaagaagggtcttggaaagacatctcagatatgtttgatgagaaatggtaaagactaatcaaaagtgttttttccttttctcactcactcgtggtatttgagttcggttttaccaattgatgtctttccatcttcaattcaaggttcatcgatgtgaatctcgatacagcaatgcaacgtgttgaaaaccggcatatctcaactggtgtgtacaatttctcttatttcgattcttgagaacccgcaatgacctcagagaatctcgcttttgtttagtccgttttccctttgtgaattacaggtaaaccaccagatgttgctaaatggcgggtaaaagctctggctctactctacttaatattcagttacatggtttcaatggtttgttcaaggtagctagctgcttctttttttcaaatttggatggcaggtggattataatgaccgacccaacgcagagctaataataaagtcaaagacaaacgctgatctactgatcagatctatgaacatttgaatctacataaaaggggaaatattggacgaaacagaataagatgaataacaaaagacgatgttgcgcttcaa

SEQ ID NO: 60516 - DNA, 978 bp, Arabidopsis thaliana landsberg
gggacacatgtagctgtaaaagttttggttcatggctcaactcttagtgaccaagaagcagctagagagctcgagtttcttggaaggatcaagcacccaaatcttgtcccattaactggatattgcatagccggtgatcaaaggatcgccatttacgagtacatggaaaacggtaacttgcaaaacctgcttcatgatctgccatttggagttcagacaacagatgattggaccacggatacatgggaagaagaaactgacaatggaacccaaaacatagggactgaaggccctgtggcgacatggcggtttaggcacaagatagcacttggaactgcccgagcattagctttccttcaccacggttgttcaccgccaataatccatagggatgtgaaagctagtagtgtttatcttgaccagaactgggaaccaagattatctgattttggtttagccaaagtttttggaaatggtttggacgatgagattattcatggctcacctggttatctccctcctgagttcttgcaacccgaacacgagctgccaacaccgaaatctgacgtctattgctttggagttgttctgtttgaactcatgacagggaaaaagccgattgaagatgattatcttgatgagaaagatactaacttggtgagttgggttagaagtttagttaggaagaatcaagcatcaaaagctattgatccaaaaatccaagagacaggctcagaagaacagatggaagaagctctcaagattggttacctctgcacagctgatcttccttcaaagcggccaagtatgcagcaagtagttggtcttcttaaagatattgaaccaaaatctaaccagtgaaacatcactttctgaatctctacaacaatgttctttttcccttccaagttttatctctttacctttttaaaatgaaatgctgtttcccattgttgtatatataagcttgtttgggtt

SEQ ID NO: 60517 - DNA, 430 bp, Arabidopsis thaliana landsberg
gtgaataccttggtttgggctagtgaggataattcagagttaattgtttccttccatttgatctagtctgagcgttgttgacactctgtaacaccccaggtgttactaaggggctggcttcctaatgacacatatacctattatcacatgtggttaagacttggaggagagggagcacttaagaccttggaagcatgagtgagttaagaaatgccaaggaccaaaacattacccaagcttttaggcaatatcaccttgggcaaggttggattgaaccttgggtcccctctcttaaagcctttagttgagagaaagatcaagcaaatgcacatttcataatttataccttaaccaaagtttaagagtaccaaaattgtttacaaaagacagtaaagggactttacaaaaagacccctataagaacccctaa

SEQ ID NO: 60518 - DNA, 468 bp, Arabidopsis thaliana landsberg
tgagtttttagaggtataaaatctcccccaagattcaacattttcgcttttcatattaatgactcatctgtcacacgactcttaaatgatcatcacacgcttatttattccggcgaaagtggactattaatttctctatattctggttccagctaacaaaagaacaaagaagaatccgtcgaacttcaatttaattccattaaatatatcatgaaacctcttgattaattacaaaatccattaacaaaaaaataattaatataattttgattgagattaatgaaaattgtttcagattctttgagagacagtagagagacaaatacttcattgacatgttgtggtttaatctcaatcctcgtcctcgtcatgagtaactttcgccgaacttaatgttctacacggttgtgacggcagttgctgcggtggtggcgcgtcgacaactaacgctgacgacatctccatttg

SEQ ID NO: 60519 - DNA, 468 bp, Arabidopsis thaliana landsberg
gaatttgcaaaataacggctcgggactttgttttaatgcaaagtgaaccctaaaacatgtttatcccataactcgctcattttaactatgttttgacccgttccaattgtgttggctacataaaaatattttctatgcagtagcaataatatttgtggcgtatcatgtagttttataattggaaattgggtaaacctaggtttagcagattaagcttgctaatcaaagtaacatatctataactttaacataactaaaatatgatatctaatcaagttacaacctatactaaagttgaattggttatatatttgtaatatatttcccatatgatttatacatagaagatattataactttagcaaaccatacctttttaatcataactctttaaccataactctgaaatagtggttcttgacctgcgatctcgagcagtgtgagaatattttatgcagatgttctcat

SEQ ID NO: 60520 - DNA, 308 bp, Arabidopsis thaliana landsberg
cctgactcactgactcggggcgggtgtaccttcttatacaaccagcaggatccacttactcaaaggcgagaatccctgtatccacacgatcaagagataacacaggaagaaccatcataccaaatggacattataaggccatgaaccagctaaaggtcataccgctgtcgtaccaacatagcctccgcccacccgacttgcatcacataaatctacgctcaagccatagatggctaaacccgacaagactataaagataccactctgtatgaccctggaagctcattcgaacactttcatgttccgac

SEQ ID NO: 60521 - DNA, 1177 bp, Arabidopsis thaliana landsberg
aagccgtcttatgcacaacttgaggttagttggtaccactcaacacctaaccccagcttttgtcactttctctaactacttatatccataaagacttcaatgtaaattcagctttataaccataaaagaacctaactttgaagattttgttttctttaatagttgagttcgacatgcaatcaaattttcaccgtaagatacatgtttcaaaagaaaagaaaaaaaaatgaaacacttctgttgtgttttgttttatgatctagtacttttgcagcttccttttaaatgtaatttttttttcacccactatagagacccatgtaacataggtagggacatgaaatggtgtactccacgtgaactgtattaaacatgatgggataattagtgtggtcatattttgattttttcctctataagaatccaaatgcttaagcacaagtcgttagctatttattatgtcaatatagagaaaggtacacaaattattgtgaaagataagtgtgattcccactagtgttggactgttgtgtttaatcaaatattatatgaaaagaaaaatattccaatctccattgatatttatgctaccacgcgtgcaggccaagagtgtttatggtgcattgcacggtctacaggtttgcggtcgctatttttccaatttggttatcattatatgttggttaaagatttgagttactgaagaaaatgaaattattataattgcagacatttagtttgttatgccattttaatttgaagaaaaaggtcatagagattctaatgactccatggaatatcatagaccagcctagattctcttaccgcggccttttaatcggtaaaccattattcatttcaacttcttctctaatcacttaataacacatcacttctgatcgactgtttttgttactacacagatacatcccgacattatttgccacttcccgttataaagaacgtgattgattccatgacatatgcaaaacttgtaagttcttaagatgattcaatttggttcggtttataaatcccatcttagaaatgaccaagattgatatactttggttgggtgattgcagaatgtggcacattggcacattgtggatacacaatcattttctttagagataccttcttatccaaagctatggaacggcgcttactctttctc

SEQ ID NO: 60522 - DNA, 654 bp, Arabidopsis thaliana landsberg
acctgcatatatatatatttgcaaatcttagtccatgaataatggaatcttagacttgatcatactcacaggataatgaccaagcccgtatgatacaggctgaaaaaagctcaattacctcctcgagatttgtagctactgcgagaaactgttcttcatcacctaggaacttcatatcagctatttcttcattatatccaaccagcctcttgcttagcactaactctgtttcttccacattttccacaacggagtagaaaaagaactgctgatcagcagtcacacaaagcagtccgtgatcagaaggcagcatagcagctgcagtgaatcctcttttagattcctcatcatccgagctgacagtaatatccgacgacttttgctcatagaggcaaattgaactgtcaaagtaaacagccaaagatttcaatacatttttcttacgccaggatagtttatatgactttacaccaaacattatcaacgtaacaaaacctattaaaggctcacccttcagacttccagatgcgcacaacaccacgttcaccaacagtaataaaatatgttgcttgagaatcagattccttcttcttactcttcttctgatccaaagaagctacaaatgaagcgaaaggcgtcccagaagaaactgtt

SEQ ID NO: 60523 - DNA, 372 bp, Arabidopsis thaliana landsberg
  unsure (1)..(372): unsure at all n locations
tgctttgaacggggaggggagattatctacaggaccgggccatctttatattgaaattgtggagtgnnnnnnnnnnnnnnnnnnnnnnnnnaagaccaggcagcactacaatgctccattgatataatcaagagagctacgccattgacattatcccacgcgatccagagacannnnnnnnnnnnnnnnnnnnnnnnnnnnnnnnnnnnnnnnnnnnnnnnnnnnnnnnnnnnnnnnnnnnnnnnnnnnnnnnnnnnnnnnnnnnnnnnnnnnnnnnnnnnnnnnnnnnnnnnnnnnnnnnnnnnnnnnnnnnnnnnnnnnnnnnnngctcttgcttacctatacgtagattaccgatatcatacctgcgaa

SEQ ID NO: 60524 - DNA, 255 bp, Arabidopsis thaliana landsberg
ggattgcagaattggtggccgatgaacgcggagcgctattgccacgggactgtgcgccggaagatgttgcgcaagctttgaagcgtctaacaggtaacggaaaggagctatacagaactgctgcaaaacaatggattgttgagaattactgtgcacgcacgaacttcaaagaatttatcgacgacatacggcgaacgtggttgagtcagtcctggccgggacgtgcggaaaatatgcacgtgcgcgcatgcgacg

SEQ ID NO: 60525 - DNA, 603 bp, Arabidopsis thaliana landsberg
gatcgatcacgccggtcgcctgcccttcttccgccgtgaagattttgccggtgatcgtgatctcggtggcgaaagagcgcagaccgcgataggcgagcagcgcccagtgacgggaagcggcaagcccacggccggtctccgtcacctggaattttgtgcccgcctcggcaacgatgatgtcgctttccagaaccatcgcgagcccgagcccgacggcgaaaccgtgcggcgcggagatcaccggcttccagttgatcgcgcgtgtgaacagatcggcgctgtgcgctccccagccctgcggaccgccttgtttctccagctccgcttcgctgcgcagttgccgctggtgcacatcggcgccgctgcagaaggcgcgtccctcgccgcgcagcaccgcaacgtcggcgttcggatcgacgtcgaacgcgtgcaagacgttcgcgagacgcatgatcatcgcgtcgtcgaatgcgttgagcttctgcggtcggttgaaggtgatcgtcgcgatgcgatcacggcattcgtaccggatgacgtctgattgcgcagcgtctgccacaggatcttcatcaagacagccggtggatcggtgagcgacac

SEQ ID NO: 60526 - DNA, 394 bp, Arabidopsis thaliana landsberg
tctaagctggccgcagcagtcatgaacgtcttccttggtctagtggtcatgatttccgcttgtcattaacactgagaagcgcgttagaccggggttcgattccccgagggagagtttcttttttattcttttgtttatagatcttgaatgattcccttttctttttcctcggagaatttcccatgtgaattaagctttcccaggccgccaagccgttcgaactgaaatctctcaagtcgcggggccgcgaagctagctagctgacgaggacggatacgaccacggtatgcaagcatagcgcacacgaggaccgggtcaccttaacaaacaccgactggctcaaaagcatgacgcggcttcatcgggatgcaagatgatatttacacgcccaggg

SEQ ID NO: 60527 - DNA, 125 bp, Arabidopsis thaliana landsberg
aaaaaaataaataaataaaaatacaataaaaaataaaaaaataaaaacataaaaaaaataaataaataaactaaataaaaaaaaccaaataaaaaattaaatcacataaaaaaacaaaaaataaa

SEQ ID NO: 60528 - DNA, 482 bp, Arabidopsis thaliana landsberg
tgcaagaaatccttgcgcctgttgattttcttctgaagctggagtagtccatagagcaaagcctcagcggttggtgggcaccccgggacgtatatgtcgactgggacaattctgtcacatcctcgaaccaccgagtaggagtagtgatagtatccacctccattggcacaacttcccattgaaatcacccaccttggctcaggcatctggtcataaaccctgtgattgtattcaaacattagaagttggaatttcacacaggataaagaagaacagaaccataaatcatttgagttgatccgcatatacaacttctctcaatcttaccagatcaagactgatttctgcacatatctctatatactagtttctcactaaatagttaaattcagtataagaactaatctaaaccaacttagaaagcagttaatcatctcctgaatgcatctaaaatgtgctcgtcttattggttgatgtttcac

SEQ ID NO: 60529 - DNA, 308 bp, Arabidopsis thaliana landsberg
gctatgatagtttggcgacggcctcgcgacgcaagatttctggtcatataaattttggaccgctaattttatattccatataataaattaataatcatagaagaagaggaagctaaaatggacgatgggaattgcaactcggtcggaccccactcagacactgatctttaagcaatcgttctgtttcgattccgcaattacaaatgtagcaaaattcgatattcaaaaaacttagtagccaacgaacgatcccgtccactcatttagtttccagatttttcttccggatctctctgttcttcgtatct

SEQ ID NO: 60530 - DNA, 374 bp, Arabidopsis thaliana landsberg
atgagattgatatcgctgttgaaaggttttttctagatcacagcaaatgcatcaaagaacagcaaaatctttgggatgatcactactctgctgatctcatgctacttcatcatggtattgtatttagatcttctaagctatgatgtttaaccaatctttgcgagtaagcttgtgctaaacttgatcttttgtacttgcaggttccagcatcaaggagaagcatctcaattgggacatctaaaatgtactggacttaaaaaacaatgtctatctctctgactttgatggagatttaagtgagactgcatgtttaatctagttttggaacttaaagtgacactctttatgactctatcctatgtgtttttggcttc

SEQ ID NO: 60531 - DNA, 1684 bp, Arabidopsis thaliana landsberg
  unsure (1)..(1684): unsure at all n locations
atctgctttccctcaatggaaaccaacggtacttcaaatgtctttattcgcttgtgctcttgtcttcagtagtcaagagttcacaacatatattaattcttgcccttgtttttttttcttataccacaggacctagaaacttttgtccccaatctagatcccgatggagtcgatctcctttctgtaagttcactgagctagatatatgcacacacatatatagacacactacttctgctattagagacctgtatgcttgattgtgatggatctggtctcatgtttcttactanaaaccttttaaccatttgagggtttagatgtcttataaagtcatcaagagccggcggactaaaaccaattcgattaggcttcatagtttcaaaaccacatgaagcccaaaccaaacttgtttgaaatatgaacaatcttcaaaaccaggattcttgaaattcctaaccaaaccagacatctggatagatatctaagatttttgagctcctgtgaaagcaaagatgataatatatctctctgtttgatttgtttcagaaaatgctgttaatggatccgaccaaaagaatcaacgcaagagccgccctggagcatgaatacttcaaggatcttggaggcatgccttagaaaggcataaaaccagtaatctccttcattctatatataattatcaatcctaagaaaatgaagaacaatattaatgggttttgtttattctttttctgagttcgtttcctacttatattctattacgaaaaaaaagaaagaagaagatttcgagtgtgtgtttttttacttctaagcttttgagatcagtttcttgtatcttattttacccagaatatagtatttccctatatgaaatatggtttttgttttgcaaaatgaccatattatgcaacttctcagcttcttgattgtgccttgatagtgatcttttgaaatatatcccaaaaaacatcacttttttcgatttcattagtacttatttacgagttacgacgtcatttgataactagtatatatggtccgtcgatcttaatttcctatttataaagggtgctccgtttttaatgagacaagagggtccaagtagccaatcattaatgaggccaaagttgaccagaaaaagctgacaaataaattgacgagaagaacaattcaacacgtattcgatagtttggattacattttacagttggtcgaaattcgaagtagatcaaatgtcaataatctaattcgaaactaaatgaaggtacctgataaccatttcagtgttagttagcagtggtttcaatctattcagtaagcaatgacgcttccattctgaaaatcaagtccaatgggaggcataaacttaagtgtctgaaaaactcaaaaaagcatagcctcgtgtaaaatagaccgatttatttattcatgaatatatgtatgattatcaaagtgcatttatactttttacgttttaaaatttcgtatataaactttccttagtgaatataataacataatttctaatgaaaacttgttatatattattattttatatatatttttgccaagagttattatcattttaaaattttagacatttttacttattgttgcagagcgcattttctcgtacaatttatctattaatcaataaaaaatatatatagctctgtagctt

SEQ ID NO: 60532 - DNA, 1321 bp, Arabidopsis thaliana landsberg
cccccttggagctccttgtcaaacccaaatcggaaccacaatgctctttgtaggaaaacctctatgtcgatatctacaaagcccaaattaaagtcagttcatggccagcagaactactagaagaaaaggtaatttttctgacgctattgtgtcaggaaatatttcacaatgttaatagacgtacctatacagaaattggtgtgttgctgcagttttctagccaactcgttaacctgcacacaacctgggaaattagaaaaagagaaaaggctctaactagcaatactaaatgaagttgaacttgtctgtagatagggacgtcatttactgggctgttttcagtttgttatatggaatactgtatatattaaaaaatgttgacaagaaatggagatgacagagatttgggaaggtgtgttgttggaaaaacatgaagccactcgaaggttctccacctagttttcttctctatcaattcaggtatacaagttctacttacatgaccaataaaaaagtccaaacacgtaactaactgctttaatcttattatcaagactctgggatgataaaatgaaagtccaaattggctcttttggtacatagcaatcaactacaactttagaagcaacaaaaaactacctcttctagacgctttcggccttcaaagctgaaaggctttaatagcacagcaacagctaagttacccccagatcttactgcactaagaatattaatagcttcaacctggtcagaaccatatccagcactagccacctggcaagggtaacagtttaagcagaatcagatgctcggccaatactattccacgaaaataaaattcgagaaaaattgaaaaccattagcatttcattaagagcctaagcgaatttcggaaccatggttgttaataatcactgatcaattagacactgtgtatcttttgctacctatggaactgcgaaattcaaaaacgtttttgtagcagaaaacagaagacaaacaatgttaggcgagaaaagtacaaacaaggatgaaggcccttggacgtgactgtaacagctcaattggattcatggtcttcgaggcattatctgtaaacagaaagagagaagcgataagtaagaaagatagcatatccctctaatcttcttgaacaactagctaaatatatgctagttgttcaagaatctgtttttaatcaaattcaaaactcaaacggcaagaagaaacaggaaaagaatagattatggaccttggtgattgagcctctgctgtaacactaaacctccagagctgtccttgctaatactcctgaaaaagt

SEQ ID NO: 60533 - DNA, 325 bp, Arabidopsis thaliana landsberg
acagagtaatccaaaggcaagctaggatccacaagaccctcggttatagaacaagaatcggtgagaaaccaaaggcaatcattaagctgctgatcatcaagtaaatcagcaccaccagcagcgtcagcactaccagaatgtgtagcaaaaagtccattgctttggtgagagctaaagggtttcgagatcggagcgtgttcaggggaaatgtgggggctattcccactataaccgttcacacagaagatgagtgaccaaggagaggaagaagaaggagaaagaccgatagattctccggaaatccataaacccactggagcgagag

SEQ ID NO: 60534 - DNA, 1466 bp, Arabidopsis thaliana landsberg
actttctaatcaaattagtatatttttgtgttgtaaggtgacactaatgaattgatttgttatcctccaatgtcgtcgtcatataaaagattttctttatttatggaagagagaagaatcttatttgaacaaatgtttatcgaataagaatcggtaaaaaatgattataaggaagaaacgtggaaccgaatctacaggcagagggacgtgacgttacatatgagcagaaccatatataaaatccctaatcgcacgtcaacctctccgaagcataaggcccataactttttctatttaattttcttgtcatttttactattttaattgttatttagggtaaataaaatgtcagacttcgattgacccaatgagttttagggtgtgactcctatctccgtctgcactaataagtactactttaactttcgcttaccaatgcatgtcaatactcaacagtgacatatttttaattttcagaggtttttcaatgcccaaaaactttgatatttaaagatcgtacgtgttttaaattcctcacctaaaaattgtcaagtatcattagtgtataaagtgcatagatcgtgttacaaattcttcactttcgctcttattttttgaatactcactatatatataacactaaaataaaagtgaaagaatctaatatgctaaaccggtaaagaaaaaaagcaagacagtccgttttttagatatttatcgatgttttcatataaattagacttaagaaatttcaaaaataaaataatgattgattatgttggaaagaaatagatgtgaccatatttcgactgctcgtaagtataaaaactaaagtaggtggggtgcaataattactttttaattaatacagtgaaaaagtaattaatacagtattagtagtatcagaaaaattacaaagcaacatcactcaaaacgcctcgaaaataaaaacaataatttgaaagcaaatatatacacaattataaagtttaaaattttaaatttccttatatctatgtggtatgtattaaaactcacaaaaagaaagaaaatgacaaatcctcacgtccgttacttttaaatccgtagcaaaaataaataatttaattttctatctctatatctctctgatttaatcacaaatcttatcttgaatcgttatctttctcttctttccttaaaccaaaacccaaaaaagagagaccagacaaaaaaaaaaaaacctccccaacaaaaaaaagatatctgtctctactaaaagtctctctttagcgatgtcagtcggacaacgaatcgacaccgtctcaagcgacggtagaaatgatggcgacttcgccggcgaagattaaagagtatccagaaccattggcttcacatgaaggggccgacaaagattcttctgtcttctgggatactctcaggcggtttcactcaattatgtccactaagttcatgtaaccattatt

SEQ ID NO: 60535 - DNA, 548 bp, Arabidopsis thaliana landsberg
gcgcagcctgtcgacccgatcactcgaacaccgaccgttcgaactcccacccgacccgctccatgaccactgtattcggcatctccgggaactccgccaacaacacccggatcgccggctcgacgccgtcgacccgggagcccttggccgcacgctcgtatcgcggcggctcgtggcatgccagcgccttcttgaccgtgttcttcgagaccccgagccgccgggcgatggcccgaatcgccatcccctcggcccgatgcaaccggcgaatctccgtccagtcctccacgcacaacaccttatgatcgtcatgggtgggtcaaagttcgaccggaacacgtgggtcagtcttcagccggaagcgacactctacgccagaacggactcccggtccagagcaagcgctgcagtggaggctgtcgacattcctcatcggcaaggacgttctcagcgactgtgtctcgatggaccctgtcggccgccgctcgcggattatccgccggtggtgcgtttgaccggtcgtgggccgggcaggcttgcgatgctgg

SEQ ID NO: 60536 - DNA, 982 bp, Arabidopsis thaliana landsberg
atttaagtcttggccaaactggaaaactcaagtttttcttttctcgtctatgcaaaagtcggggctaacacatgactcggtccgagggttgaaatcattattttgtgatcatggatgtttagagcatggtctactattaaagttcgttctttggcagaaataatcatcgcggattcgcggtactattagttactatctttgaggaccattggccgtgctttatatatagagttgaacaactaaatatggtataccgtttggtgttctctttgaacttactaaataaaaataagcgttgaagagaagctaaagaggaaaaactttagctttaggttatgtatgttgggatagatatgaaagctcttttttttgcaatcatgaaccaatttcgtttctcggctctctccctttctccaaatctcatcatcacttatgatctttcgagaccaggtataaagctaaaacaatgatctttccagaccagtcgtgaaaccgtgaatttttttacccatcttgatcgtcctaaggatcatggttttagtgaaacacggcttaagtgtatacgtttccacttttgtatttaaagaggtttgaatacaacttaattctatgagatgtgaatttctggtctgcacagatgaagtaaacgttattcttcacctgaaagttagaattatgtagcaatagaactttaaaaataattgtatcatatcacttacacgtgagaagagagagatgaatattgtagtaatcaagtgaatatgtttcctgattcagtttctaaaacacttcaaacctcagtaaagatgcctggtttgcaccatgctgtttctccttacaaaacatgtacaacatcgatcgagttaattaatgatacgtttaacagatttaatggtttgtgggtttttaagttaaacgcagcctgctttgttctgcatcacgatagatccgcatatttggcgagaaaatagaaatccatgaa

SEQ ID NO: 60537 - DNA, 794 bp, Arabidopsis thaliana landsberg
gtaaccttagctcgagcggttacgtttccggccgtatcagttttccacgcgtcggggaatgattcgtctgcttgagttcctgtccacgtggcaagcattagatcactgttgtgagctccacctccttcgagacggtaccattgcggcgccaatggactatccggcgggtctcggagcggaatctctgacacatcgaagcaaattccaccaaggaattggctggtttcgattcccgtcgatgaatcccacacggatatctccagaattggagaggaagataaatccggtgagtcgcggaggaaggcgaaggtttgatcccactcgaagcaagaggtttttctggcgggttttgattggatcattgtgccggagagtgagatctttgtgactggactccctgaggttggtaaagaccgagcttttaccacgcggacgaagacgtaatgcattttctcaaccaaatcaaacgtggatcgttcgatcgttgatacgtcggagatctctgatgtgtagcttgcagtttccgatacgcttctccgtagtggttgtggtccgtttttggtttctggtattgaaccggatacagatcttgaaatgataacttccggtaacggtgatcgcggcgccgaagcccagcttattgtatcttctgactctagcacaacatcttgaccgtctagttgattctgcggtggctcctccacgggtttcgcctctgcttcgttcttatctgattccgacatcgctggttcttctccaccaaccgtagcgctttcttgcaaaggtggtgaggc

SEQ ID NO: 60538 - DNA, 418 bp, Arabidopsis thaliana landsberg
gtgagaaaagcctagaaaataagctcatgtcttcctattttgggcgtcaagctttcatttgccagcaccagccaatgttttaacagagacacttctcgaccagtacttaatagaagtatcacgagaccataaatgtaactacaactgaaaaactctttgtttaccttctttaggcaattatcaacagaacacaaggacagacagtgactaataaaccaagaactatacagaaaaccacaagtctcttttcctagtcactgtggaggttaaggaaacagttcttgtatcaaaaaagttgtgtttttttctttctaatcacagatgatcattccaatatgataacagtttgacaacaaaagggactatttttaacaaacaaacaactgaaacaagggttgatgcttaagttaacatggac

SEQ ID NO: 60539 - DNA, 446 bp, Arabidopsis thaliana landsberg
tttttttttacgaattcagatgatgacacgaatggttggatgaaatggtccgacattttattatctcacgttgatttggggttcaacaatattaacatggcactacacatttattctttaacaccgtgtagagatggcaagtaaagtctttaaatgggcttataaacgggctcatttgattactcaaacatatatggtttccgattcttccaaaacataattatgtgatattttgtttacttgcttaataaaattaagcatatagctctttttatcatatagtttagctataacatgttatctgtacactaactcatgcgttacattgcggttattttattttagaaaatgttttcggcgatccttcattactttcgtatgtaaatcctattaatttttgttataccgacatttaaatccgaaaatatctattaatattttgcctt

SEQ ID NO: 60540 - DNA, 307 bp, Arabidopsis thaliana landsberg
cctggggagaccccccattaacagggaaatgatggagatttcttttggaccaatgatacctaggcctgctgctatgcgtgttcgcctagaggaggggcccaactcagaacacctcgcacatgtaacatgacttatattcaaagacatacctacacatcggctaaatgcgctcgacaggaaccaagacccactgatggaaacaagtgccaactactgtgatttgacttgaaatgacgttcactgcgcacaacgcaagttgcagacaaagtaccaagtccaataaattcatgggcttccgactggactg

SEQ ID NO: 60541 - DNA, 262 bp, Arabidopsis thaliana landsberg
ccaaatcaacccgtgcagtctctaaaggtgattgactcttcagtagcaacttcttgctgtccttgatatgtaatcatgtgttatgtcttggaattcaaaaggaaataatgattaagatcactttcatgagtgggttccacgagcactaaatggatattggcatatctaaaggagacttaccaaataatccttaagtctcaagtcccctttctatcaaaaagaagaaaaaaatctcaagtggttgaaaatggacgacgacttg

SEQ ID NO: 60542 - DNA, 387 bp, Arabidopsis thaliana landsberg
caactgccgaacctggctaactcctagctcaattttcacaattttatcattacctttgttatttagggaactatctaacatctcttacttataactaaataacaaaaaagggtgataaatatttatttatgggaccccaagacatgttcataatgaaaaacaatctttatatataaccatctactccttttatgttattctcatcataacacatacacactttttctaacaacacacacactttaatttttaccctcactttattattaaatctccttcagttgttacatcttaaaacatcacaatccattatacaagagatatcattcattgttgtaacacttatgtataatgtgcaaaaagcagaatagtgtgtgaagttgtgat

SEQ ID NO: 60543 - DNA, 159 bp, Arabidopsis thaliana landsberg
tcttgctggaaggtccaggacggactgcttacggaatgctatccatactctgctagatacacggttacttgctcacatgcacaaggatggtcaatcaatccaacatacatttggcttgtttgagatagatccgaacctccatttgcgggccgggcagag

SEQ ID NO: 60544 - DNA, 1048 bp, Arabidopsis thaliana landsberg
  unsure (1)..(1048): unsure at all n locations
aggatgcgaaaaggcggggtgatgcttttgctcgtgctttttctgctcattggccaaggtttggttcatcacaacagatacctctctgtcaagtcaaggctgtgcaattttgaccacaatctatcaaacagaaaattcatagtacagcgcttcaagaaaagcttgttttttctgtgctttgcctttcactgacaatttttttggttgtagattaatggaggagccagctgcatatggaaagctggggctggcaaatctcttggaacttagggaagaatgcttaagagaattccagtttgttgatgcctatagaagcatcaagcaaaggtaaaagatagtcttatctctcccctgctttgagttgctcttatgctctctctttcttcgaaattgatagggagaacgaggcatcacttgctgttttacctgatttacttgaggagcttgattcgatgagcgaggtctgtgacctttaaccttcctctctttgtaggtttatggtttgctactaaacgtttcagtgctatacatgagacaacttttcttacttggtgtttcaattgtgctcggatttttcaggaggcaaggttgcttacacttatagaaggtgttcttgctgcaaacatatttgactggggatctcgagcatgtgtggatctatatcacaaaggaaccattattgaaatatacagaatgagtcgcaacaagatgcagagaccgtggagggtgagagacaagaccaccctttttccccgctgaggttactttttcctaactgttaatttgaagctggaaatcttttttggtccgtaaaatcaggtagacgattttgatgctttcaaagaaaggatgcttggatctggaggtaagcagcctcatcgacataaaagagcattactttttgttgataactcgggagcagatgtcattcttgggatgcttcctcttgctcgagagtttctccgtcgagggactgaagtacgtgtctctctctagctcttnctatagtaatcttctcttcacaaaatcaaatgcacagaccaaatga

SEQ ID NO: 60545 - DNA, 307 bp, Arabidopsis thaliana landsberg
tcgcaatcaaacctaaactagtttaatgataaccggtcaagtgtctcaatatgataacaacgttgttattatcattctttttctacaacagaaaaaattgtaactttttgtcagtagatatatttggattagcggtcaaaacggatttgttactttttttccaaatgatacacatatttttcgaatcgactaaactactaacatttaaagagtgagattttgaatgatagacactgttaagaatgctagggaatatagcgattactgattcttttttgaatatcgattttattaaagacattatctc

SEQ ID NO: 60546 - DNA, 458 bp, Arabidopsis thaliana landsberg
acgaattcagatgccatcggccctgattgattttcccatgctctaagctctcccagaccgctcatgccccatgctacagatagccacaggggtcccgtgttgacccaataagattgggtacctgtaacaccctaaaatcatattttaagtaatacaacaaagacttttaattgcttatgaaccccgctataaactatatactaaatgcactccttaaacatagttttaataaaataacctatggtaaataaaaaatgcccatgttcatttttgaaagactcttacttagagcacatattcaaatacaatgtttatctaaacagaaaattcggtgtgactggcatcattgaatcattttattcaagaattattgtctcaattaattaatataaacgtttaccttctccatgtttgaattatggatgctcacattttaactaatactttaactataaatt

SEQ ID NO: 60547 - DNA, 1164 bp, Arabidopsis thaliana landsberg
cttgctgattatccgtacgacaccgttcctaacaaggttgaacacctcttcttcgctcagcagtaccatgtcaggtaaaagttaattattaataaagtatttactaaaagtaaactaagtttagtggtaatttttcctattagtcgaaactagaaattagctgctgcttactaggataattagtttggtgcttaaaaatatagtactatcaagaactcatggagtagtatattatttgttgttatcggttcggtgtgcttggttacgaaattgcttctttcgaggtcttacgttactacgtgttcacgttctaactaaagtctttatcgatatatgtgacaaatggtctgtcaaactaaagtctttacacgttctaattaagacaaatttctttcaagtgaagtttccaaaaaaaaaaaaatggtaagtcttttttggcaccaatactattttaatttccaaatgagaccattaattatataatccattatcgatatatgtgagacactttcattagttttgcatggttgcatgcatccggttttaatctcaaaagtctaaatataagttttcagaccactaaagccatttctagatgattttatacatttttcattaggttctcataatatttaattaataaaaaaaccaatatctctaagtaagttaattacaaccatgaatatatgtatcacagaaagcagagggaggcaagaatgagcatgagcagagaagagaggacaaaaactccgttcgtggactacctaaagcccatcatcgccgacggagacaccggctttggcggcaccaccgccaccgtcaaactctgcaagcttttcgttgaaagaggcgccgctggggtccacatcgaggaccagtcctccgtcaccaagaagtgtgccacatggccggaaaggtcctcgtggcagtcagcgaacacatcaaccgccttgtcgcggctcggctccagttcgacgtgatgggtacagagaccgtccttgttgctagaacagatgcggtcgcagctactctgatccagtcgaacattgacgcgagggaccaccagttcatcctcggtgccactaacccgagccttagaggcaagagtttgtcctcgcttctggctgagggaatgactgtaggcaagaatggtccggcgttgca

SEQ ID NO: 60548 - DNA, 1412 bp, Arabidopsis thaliana landsberg
ctaattgctttaaccgttcgagctcaccatcgttataagccatctcgacttcatatttcctctctttctcagctttctccaagttattgtcatcatcaggcaatggatactcaatctcaccagataaaagatcttcaaactcgggtaatatatcatcatctaagtagtccgagaaacttccacgagtctgattgattacactgttgattagtttcacctcttcttcttcttcctcttcctcctcttgcagctgaaaatattatccaagttgtcaaaaacatgtctctgaaagaacaaaactttccaaagtacacttacattcttgtcattgagattgtagtcgggatccacagactgttctttatcgcctccttcgccattatcttaagagcgaaatgcagaaaacaaaacaaagtcagatgctatgtatggtgttaaatacagttggtgcttgtataagtaaaaacagtagtacctgatggtttgcttggtttggagggtttaacgttgagccgcttaacagtaactgctgcaatggaagcagcaacaacaaaccctatccggacaaacatatattaaaatcttgaaatgggaatcaattcccttccccgtctcatctacagaaccggaaagtctccttaaaattatcactctactgatactaactcaacccatcgttccttcaaacaatctctagtccaaatcttgttcatcaaccttatgacaaatggataaacacacttgcttctgtaagagaaacttccaggtactgacaaaactttacagaactatgtccaccaaagaaaagaaggaaaaaaaaaagacacttatcatcacaaaattcgatcttatcagctttatggacctctcaagtcgcatgcatcagagtccaaaaatctcagcattaaataaaatgaaaaaacaaccaataatagtcgctgtttttagctcaagacagatgaggaaatagacatgtatcgtaatagatggggtcttaagccatgaccaagaagcagctgtgaaaaaaaactcaattaaaaggtcaaagctaaagattaagaattctgtctcttgtgttatagcaatttaccaaactagacggtgaactaaacacataagttagttaaagataagacatttatcaaagacaaatctagtcaatataaagattagtgatctcaaaatttggtaaaggtcattcaagaaataagtttggtccatttgcataagaaaaatgtgagatttagattatgttgagatgtttgggggaccaggtacaagtagaggtgtgttgccacgctacatagcaacaaccatatacaagaaaacagaaagattggaatttttttctaattcaattttagttaaaatggtaaaggaaaatcatatcacccaacatgaaaaccaagaat

SEQ ID NO: 60549 - DNA, 1544 bp, Arabidopsis thaliana landsberg
ggcccaactttgacctggtccaactttttctttatgtcctcgacactgcacatattcatggctgtcacaaagataagtctcaaatacactgagaacacttagaagcaacgatagtaggaagaatatatagcaaacctgaaaagcaactttctcgaacttcttcgtgtacagcctcgtctctaccaatacgtagaaactcaattccctacaagtgtttttcaacagtatgtcatgtgtatgaaagtgttcctacatgtctaaaagtagagacttgaagaaagacatgtttttttcttcactttttctaaagaacaacacatgcagtttatcagttgattttccgataaattcttcctatccttttagagctgaatgaaaatttaattcagaaaaaaaaaaggttggctacgagataaggacctgtgcttttagtttgataagtagattatcaacagcagagtttgtgtacgatgcaagcagaatagatgagcctctgatcaacaaagctttcacagcatgaaccattgtggaggtttttcctgttccaggcattcctaatatcaaagcatagtcctttgcagtgagtatctgaaaataaagcaagaaagcaagtcttttatgagctctgtcaaagaacaaagagtgtcctaagtatagcacgttcaacatgagatttgatggaaaataatcatgcaatgaccttaagtatagcttggcgctgatcattattcagactcttttctgaccaaatatatgatattgcaggatcctggctcagtatagatccattgtcaaatctaggaggctacagagacatggaaaaagaaacgaagagaaaacaaccatgtgaagaagggtataagaaacaaatgcatcatctcgtctaggagaaatctgaaaacagatgaacaagacaatctacctcgagatccacaatcattttcctgatgttatgtccattttgtacgaaaagctgcatgagattgaaccttgaacaatatgaagatcgtgaatcaatatcatgacagcccatgtaggtaggatcaataaatggaaaacaataaattacaaaatcacctcataaccgaaaatgatgtcatgaattcatccttgtaaattctccataactcatgagagagatttgatacctcagaagaaggttcgctccaaggaagacgtaatcgcttggataaagaaacctaaggattgacatagcaaaaggataatcccaaactctttagacataagaacatcaagatatattgtaccagacaaacatagctaaatctacagactgttaaaagaaaatccaggatgtatgtgcttactgatatatgtgtgcgactaatatctgctataatcccatttgcaacggtcaggtggctgacttctgtgcgaagaatctggaaatgaaaatttaaaccaacaaaaggggaacatcataaactaagagtgaaataaaaaatcgccagaaagaaaagctggtgcaactaaacttaatggtgaaactaaatttattggttcaaaacttcgaattaaccgtg

SEQ ID NO: 60550 - DNA, 218 bp, Arabidopsis thaliana landsberg
cccttgccagatgctatcggttgtggttctatcaaccgtcggcatggacctgcagtcatcaatattgttggttcgtcctggtcatatatagatcaccccggtcagggtccattggcgggggctatggccctatgaagactggttacagatacggtgcccgcgggtgtcttatacctagcgactggctatcacaagattgctattgttatgcaggcacc

SEQ ID NO: 60551 - DNA, 1113 bp, Arabidopsis thaliana landsberg
ggcaggccctctgcaatatcctagtttttgccaaagcagtcccttctctctttgctccacacttcgaaaatttctttatttgttcctcagatgcatatcaagtgaaagcatacaagctggaaatgctttctctcattgctaccacttcatctatcgcttcaattttgagagagtttgaggtactctactttatctgtcaaatcgattatagaagttttttggttcattctggaaagtttgtatgatcatttgactttccagtatgatataaataagcacttcttaaagtgttgttacataaggatcgtcatctttgtccctgtactgtagtttctggccaaaatgatgtgtgcatgactgattctttaagttttttccaggattatattaaagatccagacaggagatttgcggctgatacagttgcagcaattggtttgtgcgcaaaaagactgatgacaattccaactacatgtcttgatggattgttagcactagttcgacagggtcagttatgctttattttaattgcattcattagttaacctatttggcagttcagtttaagtagctctcacaatgttgcagaatcttttgctggcgattttgagtcagcggatggagaagctggagtattggtgcaagccgtgatgtcaattcagactatgatagagcgagacccccttcgtcatgagaaagtacacacatatcatccactgactgcacatctaattcgtaccatttcttaaaaacatgcttggaacctgctgcaatgatctcaaataactccttttgtacatctattttcaataatgtattgattttttttttcttgttcattttggttgcttgaaggtgttaattcagctgtttcgtagtctggattcaatcaaggtagctgctgctcgtgcaactattatttggatggtgggggtctactgctctttgggtcatatcattcctaggatgctgaccacaataaccaagtaccttgcatggagctttaaatcagaggcatcagagacaaaactacagattcttaatactattgctaaggtatatagcttggggagttgcctcaatacttcttattctgagttcaataatataata

SEQ ID NO: 60552 - DNA, 425 bp, Arabidopsis thaliana landsberg
agggttgagggctctacttctggagatcttgtttctcagattggctccatgagttttgattcttccagcttgcattggcggtatatctaccctaccattaacatattttttcattggaaattattttcatagacctagttaaacttttagctccccaactcttagaatcataattttgaagttatggttacattatgcttttttacttattccaggtacaacttgatggctaacagagtgctccttctgttagttatgtcctctaggattgacccaagcttctctctcaaaatccttgatgaaaccgctggtacagattttagttggtagaatatataggatcgctttttattcatgttacttgagctgctccttcttaactaagattatgttggtattttccaggccacttctttgaaaacttg

SEQ ID NO: 60553 - DNA, 253 bp, Arabidopsis thaliana landsberg
gcactttacgtaaagcagagtttggttttttgggggtgatagtggaaaacaactcatttttatccaccttcccgttcaaacatctggaacatcttcaatggagatatctccttactgtatagcaccaaagcttaaaccggtagaattcccattatctcagtgccgactccataaaattttggcactgacaactagatagcatacaactataacaccaagcatcgtttccctcccatttcctgaaaaatcctct

SEQ ID NO: 60554 - DNA, 470 bp, Arabidopsis thaliana landsberg
tgtacataactacaaattgtcttgtttatgcccaaacggattagatgttactgggaaagtatgtcctaaaatcttaagaactgggaaatcattcactgagatgcgttggttcaaaaataacacgacaattgttattttcccactaattgaaattgacaaaattatctcatcttggcattttttttttatttttttttggaagtaaaaggttggtatcgatgcttattgttatatctatacatctaataggttttccggaaattattatctgtaaaaaagatactattagtttagaaaattcaatataatacaactctagcaagtcacattttagcttttctctacatccggagtcctccttagctagctatagatgggcactacgtacattttgatactatttactagttaattgataattgtagtgataactgatcaatctgacgttttctggcagcaattcatgcatg

SEQ ID NO: 60555 - DNA, 1427 bp, Arabidopsis thaliana landsberg
aaaacattaatatactaaaagaaatgaaccaatggaagctagtattacattcttttattgttgtctcctgtttcatggcagccatgccactgtttatgtatacagagagcataatgcgttatcaagaaattaaaaaccaattgactaaaccattttaacattttcattatcttcttatgttttgtaacatgcaataatatagatgatatatatcatagagaatgtagactttttcatattattatctatgtgtatcctcagctattaattctgtctaggcaaaaatatgtgagtctgtttggaaatgattattgttttggatagagtacgtaattaataattgatttgaaatggaaattaaatactaacatatgattatagtataaagttataaaaatgatatatatagaagttgacggctttgggtgggcaattactacttaaaccaagggtcttcctcctcggacacacccaaatgatcccaataattattcttctctttatctctcttttcctcttaaccatccactaatcaaacactaaaacctagaaaaaaaaaggatcaaatcatggagacggaagaagagatgaaggaaagtagtataagcatggtggaggcaaagttgcctccgggattcagatttcacccgaaggacgatgagcttgtctgcgattacttgatgagacgatcgcttcacaataatcatcgaccacctcttgtcctgatccaagtcgatctcaacaagtgtgagccttgggacatcccaagtacgttttcattcattcttgacaacagtatctttattgatccatatatctctgttttactttgatatggttggtccatatagaagattatgtcatgatcttctttcgtgttcatggttttctagaaacaaaactttagaagttagttaattaatccatatctactaaaacaaaagttggaaccaataaactttaagatgatgatgtcacctcatttattttgcatccagtttatacaatgtagtctatttatcacaaaaaccttattcaaacatataacaatactagtcgatttatataatgttatggattggggtaaaattaatacacatatatacatactttataagtcttttattttcatgatcagatgattacaatttataagaaatttacatatattacgtaataatatgaaattaattcgagagacatagataattgtatacgagaagttgacactcttggcgttatcctcaaccaaattcttgaaaaaaaagctttggataaaataaaataagagtaacgacgaaaaagtcaatatctcgattttgttggtttatagcctttagagtgtgacatattttaagtttcaaaaagtaaaaattcgtggggtttgatcaaaattagtattcttattctctcctttgcttacgcct

SEQ ID NO: 60556 - DNA, 697 bp, Arabidopsis thaliana landsberg
gctgtgacccctatcaagaatcaaggcagctgcggtataactcaaatctttattcatatatatataagtgaaatcaaattgaaccaaccgaaatttatgtattcaatcaatttgagttaattcatagtgaacaaaccgatccaaaccaaatccatagtgtaactgaccgaatcgaataaccatatttttattaaatttttctatgttaagttatatatattttgtttcataccgttttattgagatatgtagttagacacatgaaaatatttatgatagtaacactaatgagtgatgtttttgtaggatgttgttgggcgttttcagcggttgcggctattgaaggagcaacacaaataaagaaagggaaacttatatctttgtcagaacaacagcttgttgattgcgacacaaacgattttggctgcgaaggcggtttaatggatactgcgtttgagcatataaaagcgactggcggcttgacaactgagtcaaattatccttacaaaggcgaagacgctacttgcaattccaaaaagaccaatccaaaagcaacttctattacaggttcactttagttaaagagctggcatttaataattaaacagatttaaccgatttttaatcatatttatccaaattaataaacattactatactagattaaattcatattttaatcttaaaaagcttatgt

SEQ ID NO: 60557 - DNA, 1212 bp, Arabidopsis thaliana landsberg
aattgtaactgaaaaacaacccttaagagagctatagcaaaacgagagcattccaaacttaaaattcaaaactttagctagctacaataaccaaaaatcatgactttaaacaataatcaaaactttagatagctacaataaacaaaaatcaaaactttaagaagcagaagaccatttactctaggtagctacaataaccaaatatcgtaactttaatatctacaatcaaaactttagctagctatcataaccaaaaatcaaaactttaaccaaaaatcatatcttcaggaagctacaataaccaaaaatcaaaactttagctaaaaatcaaaactttaaccaaaaatcataacttcaggaagctacaataaccaaaaatcaaaactttagccaaaaatcaaaactttagctagctaaagtaattaaaaatcaaaactttaacaaaaaatcataacttcaggaagctacaatagccaaaaataaaaactttagagagctacaataaccaaaaatcaaaactttaggtagctataataaccaaaatccacaaccaaagctagagacaatgaccgtgtttgagaacattttggatttctccgtaaatcaaacaccttactaaagttttgtttgtgaagctgaaaacgatacaagtgaacctataacgtgaatgtaacagagacaaaacctgaactctcaaacataaatcctagaagaaaatagcaaaagtaaattgagagaagaatccaaaagaagagatttttttgtgaagaatgtaacagagacaaaaatttgaactgaaaattcaattcggaaacataaaccttagaaaaaaccgcaaaaggtaaaagagagaatccaaaagaagagtttttttttgtttttcttcaccaaatgagaaaaatgtagagaatttttaaaactcaccgacaagatcaacggcggcgaaggatgaacaacggcgacgttttggagagtttggagcagttttctttagcattatttattttttttatcagagttttttttagcattattgtgacaactgacaagtttttttttttttttttctcttgtcatcaattaaaatatatgtaagaaaagaaagttacatgaaaaatgggccacttcaaacaactttcaagcccaaagtaaaggtcagcagaatttggagcccaataagagaaactagccataaatagaatcagtaatatt

SEQ ID NO: 60558 - DNA, 1694 bp, Arabidopsis thaliana landsberg
  unsure (1)..(1694): unsure at all n locations
atgtacaaaccattaccagaccaaaatcttcttatatagaaaagttacgttataaaaaggcatatgtaaaacgtttttactcattacctgcaaggattcaaatgaacagggcatgtttatttgctttctttatttttctctgaataatcatgtgttcttaaaaaaaaaaaacaaagaaatcatgtgcatgcacgtcccattttgagtgatttgttgccaagacaattactgtttctggaaccacttttgagtttggtgattagcatgttgacaattacaacgtcgctcgttggtcaataaatatgactgattactattccaataatacctaccaagaaaaacatacgactttcaaggacattatatattgaacaaattctaattttgaccatctaacagttcatggccagttaatctttcctatctccatctttgttggattccccggaataaccggtcgtgattttgttgtagactatttggacaaattaaaccgattttctctcttttttagtgtgagacacatgtgtaacagataagttatagaaaaagaccaagtgttggtagctttgggttcgttgctgccaatgccattttgtagttttttcatactaagatcctccggttcacaaggctactgttaaaaagaaaaatttattaagatttataggaaaatggccccactgctccatgtacaaacatggtccggatccctaaatatttcctaaatcaaaatttgatcagtgaagatttgacctataatataatctttttatatatgtagctttatcttctatttaatctgaatcctgatacccaaatgtgatccattgataacttgaattattggagatgagaaggagacaaagcatgcaaagactttcatctccaaaaaaagtattttaataaatgtctgtactactcttgtcttcttgacctttataatgccgcccgttgggtccaaatcattctaaagcttccatgaactgnccttcnaagaaaacggaattacactatccctctcaatgaagttaacgttcttgtatatagagttcaactaattttgttatcatttttgaagccacatataggataatcgatcggtggtgaaaaaactcttatatgtaaatggcaaaatgcagtggatttacatgtatcatataagtttaattagattttatctaattttatattcccaattagtaaatcgaatcttttctgtatactaacttttttacttttattcttttaatgtttactttcaaactaaccaacttcatggaattaatgaaggtcagtatcttgcttttggtcgaggcatacaaaagtaaaggagaagaaaaattaagtaattctaatcgaactaggaatgtatttggttctaattatctatatataatgcaacattatttacagactttccatcgacttactaaccatgcaaacatctaattttctaaagagataaagaatcaatttttttctagaatcttgactatctcccatcaattttcttggatttcatatcactatatgaatccctaccttttggattctttcacatgtagaagtgagataagatttgttctcctcagaagatccaaactaacgagaacgagaactgtttgatcttcaaagattaggacttttctgtagggaagacaattatanactattagtctttcagttgtcac

SEQ ID NO: 60559 - DNA, 1082 bp, Arabidopsis thaliana landsberg
  unsure (1)..(1082): unsure at all n locations
cttatgaacattttccgttgatattcatatttgtattactattaatttttactaccgttgacggaatgtttttcactaaatcaatttatgtggtttacttggctcttaaatgaaatgaatgctacactatggatgtgtgttanctatttccttanaatcaaagagagatatgagaactaacgttcgtcactgcaggtttacgagtaaattccccattctcaaaattacgagtaaattacgagtacatgtttgctagtaaattcctcgtttataaaatgttagattctcttctgataacaatcatattaaagattccatacttttgtgattttagtattataagtagggtcctttgaatcctcttcagactagcttgttctaataattttcgtatcatatttttttttgctgtttattagggctgtgggctttattggcatggtgctcgttttatggtcaccggttgtgattccattgcttccaacacttctccagaactggtctacaagtaatccttctagagtggcagaactagctagtgtagtcggtctctatgttgctgtattcattcttgttatgctgtggggaaagagagtacggaagtacgaaaacccattcaagcaatatgggcttgatttaaaggcatcaaacaaagaaaaggtaaaacctttaatgtaacacggagattagaatattagaatagtttggttttcgttgcactgctgaagaaaatttctcgaccgtcaatacttcattagccactagactaaccttattcaactaagaacttggtggacgtttttcaaacagcaacaggagatggcttagttgtgatttttcttttcccttaatttcacatgttcttattctcttcacttccatacattcaggctattaagacagtagaaatgatactgtaagttcattccttgcagattcaagagtttttaaaggcctttgcagggggcatcacggtcgttctactaattcagttcataaatgcattatcaggagctgcgtttctttctcggccaccatattttccacattcttttgatgccatgaagtggcttaagggatgt

SEQ ID NO: 60560 - DNA, 611 bp, Arabidopsis thaliana landsberg
acatcttcttttgagcaatcttactgtgcacaaattgtatgcgagagaggttgtctttgtatatatcttagagtttgattggtcttttctgcagtatactacagtgatttgatgagtgtagtttgtatgctaaatgttattgattcgattaagctcttgtttcttttttttgcttagcgttggagcaagttgtggttttattgattgttttttttgctgttgtagctagtgaagttgtttagatatatatatctttgttagcattagtggttattgatgtgtgtgaagtgattcttatgtttgactctatattgggactcgacttttctgataacttgccccggcagggataacggccccgccacattttctggttattgcatatagatgcaagaggttgctggtgaacgtggaggctatcttcatggacgaggcggtaccaatctctctctctctctttttttggttttcgttcttcttttgtagttgtgtcatggccataattcttgagtttcttgtagctctagatagcgacgatttactttatctgaaagaacagatggaagcagaggaagatgcagaacgtcttctgagacgaactgagaaacggc

SEQ ID NO: 60561 - DNA, 991 bp, Arabidopsis thaliana landsberg
cttgactacattgtctatctccgagcacaagtggacgtcatgcgaaccgtcgcagccgtcgatttattcacccgaaacttaaccaacgatcgtaggaacaaataaatgtacatgcatcactcttgtgaatatgaagtagctaatgatttaaatgtaagtccatgtacatatataggataacactatcttatcatattacaattttcgaatgaattatcgatttactgctggtcatgtaaattatgggttaatttcttattattaatttgaagaccacttgattgttactagagttgtagcatttcattatatatgtactgtagtatgtagtgatgtaaatttaggttacgttgatgttaaacttatcagaaatgtttatacaactaattacatcattagttcattacaatagggaacaaactcttttcttttttcggtctaacaaaattaaagaaacgtagtaactcatacgcaacaagtacgaaggaaatttttacacaaaaaagaaaaacgtaagggaaaaaaatcgttagatgtacgcagaaatctataatcgttaaaatgaacagaatatgtaacttaatagtttatagtgtgttctttgttaatcattaccaaatttttacatgttgactaaatcattggctctagaatgggccgagttgatgggttgagtttgggcgtacatgtgaagcgcaaggatcactgttttgtcggtataagatttgggttatgatgttttggtattgaaagaaaaaaacaaaaaaaaacggtttaggttggcggcacaaccgcacgagagtactcgagtgatttcggatcggctagttagattcattgactctaaataaattgctatacactaaaattgacgacatcttgctatgcttaacttagcactaatcttttaacctgttaatagccttttctaaattaatttataaactaaattctctttctgtcggtacacacatgaaaatctcttggcagt

SEQ ID NO: 60562 - DNA, 1117 bp, Arabidopsis thaliana landsberg
tcgacctttccccatagctgtcctccttcgcgcctttcgagggcaatctctgcacaccaaatttctgttgtctttttcattttctctattttatgcaaaaacacaactaattttctaccataacttgttgtgaatgatcgtgaaccgtccaaacgtagttttaattccacaccgttcaccacttcccaaatcctctctttcgggtcatacgctcttatacaattcatgtgattatcatagtagtacaatacatcgtctataacacatgaattagaccatttttcagagtgcatctaaaaatataaatatgtaggaacaagttaatccaatgagatcttattatggaatgaagtcttgggtgggtaatttgttattgggtgatttttgcaccatcgtgtaagtgttattaagttataccaacccatctatttaccatgtttttgccaaaagatatatgtgttgtcaaaaatatatagattatgtaagtttaacaaagtcaataaactttatatattttgccaagttgcctaattaattttgattcatctttcaattgaagatatataatgatgataaatgatatgagatctactaaattttaactgatcttacagaaagttttttcctaaaatcaattatacaataatgacaaacttacgtacaaagatgactgttcgtactcgtaggtcgaaatcatagataacatttttatatatggcatatttctttaatcagaggtttcgtacaaaatgaacaaatgtacagtataattatgaaagaaaattattgtactagttgctcaacacttgtcaatacttgttctgatatgatggtgttggagataaatttggtcatttcgattcctaatgaattaatatataggctaatatatcaacggttgtgttcattaacatccacaaaacatattcagagtctcttttttttagcaaactatttttttcttttttcttttgcggtcacgaagataaggaattaacaagaaaaacctaatatgtaaacgtcaccactttttatttaagaagcaaattagaaagattaacactaccagaaaagcccatacaaagaaaccaagctgatacatattcaacacaatcat

SEQ ID NO: 60563 - DNA, 1411 bp, Arabidopsis thaliana landsberg
ggtcctttttaactttatgaaagaatgttttgcgctataacattttttattaggagtgttttagtatgtgcatataataataaaatatagtcatagattacagggtttataatcgaaattcatatatagaagcatgtaggttaaaaggttaattaccatggtggatgtttaacataaattctttatctaggtaccttggccactatatggatacttagtgtcaattaaaatgtcattgcaagatatatatattattacttcaatctatattattggcattgcttgcgttggtagatcttttggttttaataaaactagaacttttccattttatatacacatacatatatagatactattatatccgacatgttcaattgatatatactcttaggttgcagaatatttgtaagatctcatatcgatccagcaagtttccgatataaacacctcattaattagttttctagatttgggtgtagatattaattaactcgagctgttttctgaatctttcctaaagtaaaatgttcctttgcatctacatataactacaactatttaagtttctacaaagcaacaatgcctatctctaacaatatacaaattttacaagatatgtgtagtagtgcataggcgaagaacaagaagtatatgtaaatagatgttggtgagcatgtataaataaacaataaagcctaaattccacttgtaaacccctttaagcagacacgtgaaagtcacgcgccaagaacaaacttatccacacataaatgcttcagaattactgaattagtatcacaatcacgagggtcatggaaatcgcaaaatcaagaaaaatggtcgagacccgagaatcacgtgagatgagatgagtcatgtgctcaaaagcaatttcacagttgacacataataataaagatggagtgtaacattttcagtgaatagtgatcaatgttgaatccatttatttcagaaaatagattagcctaaaagaaattacagacaagactggtttatgtatgtgcagagccaaacactctctgattctgtggtcgctatcaaacaatctttgtcataattataccatttttttttccaaaaatatcaagcaaataattagatcgtacaaaattaaattaatttagctgttacattcatgttagacctaatttgcgatgcttagttagattcatgtcctgttttgaccaccatgcactttcgttcgaacagtttttgactatagactttcataattttgtgtcttcatttatgtttaatatatcgtattagttgcgtttaactttttgtttaaggcaaacataaaatttgaactaataacactaacatgtccgaacaaattagacgtaaaagtgtatcatacaaagtctatagtcaaacttgtatggat

SEQ ID NO: 60564 - DNA, 224 bp, Arabidopsis thaliana landsberg
atcttttgtctcgtggcacgcctgctccagtaccccttacgaaaactttacgttatcgggtttttctcatacaccttcacatgtcttctagtcgatgtcactatggacatctatcagaatgatatcacagtcttaggataagtaatcatacaatcgcactatgaacgtcccttgttgacctatccatttactaccgacagtatcctagggtactctcgaacaat

SEQ ID NO: 60565 - DNA, 712 bp, Arabidopsis thaliana landsberg
ttcactatcgtccttcacgttggaattctagctgttacttccacaattcacactaacttatctctttttggtgtttttaaatcttttaaatattacaattttgtgtggagtaagcgctacaaagagacggtaattaataacatttatagaaccccagaatatagggttttggatttatctcaaagtataacttttgttttctatctagatcagatgtatatagcaaatcaccaatatcaggtgaaaaatttagtacctaataacttttttttgttgtaattaagaggttctaagccaaaattcgtacatttctttagattcggataagcttttaaaacctttactcggactaatggactatggtacttttccaatcgagcaatcccatatttcataaattcaaatattcactgtatctgtatgttcattttttatatatgatattcagatatcttgaatcctatatcttagatatattttaagacaagcacatttaggtatttaagtactttcgatcgaatgtttggttattcttattccgttgcatcattacatgcatgaatgaccgatcctcttgaaaaattcttccactttccaaacgcagaaaaaatgaatgggcatatttatttcatttatgacagcattgcaatgaacattctattaaaacgaatgacatttttcatctaataaattgcatttttttcaaaaacta

SEQ ID NO: 60566 - DNA, 229 bp, Arabidopsis thaliana landsberg
ctggatggggggtatgatcattcagactactactatcaccaggaggaaatcatccattgctaagctattactggatgcaggactacggtcggccatatgattccagatgagcattctcgctttatcctccaccttactattgaagaaaatggagttcgaaagaaacaaattacgacaagttagaaatcgagctgatgctgcactaggaacatgttcgcttactacctga

SEQ ID NO: 60567 - DNA, 377 bp, Arabidopsis thaliana landsberg
  unsure (1)..(377): unsure at all n locations
aaaataaaaaaaaaaagaaaaaaaaaaaaaaaaaaaaaaatttaaaaaaaaaaaacaaaaaanacaaagagcnaatgaaaattttaaaaaccaaaaaaccccccaaccccaaaatttgaaaaaaaaaaaaaaaaacccaccaaaaaaaatttaccaaacaccaaaaatactaaaaaaaaaaaaaaaacctacccgaaaaaaaaaaccacaaaaaaaaaaaaacaaccccacaccaaaaaaaaaaaattangaaataaataaaaaaacccgtcaatcataaaaaaaaaaaacacaaacgggaaaaacaataaaaaaaaaaaaaaaatacataaaaaaaaaaaaatatataaaaaaaaaaaaaacaatataaaaaaaaa

SEQ ID NO: 60568 - DNA, 1349 bp, Arabidopsis thaliana landsberg
  unsure (1)..(1349): unsure at all n locations
catgggattaaggtcgctagaattcctagtgagggtactggaaatgctgcatcttgctctgagatggctatatatctaatgctgggacttcttaagaaacaggtgtttatttgatttgcctctgtatggttccattagtataactcttaagtgtctcaagtgctagttctgatatttctttcttagctaaaggtaattcgtacgacatgttgcagaacgaaatgcagatatctctgagaaatagactacttggagaaccaaccggtgacacgcttcttggtaaaactgtgagtcttagagtgatcttaaatctgcattagatatcttttggcttatatccctaaacaaagtttgtttgtttttctttctttgtattatacaggtatttatcttaggatatggaaacatcggaatagagctggctaaacggttgaagccatttgggtcgagagtaatagccacgaaaagattctggcctgcttctatcgtcgactcagactgtatgggttctcttttaactcctctgtttgccttgacaaaccatcctgaggtctagtaatttgttaacttatatcttcagccaggctagttgatgagaaaggtagccatgaagacatttacacattcgctggcaaagccgatatagtcgttgtttgtttgaggctcaacaaagaaacggtaatatttccacttctccttcatcataaacttgtcaagcaaatgaatatgaagagttgttcttggcagtgaaaaatatatctgcaatttagataatatggcaattgtttcttctacatgatgacattttcaggctgaaatagtgaataaggagttcatatgctcaatgaaaaaggtgattaccggggctattcatatttggaaaaaccgagttgaatttttttttttttttttgtcgtcaacggagttgaattattttgtgattactggtgactgttgacttctctttggttgtttcagggtgctcttcttgtaaatattgcccgaggtggtcttattaactatgaatcagctttccagaatctggagtccggtcatctaggaggccttgggattgatgtggcgtggtctgagccgtttgatccaaatgatcctattttgaagttcaaaaacgttataatnnnnnnnnnnnnnnnnnnnnnnnnnnnnnnttcatataggtccatggccaaggtaaactcatccaaggaagattcactctttctgatatgtcttctgcatttggttggaaatggattctaaactcttactgttgttaaatgtagattgtcggagacctcgcgcttcagttgcatgaaggactttctcttaccggaatcgaattcgtcaat

SEQ ID NO: 60569 - DNA, 154 bp, Arabidopsis thaliana landsberg
gcacggggggggcgctgaggtctgcctcggaagaatagttttgactatacctgcctgatggtgccatattcacctgaagtgagggatccacggatgatgacagctcttttgctggtggaccacattggcgatttttactgtttcctaggccagc

SEQ ID NO: 60570 - DNA, 508 bp, Arabidopsis thaliana landsberg
atcgcattcttgtcctgttgtccactgtggaattttaaaagtttaaagataaaacaattatgtcagttcgtgacatatagagagctattcagataatcacattcagcatatatatactgaaattccgagtaaaaaatgctgtaggcaaatgagggtcacatgatcacttacgtacctagaatcgaattatttaccgagaaaaccccacccattgcgaaaaccagaagggcgagaaaacctattttggattaaagtaagtacttggaaaacacttggcccggaaaaaaaaaaaaccaccgtccaacccttggcccagttggtaccttgggtgccagtaccatttggttatttgtaagaattggaaagcctattttaatggggcctttaattaggggccaaatattaaaaccccatttttgacccaaaccaattaaggtccagcttggtttaaatccggcttttttttataagaaattggttggtagaaattcataggtttttagggaaa

SEQ ID NO: 60571 - DNA, 1837 bp, Arabidopsis thaliana landsberg
cctcaggtttggaaaatatttcggattgtgatgaatattccgaaacatggcatcactttccatcccttaggtatcaaatatcctgcatacatgcattttacaaaaaaaattaatgagttatattcatttggaccaccacattttgataataacaaaaaagcttaaatatatcgaatgttctactagtgtgaaatgatataattgtacccttatattcaacatcaaccactgcttctctgaatgtgaaggatatgatgcttgccatcctcaagctttcaactataacctatatttcaaataacattaaaacatgtgatgtatatatatatattaatggtggttcatatatacgaacctaaattttattatgatttatcaattaccttatgtgtcagtggcatattcctcgtttgtctccatgttaaaggtttcttctctctactgttttcttcatatatagccttttgctcagcctacaatcattatgtatacataaatttaagtgtatatatacacaaaagagagtggaaaatagtctgtgcatgtgatcataccttaacagcttctagaagtttctgatcatcatgtaagtacttaagaatccaagttaagcaactagctgtcgtgtcctgtgcggcgaaaaggactcctatgatgttgtctgcaatctgttcttgggttagcacacgacctttttcgttcttgaagttgagtagatgaccaagaaagtccgtttgcaaggcccttttctctcttctttcgcatataatctcgcttactatcgtctttagctgctttctcgcctataacaagtttttgtcagtacttgttaaaatttgcttttaaggtacatttattcattcattccagagatgagattaccatgagagctttgtgataagatgttccggggagactcatggggaaagagttgtagcctttgtccacaatattgtagttatgtttcaagatctctttgtaagaactctccaaatgtccaaatatggctagaatacccacatcaaaggcgaactgcaagagacaagattatcttgtgtattaggagatctcagagaacctgaatgtgtgagttcgtttgctgtatacatctcaacatatatataccttcttcatctcctggtaggtggagacaatcggcatattggcccaagattgtaaggaagaaagggcaatgtgctcgatatcagggatgagtttacggatggtttcagggtagaaagaggattgaacaagtttccttatatgggaatgataatctccttggtggaaaaagagtgcatagggtcctatcagcttctctttgcttctcggataagttggtttgaacatatgggcatgagtcacaagtacaaacctcgcagcctcagggctagccaacatcacgcatggatagccgaggattcgggttttgaatatctctccatatctacacatcagaagatcaaacacttctaaatctaagagcataactaaaaaagtaacttgagggacaaggtttcgaaattacctcttttgcttggaggtgaagaaaacattggggttttgtgaatagagttgtagagtctctcctaagtaaggccatcccatggaaccaggaggaagcttacctctactgttctttttcttctttgaaacaatcactcttaccaaaagcaagcataagatgaggattggtacaaccaagaaccaaatttcagccatcgattattatttaatttaatatgaaatgtctcgttgcccatagaatgttttggaggatgaatatttaagaaagaagaggaagaaagaagctagaagatataatagggagcaaaaa

SEQ ID NO: 60572 - DNA, 1548 bp, Arabidopsis thaliana landsberg
tatacatgagacgaagtagggaaaaaactggaccttcttttccttgattaaaaacacatattatgaggggtgaggttgtattctgaaaaaaggaggacataaccgtaaataataataaatgttgcgtctatccccaaacacaacaacagatgtggcgaccattaacctgatatatcgtgagacccacgacagctcacttttatctgttgattaatctataccacaatcacacgcgcagaaaaattgcgtgcgtgtcacactctctttagctgacctggatgattctgtagtttcaaaagtatatatatagatcattctagaaggaaataaacagtaatgaaattttttcggattacagtgttttagaattcaacagagagagaatgttgtaaatctcccaagaacaagacatgactccccagaggaatcactctcttcccgacatcattcgctacgcttagctgcttgcaaggatcgattacgaacactgtttccatcatttcattggaacgaacatgaacacgatcataaccaatcagctgcttctccggaacaccagataaaaccggtggcattttcgaaaacagcatcacaacatgactaccgtcgatttctccggtattgctcacatgaacacgaacgttaaaccgcagagattcgcaagagttaacaatcacatcatcgagctgtaagtatcgaagttcttctccatgttgtagttgtgtcttgtgagaagactgttgtggaagaagttccgataagctaagtctgattggtgctgataagatcttgtactcgaatttcgtgtagcttaaacccggcccaaaactgtaaacttgaggtccggtatagaatctgtacgttcttcctggatatccacgagatgaattggctctcatgtgcatatcccacattgccacatccgtgaatgactccggataccacgttgtcggtaatctaccacctacacttgaaccgaaaccaaaaccatatacaaccaaaaagctttagtattcagtttctgcatttcataaactgggatgaacagaagatgctttgatttgcgataggctaacctggattgaagtctccaaatatgatttcagcgagtgcttgtccaccagtttcacctggataaccaatccagataatgcttccgattctcgggtcatttttagcaaacgttacatccactggtcctccaccggttagaacaagaatcaccggttttttgctcacagcagcaacatgagacacaagatctttctgtttaccaggcaaagaaagactaactcgatccttatcctcggtttcttgagagagatctaatcctgcaactactatgacaaaatccgctcccttggcgatggccacagcttctccaaatccggtatcagaatcacaagacacgtctgagcaaccagacgcataagatgtcttcttcacatactccagaagttccgtgaacaaagtctttcgttgacacggctttcctttacaaatatgacatttataaactgtttcagcgaggagaaaaatttagcctgc

SEQ ID NO: 60573 - DNA, 1369 bp, Arabidopsis thaliana landsberg
ttaacaaatattcttattcgtcatctcgttgttcgctctgttatcaggtaaagtattttctcatttcttatcttacaccgcaaaactttgaaaacgttttcttttaaagcaaaagaatgaaagtgttctatatgttttgacagtgctggtgtatcaatcggaagcgaaatgtctggtggaatatctaatgtgacgatcgagaaccttctgatctggaactcacgccgtggaatcagaattaaaacggctccaggacgaggcggttacatcagaaacataacctacaaaaacctaacactagacaatgttcgggttgggatagtgatcaaaacggattacaacgagcatgcggacgataattatgatcggaaagcatacccgatactttcgggattcagtttcgcgggaatccacggacaaggagtgcgagtgccggtccggatccatggaagcgaacagattccggtaaggaatgtgacgtttcgggacatgtccgttgggttaacgtacaagaagaaacatatattccaatgttcgttcgtgaaaggacgagtgttcggttcgatatttcctcgaccttgcgagaattttgatgtttacgacgaggaaggtcgtctggttaagcctgcagctgagtccaatgtggcggacattgactacgacatttgaatgttttttcagttcattgtcatttgtgtacataaaagtaaattttgggacacaaaaatgaaaattatttttctttggaccatttctcttcgtcgttggggttttctcattctgataaatagttgtaattttaattaaagtaataaatataaatatttatcacaaataggtcaactaaagataattcgttgatgaacaagcaatatattagaacaaaggagttaagttgctttattgatcgaattaaagaataaaatttggatgaatacagaactcaaactcataaatgttgttgaggttcatagttttgcagtagaatgcttagaaaaatcaaaatctccatgttgaggttattaatattgaaagcacgtgttgttgtattcgactcaattactaaactcgcatgttaacgcatgacacatgataatatcggcatattcagtgaaccaggttggttcatgatcccttccaaagcggactcacaccttagactcggagctcacacgccaaatcgctcggctaggttttgatagccaactccggccaaaaaaccaatcgcgagaatgtggtttttgattgacccaactcacattttgacctagcacgaaaaccaaacaccaacatgaaataagataaactattcaaaatatctagttttatatacaaatcttaatttaatgtcacgagaagcatgttcgca

SEQ ID NO: 60574 - DNA, 1770 bp, Arabidopsis thaliana landsberg
aacaactttcaacgtagcagaaaccaaacatagtagtacccggacaatgtctgtgagcagaaatctctcagattctccagatagcaagcttggtttaacatcaaccaccaaaaccaaccactgaaatttcagaatgatagagctcattgcacttacttaaacagtcacaaatttggtaaaagagcagactttagactcgctaaggtgattggattcaagaaggaacttacagaagtagtgtcaacccaaagctgagagataaatcctaaactcaaagctgattgtatactaacaacttgcttagcaacaagattcgatcttgtcgtcgactgcttgaatcctcgcgaacccgtaatgctcagatcattatcacctactagtcgaaccaaatcactttctccaggtaattctacactatcactccccacagtttgatgcactacatcttcttcattagatagtgaagaactcaagcaacagatgaaattgtctctcggtttctctataaaactgaattgcccgagaaagggagagtttttcgaatcaatccaaaagcaattgaggattgaatgctgaatccgtttgagcctccatcgacaagtttctgaattgggtttcaccagtcgagcattgagaactggaagagaacagaagaaggaagatgagcaattgcacatttctaaagaaccctacaaattcaactctacgtggacaaggaaaagatggttttttttgttctttctaaactcttattaaattgagagagaagccaaaaaaaaaaaaaactcttaataaaattgttcgctccgactaaaagaaaggactttaacatttcccgttcggcgaccactttctcgtttgtcctttctccgttttcccgttcggcgctaaggtttcgatttcgtgtcgtattatcactcgccttcatcgcaaagtaagcttaagaatcacgcatttctcttcttcgtcctcctattgttcaaatcattcagatctgacttcgttgagataaagtttggattttgatgagataaagtttggatttttgttttggggtttgaatcgataactgatacgttgggaagctggatcaggtatggaagacgacaagaagaagaagagaaacaagaaaaagaagaataagcagaataataaacgtgttgacgacgctttagcttctggtgcaacgacctccgtcgatgaaaatcatatcggagatggtgacgttcctcaaattagcggaggtccagatgccgatgagtcgcaatcatctcatcagatcgatgtcgtcgcaactgtgagttcattatatctctaagattgattggaacattgctacattagattgattctcttggttgatgataggacattggggtcaatttgattcatttcttcttattttataatgtcaatgcagttgcatttttgttgacatagttatgctacattgtatgatttgattgaatgaaatttcgattcatatactggaacggatccttttactacgtgtgtgtttactttgttgtaactgatgtgtagagagttcattaggtttgtgtagagatggttgacaaaaattatgtgatagtgtatgagccgtcgttgtctgatactcttaaaatcttcttgtttaaaacaggaagatgattctggtgttgagaacaagtctcagggaagtgaggtgagattttttactgcatcttgtatgtactttttttattgtggtgtatgcatagtagattattgcttttggaaatttgattggct

SEQ ID NO: 60575 - DNA, 1552 bp, Arabidopsis thaliana landsberg
  unsure (1)..(1552): unsure at all n locations
taatgtcaaatgtcaattcattgtccatgcgtccatttcccactctcgacacctattttcatgtcttaaattcttgatttattgcttcattttatatttttatttttgttgtttacaattcattatttcttgttcattttctgtaagacatttgacaaattatacaaaagaatcgaatctacaaaacatattctaatctaaacaacaaaatctaaatctaacagtctcaaaaatatttgacaatcatgcaaatatgttacagataatatcaatttttcatgatgcgagaaaataccattttagtgctcattgaataaagatgcattattagtttgcggcttttcagaagacatcaagtctcaaaggaccattatgtaatttgaagaaaataggaaactacacgcgcctgccaaagaaggaccttatcccacgcgtttatatatcttccaatccataagcagagcttctcttcaacgtgctccggtgaagattaaaaaccgacgagaccctggcgccatcacaactacgcaatctcattcctccgtcttcttcggctttcaaatttaccattttacccttctctttccctgagacgtcttctttggaaatattcttctcttcttccattccaagtaaacccaaattctctctctctctatctctcaaatttcaaattccggatttattgaatctctggtgataaacctaaacctctggttttgatttgtggttgttattgttgctacattaatggtgtttttatttttttctctgatccatttctcgccgtgtgatttcaaatttctccggctgttttttgttcgccggcgggcggtgttgattcgattctatacgatttgagtttcctttttctttaggttttagagtttccttttctattaagtaatcacacaattttacaaattgtttcctaaattttatttatgtcattataccaactaactaccattaatttctagaaaactcgtcggcaataacttgatcacctcattttctctcaaggctaagctcttgtaatctctgttgagaatttgttgtggagtatgatgataatgacgaataatctggaattacgtctttcaatttttcagtgattttgaggttaattggaaattagagttcaaaattgggatttagatggggattgctgatgaatctaaatgtgttttccccttgacgagtctccagatcgggtaattttatctatctctttgatctgcaatgccgctttttttttttagttatgattcagaggatcaatgattctgcagttaattatgtgacctgtttttgaatgatgtacaagcttgttgagcctttaattggaaactatgttgtctttccagacaaaacaagatctgtttttgtggttttgacaatttattatctatgttctgcaattaaagctatcacttatttngngtttctttcattatcttcattccaggcttatgttcctttcctgaatctgaactagtaatcagttcttggtgttaatgtcttaaacattttcctctgaagtgacttatat

SEQ ID NO: 60576 - DNA, 537 bp, Arabidopsis thaliana landsberg
aaacctgcgctgtataccgcacactgctttgattaggaacgatgaagtattgccgtgtcaaatcagagtattgtgctgatcggtatgatgggcgccggaaaaagcacagtgggcagagcacttgcccgtcatttgtcctgggagttttcagacacggaccacgtgattgaaaatcagaccggggtgtccattcctgtcatatttgagattgagggtgaggcgggttttcgccgacgggaaacccagtgcctggttgattttgccaaaagatcgacggtggttttggccacaggcggcggcattgtgctggccgaagaaaatcgccgtttgttgaaacagatcggcccggtcgtttacctgaaagcgtcagtgcaagagctttttcaacgcacaaaactggacaaaaaccgacccctgctgcagacgcccaacccccggcaacgcattgaagagttgctggcccagcggcgcccactttacgagtcgtgtgcagacctggtggtcgaaacggggcgtcaacctgtacacttgattgtt

SEQ ID NO: 60577 - DNA, 572 bp, Arabidopsis thaliana landsberg
tatgttgggtagaaaacactgtcgttaagtcagatttaaacttttttatttttctaattttttttttattttataactatctcactttctgtcataagagaattggttaaaactattgatgcataatttaacatgtcaagcttggtacaacttctagatggtagcattagcatgtatgaataagtacaatgttaaatgtggcacgtttttgttaatcattgttctgaattctgattgctaagttgcataatcattgatcatgcgtttttaatagactttagcaacataatgtatgtgatttgttacatggccactcattccaactaaaaaagcatattcttaactacatcaaaaataattatgcatacaccaagaaaataaaaactacaaaccaaacaccattatttttaactacataacaccaaattctactaaacttgtagaacatatcttatttttaaagcaaacataatactttcttattctattttttatttgctgaaatcaattgtatttttagatgaaaacttactcatttcgaattttttcttccgaatttgtggtgggattaa

SEQ ID NO: 60578 - DNA, 1909 bp, Arabidopsis thaliana landsberg
  unsure (1)..(1909): unsure at all n locations
caaccttaaacctacataacatcaatatccccaaagaaaaagctaatatcaatagaccatgcatgagtatgaacataaggccgaacagaaaacccccaatggtagccgaaaaagataaaactcataaaagtatacaaaaaacaaggaaaagtgacaagatgctgattcttacactccaagaaggaacggccaaacttctggtctgatgcttggatgtacaccctgaaacaaaaataaaaattagtatatcaaagtgtcaaaaggttatcaactgcagattagtgcagatttttttcttatttagcaacataccccactacgaactttcttcagaaatttgacacctccatcactgagtcgcccttcctctgtgaaaaaagcattccattgtttaggttgaagaactcgctttcttctccttagtgaccacggtgatccaatgcttcctctgaagaagtagatgagcagaaaatgagcaacttcgtccagtaagtttagaaagaaaaaaaattacataaaaccaaaccatatgtagtgataaaaagctttctttgaacaaataagacaggctaaatggtacatgttatgtcctatattcatatatgttaaaaataattgatagtatcaatggagttctatcacacatcagaagacctaagactcttaaccacttcatcactacatacagaaacagtccaagagatgccaaaaattagaataaggaccagaagacaaaagatcatatcaggctgcaattattcgatccaactcttcatggtatgcatatttatgatgcagaacttaaacaaaatagcttcattgcttgggttgtaganagagttataacaacaaaaagagatttctgaattcgatgataagagatttagcaacaaaaagcttatgtatctgacaaaattgcaaaagaagaaacacaaatacaaagcttggggagttgattatcgagagttcctttaggagtttatacaaagttcatgaagtttcagacttccacctaaggacccttctagaatcactttgtttgttcaatactaaccaagagagcatgtcatacaaaaagagacaacccagcaaacaacctaaaagtaaacattaaacattggttacattttccctcattatactataaaaagccttagtgcttcgagcctcaaaatcattatacgcatcagagtctatgaatacagaatatggccaggactatgttcagcctgagagtcttacaagttccatgacaagaagaggtagtggaagtacgagttagcagctaacattggaccaagaactcaatcacaataacctaactaacagagaatttcttcgaacctaaaggcatgacgatccagcctcgaattggtgaggtaacaaagaagcaagaaccaatcaaatctatggataccaaataactacttaactaagtagtgaacaagcattgcttctttgctttgaagaaatcgattagaacataaatcagatcgttttttgtgtgtatacctacgagagtagacggtgaaagcgacggccacggccatgacggtgacagcgacagctaaaccaacattggaaggaataacggccgacgaccacaatccaccgtagtagccatttctaccaacgccgccgccgctgctaccgtcggcaaagacgatccatttcccggcgatgatcggggagaagaagaccttcgtcaatcgtagtcgtggaaacatcattccaaaactagggattttgctcaccgagaattctttttctgattctcagagtaaaatcatagcaatttcctgagttgaattggatgaaaattgattattgaaaaagtcgaaagtcgtttatagaaattgggcccacttttttaatgggccttcatacagttgggtcattcttttttttt

SEQ ID NO: 60579 - DNA, 103 bp, Arabidopsis thaliana landsberg
aactgctgaagagatggtgtacactccgactatagtatgataccgggacatctttatagcacttgcactagcactagcaatagtaacaacatggcttatttgt

SEQ ID NO: 60580 - DNA, 518 bp, Arabidopsis thaliana landsberg
tcgaagaacttaatggctggaaataattatgtagaagaattagacgcgacccacatttattacaaatcataaatgcgaaatatacaagctgtggacaacgttctaaataaagatcaaacctcaatttcttacaaaatacaaatatatatatatatatattccatctatatagtacgatttatcccaaacaaaaggatagcgtgtggttcgcaaatcaaaccttgaagaagaaactaagctaataattttacttcaacaccaaaagaaaatataagttcacacagtcacatccttttcatagcttttaaagtattatctctacttttattcgttttcataagttactgaaaagtgtgacttttatatccatacttactatatcaaatatatgtgggattaatattcatttatagaaaatttaaatcgcaataactcaatatcagccattaaattttacattattatcgtaatttacatcaaattttgctataaaataaaatacaattatatcatatttc

SEQ ID NO: 60581 - DNA, 508 bp, Arabidopsis thaliana landsberg
cgcagcgggcggatggtggagatgttgttgggggtacgacccagcattttcttggcgtcgaggcccacggcttcgatcttcttgctgccgcgcgagtccaggcggatcgagaccacggagggctcattcaggacgatgccctcgtcacgcacatagaccaatgtattggccgtgccgagatcgatggagaggtcgttgacaaacagacggcggacggcatcaaacatgattggattctgtcttcaggtgaaatttgcgggtcattgcaaatatattgtggcctagtttttgattcggccgctggattggattgaagtgagccgcagccgaagtttcagcggcggcacccgaagggatacagcccaaaacctgcgcggccgaatcaataacccaagcggaccgggcgcacaaccgctaaaattgtgcatctgcacatcataaaccatttttttccctatgagccttactcccgatcaggtcaggcaggtcgcgcacttggcgcgttttg

SEQ ID NO: 60582 - DNA, 471 bp, Arabidopsis thaliana landsberg
  unsure (1)..(471): unsure at all n locations
nnnnnnnnnnnnnnnnnnnnnnnnnnnnnnnnnnnnnnnnnnnnnnnnnnnnnnnnnnnnnnnnnnnnnnnnnnnnnnnnnnnnnnnnnnnnnnnnnnnnnnnnnnnnnnnnnnnnnnnnnnnnnnnnnnnnnnnnnnnnnnnnnnnnnnnnnnnnnnnnnnnnnnnnnnnnnnnnnnnnnnnnnnnnnnnnnnnnnnnnnnnnnnnnnnnnnnnnnnnnnnnnnnnnnnnnnnnnnnnnnnnnnnnnnnnnnnnnnnnnnnnnnnnnnnnnnnnnnnnnnnnnnnnnnnnnnnnnnnnnnnnnnnnnnnnnnnnnnnnnnnnnnnnnnnnnnnnnnnnnnggaaaccaaagnaagngngnncnntnccgnttggnggntttaaacccccccccttttttttcccttttggggncccccccccccccccaaaaaaacccccaccccccccccccttttttttttttttttt

SEQ ID NO: 60583 - DNA, 315 bp, Arabidopsis thaliana landsberg
ctgaaaactcgaaaattgtaataaataacaaacccaaacatattaaaatctagcatacattaacacaattacaagtttgcctggaacaacgcaaacaactattaaagcttagcacaatggaacgtcgagtagaggttcactaccacctgactggataaacaaagaaggaagatactactaggatcaagcattaaaggaatcttaaatgcggaccaaatattcaaaaacctaggattcttttcaaaaagatgttcaatattttccccgaaatctgttactccacagattagccaaaaaaggaaaaaaaaatgagaa

SEQ ID NO: 60584 - DNA, 1615 bp, Arabidopsis thaliana landsberg
tcatagtctcggcatgaacttcccagtgttacagaaaattcactctatcacttatttattcgatgttagctttgaaaataacccctataaccagcacagaacaaactgttactgatcacttcaccaacaaaactgccaaaacctgaagacgtaaacattatctaataatcaaacctcttttatatcagccagcaagacaacatattattcactgcagtcacagctcattttcataagttagctgattcgttagctgcttaattcacatatgacacacgagataatcaacttaacaatactagcacgaggtagattcatacatgtataagatcatcaaccaaatagcaacgcatttcagcaatccaattgagaaaaaaaacactaactaactagtttctgatatccagaagcgaatatagttgccaaatataaaaacgatagatcgcttacaggtaagaaacgtcagtctcatgaagcatatttgcgattctactagattgcgcgagaatctcactgcgatccaacgacctgtagccactaccttggccaacctcatcgaacaacttgaactctccaggttcggccgcaccgcagaatataggtaacgacggtagcggcaagtaaggagtaacttccgactgaacagtattagccaaaccgatcccgaaatgagtcaaacctgaacttgaacccaagccggaactgcttggattgctcatatttggatcgaactgtagtcgtcacgaattcaaaaattagggtttccaggtatcagatttcgaagaacatcgaataatcaaaggggaatttgagaggattttgaagagagtttatcagtcatatagagaattgagccctagattggaattagggaagaatttagaggcaattaggattgatgcaattggcggggaaagtaatagaccaatcttcccctgaaattttcctcatttttagacattaaaatgattttgagttattttcccaagccaaaatacgtttctaccctcaactattaacttgatgacagttaacaatcgtgtaagtaaaacgggtactttcgggtagttattttattttcgtagtcagggtcgttttgatttttgaaacgcgatatttttaactcattaatgatactttgtaaaataaatattcattttctttttgttggaaaaccatatattcatttatatattatccttttgttaataaggaagttttgggctaggcctgtactctcccaggatccaggaccagttcatttttttgccaaacaagatatgcatcttaatttacaaagaaaatgttataactatattcttttgtacaatttatgaaatctaataaacttttgctagtcaaaaaaattatatacatatattatgtgtgtattcaacgaaatctcattcctccattaatcaatccttcgaaaatataagttttcatttagaaattagtatattgttgcatctttggaaaagcttagataattggtgtctaaaagctcttttgaaagaacctctattagctcattcaatattgggaccgatgagattgatccaaaccgagtcgagatcgagttcatcggtcccaatattcaaaacgcttaggaaga

SEQ ID NO: 60585 - DNA, 192 bp, Arabidopsis thaliana landsberg
ctcaagctcaagaatactatgagcaaacatcattaagacttgatcatcatgtacctcaatctatactgctaaactaacaatagcttaaacacatggaactacatttaactttaagtttcaactacatggtgacaatgatgaaaacaagactcaatagtcatcaacatattgccactctaagcaatatatatg

SEQ ID NO: 60586 - DNA, 1529 bp, Arabidopsis thaliana landsberg
  unsure (1)..(1529): unsure at all n locations
aggtattttaatgaataactctactagtaaattgtaacattcaaacagaaataaaaatgaaaaatgtaaacgtaaagatataatcgtgatctgaaataggatggtttacaatacgtaagagaatacgaatgtacatcatgagtatcaaaacaaatcaagattcataccaaaaggaagagaaaaaacatatcaacatatgcataggttagcgtcttagcgagcgtgcggaaccgagggtgccttggtttgctggccccaaaatgggtgggcttttaggggcccaatattgttacttacagaggctaaaatggatcctactgttttccctttacaaaaacggagacaggccttgtatataaaaaattcagaccaaagccgcttagaatgaagtaaatgatatcaagacagaacgtttttctaatccgcgaaacgacgccgtttgtaccgccggtggccgagggaaaaaaaaggatttggattttgttggatctaaaaaaacataaaacacataggggtgggtctctctcctccggaattcgatcacgacggcaaggacgacgcatctccttctcgtaagccattgatgatcccaatagatagctctattctgctttatccaatcgcctcgtcttaataattgattcagtgatgtaattgggatctaaactcgattggttgattgttttccttggaagccacagggctggagatggatctggtccggtgatttctgagatttaagtcgatcgagtttccagatatatctctcaagtagagatggcttggttcagtggcaaagtttctctgggaggattcccagatctcactggcgctgtcaataaattccaggagagcgttaaaaacattgaaaagaatttcgacaacgcccttggcttcgacgacaagtccgattctgccgctgaaggtgttctcttcgtctcactttttttccaatcaatacacataatattatcatccttcccaataatctgctgttagtcagctgggaatataggatttgattactcaaggcgcatttgttgataggacctgccatttttcttcttcttctttatgtaggatgtttagatcaataatctgctgttgcaataatacaatcttgcaagttatgggattctgtcttatttttcttagaactagcttagctagtgtgcttcagattctacccattgcattttattctgaatttgaaaaaaacactttgttttggatctttgcgtttacttggtgacagctttttctggctatgatttcaggggtattctgtgtttacctaactgtagcacaaatcattttcttctctagtttggcttgagtttcttgtacctttcacaacaaaaatccttttgttctttctttttagatgcagcttcaagtatgtggccacctgcagttgataccaaaagcctttntgatccccgtatgtccttcatgggtaacacctctgatgagaaacctgatacattgaaagactctgtgcgtacagaaaatccgtctcaaattgaaca

SEQ ID NO: 60587 - DNA, 1467 bp, Arabidopsis thaliana landsberg
tgttatacttaaacaaaacatctccataacttaaatgtgattgctttttctatgtttatacagttttgcatctttttctttttgtgttcataaccacacagattcacaatacaaatgccaaaattatgcagaattttaataaaatgcaaactatacttatgcagaagtttactatcatcagtttgttgaggtgattgcattgaataaatttgtttctaaaattaagtctggtcatctcaccattgtaacatagagttttatagtatatgtcaattactttttctaatattaaaattaaaaagaccattaaaatagatggaattataaaatatttttgagcttgtcaataactacaaaattatcatagttataaaaatttaataagttcatcgttgtacgaatgtatagtctaaataaaactgaccagtgaaaagcaaattcagtttaaatgtgacgtacaaggttcgctagtttttacatttatgttgccaattaagatgtagttttacgttacttattttgatttatctaatacaaatgtgtctacaaacggaaaacacgttgatttatactgacatgatacaggtacgcatttttagaacaagagcgaaaaacgaaattaaaaccagtggttgtcgaagaaacaacaaaataatgaaatatttacgtaaaaaaatcgttacattattacttattaggcaccggaatatttcaataacattaaataaggtaggtcataagctaactaaatcatgtctctctacttgctttttctcataaatgcttttgatatccgcctaataaccatatataacctcgacatttatctaactcctcgtctaatttaataccgtaatttgatgttacatcaaaacctcccacgtatattaattacgcccacacaccgctctatatacataacatcaaatcgtcaaagtataaattacaaaatgtattgtttcaccatttatagattacattggaaaaacatcatacggtgaacaatgacgtgtgtgttactggttttgtataaactactagttgcatgattaaagaggtcaacatttggggataaaaaggtaaaattaacagtcggtgtcgtgaccaatttgcgatttgatccagcggcggtgagaagctattatgggcccacgtgggcctacattacccgaatattatccctatcgtctctatctgcagctgttcttgctgattacctttgattatgttttttgccttatataataatttatacgaaaaagcatccattatgatctcaatcatttaaagattaatgtaataatattcttataggcttctccacagctcacaatcttatactattgttgttattatttcaattcatcatcattgtggttttttttgttctatttactatgaatatactctatgcttatatagtaacctaatattaaagttactccaataattaaaagacgtgtaata

SEQ ID NO: 60588 - DNA, 1333 bp, Arabidopsis thaliana landsberg
ttatcgtttgttgtaagtagcatttaattttgtaatcccttcggataatgtaaccattaatccattattaattcagtcgtggtcgattgatatatttaaccgttgttggtctagtgggttttgattttccaatattttatttcaaacttgttaggataaaattcaattttgattgttatactaacaaaaacgtttttatttacgaataaaaagtaatagtgatttgcatacattccaacaataatattgtgcatccataatgatgaactttgggtttagggtttagccggcataaaatccttgcatgcactattctatcgtctatggtaagacgctagtatcacacaacttgaaattttagaaaatcacatgctattatgttaagagttaagacactatatatatcacacaaaaatgaaaagaaaagaatgataacatcattttttcagactctgtgtgagtatatcacaaaacaacactatattgtttcgagcaatttatgttgatgtgcttttccataatgccaagatttccacaaaaagaaaaaaaactacggtcttcatattataagtcctcgaaaatcacaacgaaatctttgaaatacaaattgtataactttcttgctttagttctttagcattacatgactcttgtatcgtgaatcagagacacatatatttacatgttattttcctgatttacactcaaaagaaagtcatccaccaaaataacccaacttcttttcttatggccaaaagattcaaaccaaagtttttttttgttgtaggttaaagtacgaaagttattctttgtggaatgaaatgtaagtgggtttagggcccatacgaaaaactaaaaagaccgcgaaacaatgagtctatgaaaacatggtttagtaagtaacttgtctacaaatgtttcaaagaaatttcagtttgaacctttcaaacataataataaaacaaatagacagcaagagaaaacttggtgacttagaaagtagaaacgtggacacgaccataactcttaagaaatactttggctggccaccagcaaaatcctctatttttttggttgaatcttcttcactaagattttcgtatcaaatatgtctgaagagtaaagaagaaagagacagattgcaattttttttttttgacaaccggtattaattagagttcaaacgagccatttctgcaaattgttgtttaaatatgttattgttgttaaatactgtaaatgaagatatttaactaatatttatctgtagtttaaatttcttaacaaattgagttaaattgtttcttacaaaaaaagtttcatataacaagat

SEQ ID NO: 60589 - DNA, 477 bp, Arabidopsis thaliana landsberg
  unsure (1)..(477): unsure at all n locations
acacttataaatgcttgtttgtttattttttaacaagcaatatatacctttcttcttttccaatataaagacaaaggtataattattcgttttatcacaaagtcgaatatttgcttagaatttaattatgaattaacggttgttgttacaaattacaatcatacaacggatgtgtgtttttataatcttaagaaaatgaataaaaacaaacaaaagttaataattaacgaaatggtaggagacatcatgatacatacatacatgcgacctccattttaatttgttttcagttttaatcctactactaatcatgtatttttgttgtgttatttcatatgaaaaaanggaaaaaaccctttttaattccttaaaaatttaaccccaaaaaaaaattttttttttttccccctttggggggaaaaaaaatttttaaaaaaattttttttttttcttttttataaaaaaaaaaaaaaaaaa

SEQ ID NO: 60590 - DNA, 1486 bp, Arabidopsis thaliana landsberg
ggaaaagggtccaattacgctttaccttggctaatagtaaacagcacatattcattgtgttaaagataagaaagaattaaaatcacaaaagcaaacaaaatacgtttttttttttattcttaacttaagaaaacttttgtccaaacttaagaaaacttaaatatccaaaaaaaatcaagaaatcagaaaaacatttttttgttttacctcgtaagcggatttgatctccttgaaatctttgtcctgacccttgtgaacatctggatgatactgcaataactcattttgtcttatttagttataatccttctttttattttcttgatttgattcgtcaaaaggttttgaactttctttaaaaaaaaattaaaagcgtaataagacgcaaaagagacaaacaagaattaacaacctttagagctagacgtttaaaggcacgtttgacttcggtttgggaagcgagaggagtcaagccaagaaccgtgtaatggctaagatctggtgataaacaacatcttgtcggaaatcggattaaccggcggctatcagtttggatggtggaaccagggtgattcgtcggagctttgaaccggaaatttcgtatcatcgtttcttcttcttcttcttcaccaaccaaacattttaggtttataacaaatctttttttctttccctttttgtgggactttggtgaaggacccttttttatcttgtacccgacggtatggtctattggatatccgattatccgattcacattccgatgtcatgtcggtgtttatttatttatttttatatttatgtgttcctttgttctcggttttgttactagctaggacgatataacattatatgtgttaaaacctatattgttttgtgtaaactatattctgatttaaaaattaaatttcgtcccataaaaagattgaatccgaaatacttaaatcaacttcatgatattaattatctctaatctacccacccttttttttaatgtatttctcacaataaccataagtaaattcaccgataatatgtacatgtgctgaggtgaattgtgacaactatgagatatttttctccaaatttataaaatttccaacaaaacaattatatgaaatttcgccatatagaagttaatttcataacaataatcccacattattcttttaaaaaaatgaaaaataaaatgcataatccaacattgttccaaattttatccagagaaaaaaggaaagacaacattggtactctttttttttgtctaaaaacatgttgaaatcgtcgtccgctcctcccgttttagaagcctgaaagattcataaaattataggtcacgatcacaaactataacaagttgtttttacatataataataatttgaatataaaagttaaggtttatactaaccgagataaaacatcgatggaattgggagtatatccaataaactacggatatcgtcctcatcttctaagggctcttc

SEQ ID NO: 60591 - DNA, 117 bp, Arabidopsis thaliana landsberg
caatgggaagtccatttaccaacggttgcggttctcaaaacctccatctccctggagctaccgccatatcaggggtgcccaatgccttgagcgcgcatctgttcttagaagctgcgc

SEQ ID NO: 60592 - DNA, 442 bp, Arabidopsis thaliana landsberg
accgcacgtgcggcgtggctgaccatggatcgcgaaggcatacgcagtctcgccgccgattaattcgggttgccgacctcgcgctaccgcttcgccggcaccttcgaggaatattgcgtggcggtcgccgagatcggcatgccgtgcgtggtcaagccggtgatgtcgtcatccggcaagggccagtcgacgatcaagtcgcaggccgatgtccagaaagcctgggactattcgcaggccggcggccgcaccggccgcggccgtgtgattgtcgaaggcttcgtcgacttcgactacgagatcaccatgctgacggtgcggcacgaaggtggcatcagcttctgcccgccggtcggccatctgcaagccgatggcgattaccgtgaatcctggcagtcgcagccgatgagcgaacttgcacggcagcgcgccgaggcgatcg

SEQ ID NO: 60593 - DNA, 1774 bp, Arabidopsis thaliana landsberg
aagtcaagtccgtgctcgatattcgacaatcctgatcattacaaggtcgattaaacaaacgccaaatatcaaagcattcaacaaacaaattaactagctatttttttttaacattgaaccttggtcaggtctataatctatgtatagagaaatcttatgatccagaaaacttctatggccgcgtggaacgatttccctttgatgacaatcatgttccatctctcaaaatgatccaacttttctgcgaaagtgttcattcttggctctcactagatcccaagaacatcgcggtcgttcattgcatggtactttcttaaaaccaaaaccacattgttgcattgtcatattctaatgtactttgtgcaggcaggaaaaggaagaacagggctaatggtatcggcgtaccttgtttacggtggaatgtcagctgaagaagctcttgagatgtatgcaagcagaagaacaacaaacaataatggagtaagtccttaattttagctatggagtaatagagaatgaagctaataaacaataccatgacaggtctcaataccaagccaacgtcgttatgtgaagtactggtcagatttactttcgtttagtaaaaaaggacctcccgaggttaagttaccgcaagaacatagcagagagttgttgcgaattagactttatgatacagctaacgttgattccgtcttctttgtggtttcagaacttcaggaggtaatgatatatacactttgatgcattgtagactctgtttctgtttaatatatacactttgatgcgatgatgtatatgatgttaggttccaaatgagatgtatcgaccgtctgtagaacttgcaagaggttgttgtagacaattcaagaaagggtattgtagaagttcgagtccacggtattatatatctcatgtgaactgtgattcagaagaagatgaggaagtaacagatggagaagagccacaccttgttgttcaaatggatacagagagttccattatcgacgagaaaacatgtcttgatttctactttgacaaacctgtgagagtaagtcataaaacaaaacttcttcagacaatgtttttgataagatgttgataagcatatgattcttgggacaggttagtggagacatacgcattaccttctaccagaaaatgattggaagccgccttttttatacttgcttcaacacagcttttataaccaatggcttacttcaggtaaagaattctccacatgcctcaaaaccattgttctctcttgacattcttatcactggccatttcttgctcctgcagttttccataggagagctagataaagttggtggtaatggaagatcgatatctggtcctgattttagcttggagctactctttggcccagcttgttcgaaattcggaaagtttctttcccgcgatgacctttctctctcttgaggcctcattttcagatcattggatttcaacatgagttattaatcggttctgtttcatcactcagccaccaaagaggcctgaatagctcagctgatacctgcaaaacacttcaacggctgaaaacagtgttaccatgtacaaatgcagaggccaatgggagattatcaaacaatgtcagcaaacgaaccactttctcaacaatgttttgcttttttttttgttgcagggactgcaattttggtaaatgatcgacagtaataagatttatgggattctcttaccatccatttttttcattaggatggtctgtttccagttttaagaacca

SEQ ID NO: 60594 - DNA, 188 bp, Arabidopsis thaliana landsberg
  unsure (1)..(188): unsure at all n locations
aacaggacgngctgttgcagcacaatgaggactacccgaaggtgtcgcatatggtccgcccatgacacactatacatcaaaatgtcgtcaaaaaataccatcacgaaatggcgcatgaacgaccgtagtacatcattacttaatnnnnnnnnnnnnnnnnnnnnnnnnnnnnnnnnnnnnnacatcac

SEQ ID NO: 60595 - DNA, 537 bp, Arabidopsis thaliana landsberg
ttttagctgccgcctacactgcatttattgaaatgactgtttataacaatactctttaaattacagcttcacatgaatggggtcaacccactctccaagatcacaaaagatgactaacttccatgtgatgaacaaaagacatcggtcaaagtaagaaaggattacacaaagtgatgtccaagagacatactagtaactgaaacagtcagatgctaatcaaaatattagacaaacttcatgtccagaaagctatgatagtaactgaatcagccacagtagatgttcaaaaaacaaatatagtaactgagacagttttttgctactgaaacgattccacaaacagggatgtccaaaaaaaactaatacagtagctgatacagattctacagatgctaagcaaaagattctctagtgatcatatctagcaaagaacatgaactttcggttcgaacattgcttttcaagtctgtgccatactattcgggtttaacaaaaccgacattgaggatcacttgttgaagctgatttcatagctag

SEQ ID NO: 60596 - DNA, 559 bp, Arabidopsis thaliana landsberg
gatattgaacgagaaagagaaaatgagaacgaaaaagaagctcacgatggttgctttgtatgaagtgagtgcgaacatgagagggcgggaggaggggctacacgggtccagcaggtggagattgacttaaggaagaaaagccctcggcgagacgatgacctgaactgtactgttagagaagatggagagacagaaaacttacaagaaatcgaagaatactgtcacgacgaggaaagtgactgcatggtcaaggaggctggatttgcgacattagatgaggaaaaggttgggcagggatggaacaataagaaagttgagagggttaaagtatatctagaaaaaatgaaactaatagaatggtttgatgccatagaggttcaactgccaaaacagacaattgaagaaacagagaagatgattgagcccatgagaagtaagagtatgaaagttcacaagcatattgtctaacaaaaggaacagggcgactaagtactaagttgatttgatcccattttgctagcttcatgatatgttctaacttatacctgggaatactttg

SEQ ID NO: 60597 - DNA, 2259 bp, Arabidopsis thaliana landsberg
  unsure (1)..(2259): unsure at all n locations
ctcctgacaattcactctctactaggtttgctctatttaaagatttttttgtgcttttttgattatatatagtaaccgaatttggttaattgtgacattgtttaatgtagggagaaggtttttggaagaaaaaactgtaaaagattccaaaaatagtaagcctaaaactgaatatagccatgttaaagttagcatagcaggaagtgggtttcttctcttgtgttgcgctcttnnnnnnnnnnnnnnnnnnnnnnnnnnnnnngcaaatagtcatgaagttctacctaaagaatctaactcaggtcacttagtgtctctcacatttatctttcttttgtagctatgaaataataacatttgacattgaagcttatatatttctatcacagtgcaccaagtttcttcttttgaaatgagcccttcttctgagaagattccacaaagtccattccgagcaccaccaagtccatcccgcgtaccgcagagtccatctagatatgctatgtccccaaggcctagtagactgggacctttgaatctgaccatgagtcagattaatacagcaactggtaattttgcagacagtcaccaaattggtgaaggaggctttggtgtagtctttaaaggcgttctagatgatggccaggttgttgccataaaacgagccaaaaaggtactcttataatctttcagcttcaattttcttgtggtatcaaatttgtagtatagtttattcagtcatgacctataacgttgacagaagctaataatagaacctttacatgatcaactaataggcactagattcttgtagtgttaggaaatcaagttctcacactaattatatgtggtctagccttactgagtaatgttgctttgtgattccatgattaggactctaactagatatctattctttggtttttaaatcttgaagattaacgatcatttgtactaatacagtgccattgagaccttgatcactgcacaatatgaactaattaagtgttgattttacttgtcttgtaggaacactttgagaatctgcgaacggagtttaaaagtgaagttgaccttttgtctaaaattggccaccggaacctagtgaagcttcttggttatgttgacaaaggagacgagcgacttatcataactgagtatgtcagaaatggtacactccgcgatcacttggacggtaagaacttctttacatcttcccgagcttgtcatggctataaaaacatatgactaaaccataaagactccttttgttattgcaggtgctcgtggaactaaacttaatttcaatcaaaggttggagattgttattgatgtctgccatggcttaacctatctccattcttatgcaggtagagaatgttgtgcttcctcataatataagtataaatcttgaaaggatcttatttgatattttatgattcttgtctttggaacagaaagacagataattcaccgtgacataaaatcgtcgaacattctactcacagatagcatgagagccaaagtagcagacttcggctttgcgagaggcggtcctactgactcgaaccagactcacattttaactcaagtgaaaggaaccgttggttatctcgatcctgagtacatgaaaacttatcatctcactggtaaacgcgatgtttactcgttcgggattttgcttgtggagatactcacgagcacgggatcaatggaggccaggcgacttactgatgagaggattacggtccgatgggtaagccactttataatgtttcatcttcgacttacatcatactttactaaatcgagtgtgcggtatggtaggcattcgacatgggcagtgacaggcgagtttttgaactagtggatcctaacgcgagggaacgagtagatgagaagatactaaggaagatgtttagtttggcatttcaatgtgctgctcctactaaaaaagagcggcctgacatggaagctgttgggaagcagctttgggctataagatcaagttatctcaggcggtcaatggaataagacaagtgttcacacgttacaaccaccaaaatgctatagtctctctgttgttagataatatcacctcttttacattttgctatccaaccacttcttcttcagatttgaaatgagatgtcttattcatgacttcagattctcgaatgacgcccgtaaactatgtgcattcattaggtgtgaaccaaaaaaaatgcaaaaactgaaccgaatcaaccgtaaaaatgt

SEQ ID NO: 60598 - DNA, 459 bp, Arabidopsis thaliana landsberg
catatttttttctatcaagctttaattgaaatgttaatttttataactaatctttatattttgcttatagatcattctcataatacaaacatattaggagaaggatacttcatttccgagtacaacgcatgatgataatatgattctattctttgtaaaacaatttcaaatgatcacaaatctaatcagttctttgttgaaaacagtttacacattccatcattattttattggattgtacatagtctaacatttgattttttaatccatcaacttttcatgtgtttttttgagttttgttttgttgatatatatacttaaaatatatatgtcaacaaatttacatgacaattgttttttatattataagaaataataaatatggaaataaatcttcaaaaattattttacaaaattattaaaaatttggtcaatatctaataacatattgtaaaaaaa

SEQ ID NO: 60599 - DNA, 469 bp, Arabidopsis thaliana landsberg
  unsure (1)..(469): unsure at all n locations
nnnnnnnnnnnnnnnnnnnnnnnnnnnnnnnnnnnnnnnnnnnnnnnnnnnnnnnnnnnnnnnnnnnnnnnnnnnnnnnnnnnnnnnnnnnnnnnnnnnnnnnnnnnnnnnnnnnnnnnnnnnnnnnnnnnnnnnnnnnnnnnnnnnnnnnnnnnnnnnnnnnnnnnnnnnnnnnnnnnnnnnnnnnnnnnnnnnnnnnnnnnnnnnnnnnnnnnnnnnnnnnnnnnnnnnnnnnnnnnnnnnnnnnnnnnnnnnnnnnnnnnnnnnnnnnnnnnnnnnnnnnnnnnnnnnnnnnnnnnnnnnnnnnnnnnnnnnnnnnnnnnnnnnnnnnnnnnnnnnnnnnnnnnnnnnnnnnnnnggtaattaccccggttcccaccttatttttacctttttttttttgccccccctttttcctttttggggggaaggagggttttttttttttttggggggggggggggccccc

SEQ ID NO: 60600 - DNA, 625 bp, Arabidopsis thaliana landsberg
  unsure (1)..(625): unsure at all n locations
aaatagcttatcatatgatatcgattgaatatggtgagttgattaaaataccaaccaataaccctcttaatattaaaatctatttataattctaatttcgtggaataacatattatacttctttttactttgataaacttaatattctttttctgacccaagaaaaaaaaattattctatatatattgataattatattattatttatagttaaattaaatacaatttagttacagctctctaaactcgtaattttcataaaataatacaaatgtacaaataaattgtggtccaataattgaatctcaatttgatgcgatcaatgtaaggcgcaaaagaagttctgttcatcttgtgggataattcacaagaagatctaggtaacgaattggtaatgaacaacatttatactcaaagccatcttagactctgctctctatcactcgatcgagtgataaaaagataaatagcctatctttttgttggatatccaacaagttgaaggttaaggttttaaaagatcccagnttataaataaattttctttatagcgaaacttaagttagaaatcagagatatatatttacaaaaaccactattcaattttatttatattgattactac

SEQ ID NO: 60601 - DNA, 902 bp, Arabidopsis thaliana landsberg
agttgcttactctaagtagtgaatcataggatatgttggaagatttgtaatcaattttgctattttggcaagtgatctgctatgtgttaaagtagtctttagattgagtcaacacacggttgtcattataagatttccttaagtactctaattcaaaacttcttaattaacttttccataatatttaatttccgaaataacactttccgtacttacgtacgagtatatacgagtacggaagaaaaaatgaagcacgacatagtcacatagatatggtagggtcgtagggatatgattattacaaggcataatattgcttcaatgtcgttttgtgtttgtgtccgaaattagaaatctgagactgacaaacgaagctgtgaagtgttaagaaactatattaggtgaatcatctcaacaactattccttcatttcgacctaaaacttcaaattggagccgcgtaaataccgtttatgatgttttcagcataacgtcacttctcatcacactacactttaattttgagggcaagacaaaatgtaggcccataatataaaccccatttatgaattacagttattgctcagaatctcagatagcatcaatttcaataagacatcagcttcttgtcccaaaaaaaaaaaaataaccgtcttaaaaataaatatcatgctattttgaaggtctattaaagtaaaaataatcgtcttaaaaataaaataaaatcctcttcttatcaataaagtttttgacaactaacctaaaaaaaagatctgtgttgatttaaagtttgctctctgactctgaagtttgactaaaaatggaagacggatcttgcctttgagggcgaaaaaactatgttataatattggtacatatggcctgaatattaaatcttgaaca

SEQ ID NO: 60602 - DNA, 1722 bp, Arabidopsis thaliana landsberg
ctcgattgattgattcttcagactcatcacgcaatctcttgaacagaagaaaataacactgaggtaaataataccaaaccctgtcaatttgagaatatggagtagtctataggtgatttgtagaaatatcatgttcggtacagctaatatagttaggatatatcaggctttgtatggcaacttgtttaaatttgtattgtgtgacctgatccatataaaattaagaagaaaaagtataatatctaataataagttagtgtggatgatgagacaaatggtaaggttttaggccaatgatagtgattatacctcttttgtttgtacttgattcgtcaccattattctgcttgcgtttattttagaatttagaggtggctttcggaattaaaaacaacaagacaacaacattttataattttgatttgtatactaataatagaaccaaactctgcttctctcagctattattatctaagtactgatatatttcaaattgtagcataagttctgtatatgtattagatagagttatcttttgatttattatcatatacggattaaatttgcagtttagagcaatgtatttgcaattttgtgaaaagtgaatttgctttatttttgtcttcattactaaagttgaattagcggtttgatgagtcattatcgctattaatttgtttccgtaataataatgataagcaatcatgtcacgaacatattactaatattgtggtgattcttttgccctcctcatccatattcattgattgtaaaagcacacgtaggtcacatacgtatcatcctaaaccccaaattaaaaaaaaaaactaagcaatttttatacatggcctttggcgatccaagcatgcaaaaatattccataaatggttaacacaaaatcatcgattctgaggggttaactagggtccactttattaccgtatggaaatagagacacgtcaaagctagtatttggacctacgtacgctcatgtattccgccacgtgtcgtggtttcactgacataaaacacatgtcggtcagataattctagctctcacgacgatgaagctatgtaggctcacttccactcaccgccgcctatagcagtgacacacgtcctgtcaccggcgtgtcactcaaataattatcatattttcattttaattaaataatattatcctatatttgttaggtggatcccaacgggagggctttatggtaattactatttactcctgagaagcttttatttttgtgtgtggagtagtaggagaagtgttgccgttccttgtcgaacaaaaaagagctttagacagacgctcctccccttttgtaatatttttgatattacgtgtgctctacgcgaatctatcaatatctaaatcctctctttctctctctctctcctccttcttcttcttcttcctgtcgctgccttgtggttgagtgagcaaaaaaactcaaaaccctccatggaaatgggagagagaatcaattcgagttgttgttaggggttttgcgatattttaggcttctgtcggtgatctcgaccaaaaaaaataaacaaaggagctagtagggttctgttttctctatcactcggaaggaagctggtttatgtcaaaactttgttcttcggaaaatgcgaaaatcgttcaaggattcactcaaggctcttgaagctgatatccagttcgccaacactctgaaatctctctct

SEQ ID NO: 60603 - DNA, 186 bp, Arabidopsis thaliana landsberg
acttccagttactgatctactaatagtccaatattatatctcttttatttgccacattatttatttactacccctggccctactttctgttccgcccgactcggactaaacctggccgaatggtggtttctcatcgctcttcttttgcaactctctcgtggcggagtgtcccctctgacaccacaa

SEQ ID NO: 60604 - DNA, 122 bp, Arabidopsis thaliana landsberg
ttagtaattatgatagaacagctgatacaaagatagtgagaagagctgatatgcttaagcgtcgaaaggatagtttgcttacgtgccggattgcttttctaactagccattatagctacagc

SEQ ID NO: 60605 - DNA, 1592 bp, Arabidopsis thaliana landsberg
  unsure (1)..(1592): unsure at all n locations
atattatcaggtaatcccccggtaatttttctttcccagtgccggttgttgcggcttcaacgcattggcaggtgattagagagagtaatagacacaagcttttattgtgtcgttaagctttcttctcacttttctctttcttttcttataaagtctcctctttaaagccccttgtggctggtgtagattttggtgagctttgtttctttactacacgaattttttgttagttttttttttgtgttcagtatcactttttatgttgatggtttagctgtggaacacccttgtttactgtgtcggattatgatctgagatgtttctcaatcagcttctgtaggatttgaaagtaatatataataaatccttaatttgattataaaaaaaaagatgtaaatttcttcatatttttctccctggctagaacaaatcataactttatgaaactgacgtcactacaaacatttattaagagcagaaaattgtttattttaagagtgttaacaacaaccacaccttaatagcattttaactttgaactttgaaacaacaagagagactgatttattttcatttagtgactaacaccttcagcctctccttctgcatatacttaattaaacgcttcacaatttggacctcgacgatttcgattcactctgcagccaaaaccagaattttcatcatgaataaatcgactatacactgactagtactgcattcatacgcttggaaacatttccatcatagagatctagttattatcataaattgtttactcaaaacttcatttttactagccaaactacaaaacaattctacatagttcatgccatacttgaacccaaaatctaatgttagcaggtcccttgcagcagatgaatcaacctaaattctattctcatatcgtttatcgatttgttaataagagaacttggttggtactgtgttttcttgccacatcataaaatgtaaaagaaagttgagaaactttaccaaaagcattccattcattgctctttcctccagatacctcgatggtttgaaaaagctgccataagtctccgacaatttcttgagcctctcatatatgtactttggtccaacagtgtctgcccagaaaacaattcctcccctgcaacaggtaaaaaaaattgcttaacataagaaatgatcatacaccaaaaatcttagtgactaacaaaagaaaggaaaaagttttgaggatattgtgaacgtttgtaaatgaccagaagaaactcaaagatgtgaaaaaatcatatgcataagatttgagcagaggtaatgcattttcagaatttcacaaaatgctcccttttgctttatggggattatgacttagaatcctcaccggtaagaaggaaaactcattccaaggacagacgcaatgtccaagtctgaggctcggatcacaactacttcatctaggacgcggcatgcctcgttgacaacagggaataagatcatctctacaatttctttatcagttactgatataggctgcaaaagaagaacagacantagtgcatttcatttttttaaataccaatagtagtactgatatatttcat

SEQ ID NO: 60606 - DNA, 1575 bp, Arabidopsis thaliana landsberg
ttagtatagaacatctgaaagagcaagcaagaaatgtatacttacaatggtaggatttatggctggtccagtgtatttagatccggcgacaacaaatgagatggttgcaagagcaagcaagaacgtcttagcaagcaatctccgtggacccctgaggataattagcaaaaccgcaaaggtaataccaaaacttaagatcgtttcagcaatagctccagtgtgcacatcaacctgaagagaaggacctccaatcatatgcttgtatttctctggtatgaactccatgatcgccaatgcacctcctgcagcaccaattgcctggaataacagatataatatatcacatctcctttcaaacattatcccgtcgaaatcaagaaacagtggcaaaaaagggatcatgaagactattcctaccaaaggcaataaagtcatctggcttgattcaactctcaaaaagagtacaaattactccttgctaaatcaggttaccaaatttaacagtctttctatctatttatgttattgtagtacacagaaacacatggacacgcaagaaactctagaaaaggctaaagaaaacacaaagacatatcgacgagaaagataaggtttcgttttcctactttaaattaagtgggaaacacatacatcagcaaaagagcaaacgtcagaaacaaaagagaatctgattctgtgtgttcttctttccaagaaatatcaaacgtgagtataactatactaaacagatcaaaggtgagaatatacgaaagacagaagatcagactcatatgtaccaaaaaagtcgaattctactcaactaatctaaaatggggcatacaagtggggacaaatcacgggaaaagcatatactacatagctttggattcaatgattcatgcaaaactagattctaattcgcagacaaaactagattctaattcgcagacaaacacaagcctatacccatttgaaagaaactatcacagatcacaaatattgatagaaaccaagtaaacccaaaacagtaagctgaaaaaagtttaaaaattcagaaaaaagtttggatctttagaaaacctgagcaggtaatctaatcgccaaggagaaaagagtatctccgggacaccggctgacataaaaggcagcgcttccggtaggattgaactagcgctaccgaagataacggtgaagatcgagacgtagacgaaaatcaacgacgtcaaaatcaccaactgagcccaagtgattgcctgaaaatcaccggacggtgataatcgccgccgtctgaattccaaaggtagcggagaggacaacccaagagaaggtcatcaacatatccccaatcgccgacttcaacacacccatcatcttcgtcttcgtcttcttctctttggcgttcgtatcgagaaagttctctgtcttttggggatctggttgtggttaggtgggtggtacgtcgcctctttagctttctctctcacagctatttttctcctcaaatagatttttttctttttgaaaatttgttttttttgtttttttcttgttttatgaaacgaagttatctttgag

SEQ ID NO: 60607 - DNA, 354 bp, Arabidopsis thaliana landsberg
tgtacagctgggcatttgcccgccaccacggtggtcagttcattttgcgcatcgaagacatttaccttgaacggtccactccacaggctgtacaagccattctggacggcatgcactggctggggctggactacgacgaaggccctttctatcaaatgcagcgcatggaccgctacaccgcaatgattgaaaaattgctggccgagggacatgcctacccttgctattgtagtcaggacgatttgcatcaaatgcgcgaacagcagcgtaaaaatggacagcgcatgcgttatgacggcacttggcgacccgagcccggaaaagcacttcccactccgccagagggggtaaagc

SEQ ID NO: 60608 - DNA, 111 bp, Arabidopsis thaliana landsberg
agcaattctggtgttaagggagaaacgttgttttataaaaaatcatgaccaacctcctccctcaaagcaaagattgtcctgatagcatggctcctatggctgctcaacttg

SEQ ID NO: 60609 - DNA, 155 bp, Arabidopsis thaliana landsberg
gagaatctgaacactaatcactgtttaatatctgaaggaggacaatttcgactaagtgagagacgcagtttgtttcaagactggagcttcgcgaagtagcggaagctcgttaacaaatcgagaaggcctccaaagctcactgtcaacaagagatg

SEQ ID NO: 60610 - DNA, 1461 bp, Arabidopsis thaliana landsberg
cctaaccgccagatgaaaccatgtgtcccattgttcatttgcagaatccaattctttctcacatcatttcggaacattgaaagatagacttcttaacttctttttttccttctttcagtgattcggtattgagacatgcgtcaagcgatttcaggaagatgggacagcgaatatttgtgttcatcgtcggtggagcgactagatcagaggtaagaagctatggaaaaaggctttcattgttggaaataaattcacatcatagaatcatgatatatgtgctgatctcttttcctggtatctttgatttccagttaaaagtatgccacaaactatccacaaaactcaaaagagaagtaatcctcggttccacgagcctggacgatcctccacagttcataacggtaagcctcacaaatacttctcattccgagatttggcaaactatggagtatgaatcacccactaaatcaaagtaatcttatactttcttcttgtgtcccacagaaattgaagcttttgactgcaaatgatgatttatctttagacgatctccaaatatgagaatccagatctcaaatcaaatccctgtctttgttctcttttgtctctcaaactaatttgtaaccaagtgaacaaaaaatcgtcagattatgagatcatgattgtaagtgtacccaaattgtttgtccgataaatatgtaaagcaactcataaagttgacttctagatctttggctattttcttgttacattcgattgtgtaaattacctaaacccttctttgctttttcagaatcttctcttatataagtttttcaattagatttttttgaatctgaatacgttgaatataaaaatgcccaacacagggcaaagtagtctaacaagtaacaataccaaggcattcaaagttaacctaaacaatagttatcttgggatcaacagagtctctggtgagctgttcttcagctttcctcttcttctttgttactgacaccaaactcttgacataagagatgtaactatccacattgaatttccgtttgcaacccgcgtagttcatgtaccgtatcttcccaaaaaccggcctctctttccatccctaaaacccgtcaaagcacgaatcgataaatcaaaattcaatcacacgcacaacattcaccaatctattctactatcacttctagtcaagtaagaggagaaaatgaaagaacctgatcatgaacgccacatatagaccacatgcacccaacatatccactcgggtcacgaccatcaatctcatactacaaaatatcaaaaactttaagcaacaaaaaggaaattcatggtagatacagaaattaagttggaagaaaaccttgttatttagatagatggatattgagagagcctcttcaggtcccttggtccattctagaatcttctttgcccaatacattctgcatgtaatgttgataa

SEQ ID NO: 60611 - DNA, 206 bp, Arabidopsis thaliana landsberg
acacattatgaattttcttttgaatatcaattattgaccactatagatttgatttaagtacgtattattactattttggagtaattaatattcgctttcatggtctttaagttttttaacgttatctgacttgatatttttttttgttggcttcaaactaagactctgattattcttatcgagccgtttgtacccacctcccatca

SEQ ID NO: 60612 - DNA, 495 bp, Arabidopsis thaliana landsberg
  unsure (1)..(495): unsure at all n locations
tttttgaattcagcatcnnnnnnnnnnnnnnnnnnnnnnnnnnnnnnnnnnnnnnnnnnnnnnnnnnnnnnnnnnnnnnnnnnnnnnnnnnnnnnnnnnnnnnnnnnnnnnnnnnnnnnnnnnnnnnnnnnnnnnnnnnnnnnnnnnnnnnnnnnnnnnnnnnnnnnnnnnnnnnnnnnnnnnnnnnnnnnnnnnnnnnnnnnnnnnnnnnnnnnnnnnnnnnnnnnnnnnnnnnnnnnnnnnnnnnnnnnnnnnnnntgctccagggccgtctggcccctgtgggctttccccaattcgaccccnngtcttgaaacaaacggaccaagnnngagtctgacactgctgtngcgcagtcatacgcggtgcacgtaaacccccgtaagggcgccaannggaagctgattggggcgggaatcccttcccgcgggtgcccaccgccgacnncgactcttcgatcttctngnnagaagggtnntcgagtgtgaaagcatg

SEQ ID NO: 60613 - DNA, 392 bp, Arabidopsis thaliana landsberg
caatttggatccatcgggcgggtgatatgctgccacttccctatatgagcgattaactgctatatggtcatagctgttctgggatgtatcgtacattcaacacatacagccgagctaatgaaaccggggctatggtgactactaataattgcgtggctactgccctttcatggaacctgcggccctgataataatcggcaacccgggagaggcgttgcgtatggcgctttccttctcctactgactcgtgcgctcgcgttcgtgggcagcggtatcagctactcaagcggaatacgtatcacaatagggatacgcagaagaacatggacaaagccacaaaggcggaccgtaaaggccggtgtgcttttccatagctcgcctgacacatacaa

SEQ ID NO: 60614 - DNA, 145 bp, Arabidopsis thaliana landsberg
acagagacttttaagggtaggaacaaatagactacattgcggattcgtgtgctcagactttagacattcctgatgggggacataaaagatggattatcagacaagaaagtaaatccattctgctagaacctgagactacatgcca

SEQ ID NO: 60615 - DNA, 425 bp, Arabidopsis thaliana landsberg
cttttatgcttctttcacattcccaccccactatatacagccataagaaaatatgctcatcccttgctcataacaattgcaaagatcatgtccataagtactacagtattgacaatgaaacagcaatacaatccaacaagaactcaaatgcatacggaacaaaacaaacattgatcttgtacctatatgtagcgagagtagatggtcctgaaagagtatcaccgctggtggacaccatgaccggatccaccactagagctgccttcagaagcataagtcatagcaagtaaataactgagttagcatagtatgctttcataatacactcgcagaaatacagcatacctttgactggaaacttcctatagactttcacacagaacttcgactactccaactgaagggacatccctgtttcacctaat

SEQ ID NO: 60616 - DNA, 259 bp, Arabidopsis thaliana landsberg
taaaagtatttgtaaaatttgaattatgaatttatgtaattcaacaaatttactataagtagtacgtaattaatttattatgatttctccatatttcttaaattaaagtaaacaatctttagattcccctgagtttcttcttcttgttggaaaaatgaagtttactcgtgcgtaattcgttaagagagaagcccatgtggcccaaatttagggcccgtgtagtggaggtttcgttataaagaatctagtgagaagtgaa

SEQ ID NO: 60617 - DNA, 447 bp, Arabidopsis thaliana landsberg
gtggattgggggtggatcaacagtgggttgctgatcgggagtgcttttcatgtttctatgatgtgcacttgtttgttgtcagttgtcagtgcagacctaaccactttgcttgcttaaaccatacaaaccttctctgttcatgccatatggacagaaaaattgttaacacaaattattttttgagtgtatgcatctgtatttctagaaaacattaatataactcaagacttctacaatactgttaactgcagtttatatcaatttgcaaaatgtggcaggaacatagtttgattgatattttgtatgcatctgtttttgatagtttaattgcatgcaaagcaccatgctatggaatgattataatttgagtttgcttgtttatactttatattggatttgcctctgtagttgctcctttaaatactgcgatttgtacctttttatgac

SEQ ID NO: 60618 - DNA, 999 bp, Arabidopsis thaliana landsberg
ctagtctgtgatactaatctgtggattgtccttgttttccaacctattttgcagaaaaacaagtgggaattttttctttttcttctacttgaagttctagcgatgctgataactggtggcgtcactcttgcaagtatgtttgtagtggaaaatgccctttaatcattatatgtaaatctagagaaaactttcggacaaaaatgtaaatgttgtattatctacatgcaggagtcttgagtgacccttcagctccatcttcttttggagcatggatgagccatgtcgctagtaatcatgtgggtgctttatcctttctgctagtggaattctgcctcttcttttctgtcgccgtcttaacagtcatacaagcgtcacaagtgagccctcattcctttttccttatctgcacatctttgttctctcatacaaaggctgctctttcgtactttgcttccccggattactcatctctagaatagctccagagctaaaactcactaagtagactagattattcgattttcatggcgtggtgttttgcctcatcctgaagatccattctgtccctattttcccttacagatatcaaggaacataaccacaaatgaaatggccaacgccctgcggtacagctacctaagaggtccaggtggtcggtttaggaatccttatgatctcgggtgcagaagaaactgctcggacttcttagtaaaaggttataacgaagatattgagtgtcatgaagaagacgcaacacagagaccagagggtattagcatgatgcagatgcagcggaatccaaatcttcaaaatggcaatggccatgttgctatcgatgttacacataattcacagtcagcacatgttcattctgccaactgcagccatagccataatagtaagtcaaagagtgacaatgttctttgggtttgggacttggtcttagtcgcaacccaacccgacctgttgtatctccataatatggcccgtgtccaaatg

SEQ ID NO: 60619 - DNA, 267 bp, Arabidopsis thaliana landsberg
tgctttgctttagggagggggttgagtgcttatcaacattaacaatatctaacgttgtttacttacgtataacaacacagaatacgctatctattacgtcatagacataattcctgtaactcacatactaaaccgatgaccctggaaataacaggtgacctacacgccaactaaaagacttaaaccgattaaggacaaaaatgttagcgataattcaattgctacgcccatgaggaatgactgacaaaggagggatctcaaaatcga

SEQ ID NO: 60620 - DNA, 1248 bp, Arabidopsis thaliana landsberg
agatcagcctcacatctcattagagaagaatatattgaagaggtacatgctctgagaatggaatatacctttttcgttagttggacgaggcacttatcaacagctacactgaccattctgatacagtttgctgcgtcagttccaagatttgcttcatctagagaagaatgcatgcattttctcaagtgcctcatgatatcgcttattgcgctgactatcgttgcagagtgctcaacttttgcagtttcagaaagggaggaggtaacctctaaaatgttgagctgcatgcttgggtgtttaagcacacttttatggtcaaggtgtttaatcaacatagaaagtagaaagtgtgttctttgccctgcaaaaatacagaactatcttagaacactgatcatgagggaaggactgaatgaaaactgtcgggagcgtaataccagatatttccattaaaaactgcagatcccttaaaacagggaatgcaatcgaattttctgttgaccatagacatccctcgtcaaagttacggaacaaagactcaagtatacgtctcattgttgtggcctcttcacctagcttggccatgttgtgtaggcaaaccttagaccaaaagctagggtccaaggaatcttccctgtaaaacaaagatatattaaagaagaaaagaacccaaaaggccaaccgtaaacacaacttacgagagaagagattacattttcacatttagttcacccttgtcattcacaaccgttctccaagaaggaacatttatgagggaatcttcataagctacatgaccttcgtttttcaatacttcatccacccattttctgccactatcattagcatttgttaatattttggggtgaccgtaattttccaagactgctgagacaacctgccatacaagtattgaatatatccgttaacatatattcacatgtactacctaaaaggctaaaactctactaaggtacaattctagccatccaatcccaactcccagttctatgcaatgtaaccacgagtggtagattgttctggtatttttaacctttggccaagaaattttggaaaggaaatccaacagagtgtttctcactttgtctccaacagagtgtttctcactttgtctattgttagataccacaaaaccaattgatttcgatgaacgattgaggatcagagtatataggaacccggaaacccaataaaacctgtgaagaaaacataagaaactagtacatg

SEQ ID NO: 60621 - DNA, 107 bp, Arabidopsis thaliana landsberg
ttcctctgacaaagaatagttcctaacaccgtaagagccagagggggggggttagcttaaacaataaccataggtgtcgaacctgcgaactctgtcacagggaatga

SEQ ID NO: 60622 - DNA, 475 bp, Arabidopsis thaliana landsberg
  unsure (1)..(475): unsure at all n locations
ggnnnnnnnnnnnnnnnnnnnnnnnnnnnnnnnnnnnnnnnnnnnnnnnnnnnnnnnnnnnnnnnnnnnnnnnnnnnnnnnnnnnnnnnnnnnnnnnnnnnnnnnnnnnnnnnnnnnnnnnnnnnnnnnnnnnnnnnnnnnnnnnnnnnnnnnnnnnnnnnnnnnnnnnnnnnnnnnnnnnnnnnnnnnnnnnnnnnnnnnnnnnnnnnnnnnnnnnnnnnnnnnnnnnnnnnnnnnnnnnnnnnnnnnnnnnnnnnnnnnnnnnnnnnnnnnnnnnnnnnnnnnnnnnnnnnnnnnnnnnnnnnnnnnnnnnnnnnnnnnnnnnnnnnnnnnnnnnnnnnnntttttgtttaaccctaatttacgcaaaaaggcctcacccggtgggccaagggggggttttaaaaaaaaaaaaaccccccccctttttccccttttttttttttttttttttccccccccccccaaaaaaaaa

SEQ ID NO: 60623 - DNA, 1437 bp, Arabidopsis thaliana landsberg
gtatcagtttgtttttgatggtataatgcggggtatgaacccaaaacacaaaaaagtttcttagattgtataaaaaatggtagctaaattgtataactttgttgaaggttgctgctggtgaaatcgaagtactccgtgaatctaattcaatgcaatggtcagcagaagattttgagtctagattacaggtaacaacatgtctcatatttctttcaaaaatttacagctttggcctgtgataatttcctattaagataactgctctgatattgataggaagcactgaagcagacttatgaaaaagctcttaaagcagcaaatgatttcggttatcaaaaagaaagtcctgagtaagtttttctcctcgtcataaaccaacagttactgtactatgttggcctaagctgctctgtagcttcctcgtgctcgttactattgtgaatccaaaggattggaataatattcggttttgatgtcagggcactacttcatggagcaacgattgcagcatttttgaacatagctcaagccatgacggaccaaggttgtgtctagcaaaatggccctgcatcttaagtaccggcaggagttctgtaaacgtaatgaagtaacattggactctctgtaacatattagatggaaatctatatcattatttagaaattacatactctgataggaataaacctttttcagccatagtatgttaacttaagttatgtgactaacaaagatggaagaaactgataacgcagagcttaaacaaggttgcaagggtccaaattttaactatttgtcttttgacagagagatttgctttgagctgatgctaaacaaaaaagttacaaaatcagtggcattctctcctacagtgtttttatagatgacatggtaaattttatagatttaagacaaatggtaattctcagggtactcttgagtggatcaaaactcggaaaactgaagatatggagattaaatgcttctcaatgcaaggtcagtatcttgcatcatgatctctatccagaaaagagcttcaattatcagtatataaggctctcccttagcttcatgtccttgttgggggagcggaagaatcagatttctccgccaaatagtgctcaagcatgtcttcttcgtcatctgtatcaaaaaaaaacaaagcggttcttgagaaccattggttgcttatggataatcgcgtgtaaaccaaaaagaaagactatttcaccttcaaagtcttcgtcttcaaagtcgatgtcttcctcatcttcctcctcatcttcctcatcagcaatgaccaccgttcctctctgaacaagacagttaacaacaatagtacttgtttagataatgaaattctaacatgagtccgataataaacaagaatgagacatacccctctcccactttcgaaccactgctttctgtagcttc

SEQ ID NO: 60624 - DNA, 1167 bp, Arabidopsis thaliana landsberg
  unsure (1)..(1167): unsure at all n locations
tggtttttagttgagagaaaaagcttcaaactttgccgagggaacaggttcttatgattctgtgataggcattagaatgtagtggatgcataacaacaagatgagattaggggtatttgaccagtggcttgtttgtgagccttttggctttcggggagttaangagatctctttaaccaattttcaatatacatttggctctttctttgagtttgatcgttgcttcaaggataacaaagaaaactaggctttcgatctgatcagttttactgttatattttgtctcgtttgaaattaactttttttggcttttcttgtgtgtgtgtgtttgttccataattctgtcatcgatctcgacctccatctccaagaaatatgcattagcttgcaacaacatgtcatgtaaaccccgcatcttcttgagatggggttcttgatctaattcgattggctttttcttatcgactcaattccattggctttttttctaaagaatagcgtttcttgtaactttttcagcctgcagtatatgttgcagagagcgcgattagctcaggtactgcaggatcatcggctgatggggctgagaacacagcagcaatcgtagcaggcattgctcttatcgcagtcgctgcagcttcctctatactcctccaagtcgggaaagatgccccaactcgacccaaagcagtggattacagtggaccgtctcttagctactacatcaacaagttcaagccttctgaaattgttcaaccttctaccccctccgtcacagaagccccaccggtggccgagctagaaacttcactgccagaaactccaccggtggctcagcaagaaacctcactgccggaaactatggctagtgaggctcagccagaggcgtcttctgttccaacaacaagtagtacctcttaggggcttagcctaggattatatctttgtgtaaaaatgagatgaagcatataccaagattatgcattctgttaatattcggatatacctatatgtatgtatacactctgtcactcttctctttgagtgaatgattatatcaaatctcaaatcctattatttttgcttttaccgcgtctggagaattggtctgtgtcaaaaagatgcctgcatttacaaagggattaaatggtatatagggctcgctct

SEQ ID NO: 60625 - DNA, 1147 bp, Arabidopsis thaliana landsberg
ccttaacagtgccaatccgattttgcttttatataagcttcccatcaaaatatgactccacaacagtatccaaagcctgcagtgaaatagatcaaaccaactaaaacgggaaaagttaaagtccgcttataattctgctttcataatattggacaacaacattacccttaagtcacgcacgcgatcatactgcatacagacatatttgggaagaataatctccaccagatgaccttttctttgcaatgccttaccaagacctgccacaacatctcccaaacctcccacctacagaaattacagaaggaaatttggaatggggataaagttgaaaatttaccatgcaatgcttctatttcggaaaatctaacatgtaagcaagagatatttttgagggtttagctgaacacaccttagctacaggtgccatctcagctgcaatgtgaacgacatacaatcctgaactagaatcaacacaagatgaagaaaataggttacttttttcaaaagctttaaaaactgaaaaaaaaataagcatttccaatagacgatgataaccttgttggagatgagacaagcttgagaaatgcagagatggcatcacgttcattcttatctttgacgtcagtataggtatcatgaattcttcgatctttcttccataccatgtctctcaataagtcagcatcgttgcttgctattttcttttcaagcagccatccatcaacagttaaaagcaaccgactccaataatcccaaggcatatcatcaaccggttcatctcttgattttttcttgctttcttccttcaaactttcaagtgtttcctggaattcttttatcgattcttgatataactgaacatatgagaatatctctgcatcagacttttcgagccgctcctcaagtaatgtcaccttatgttgcattagctcattgtactgttgaattttctctgaagattctttataaacgttggcttctttaagtgattcctcaattttgtcgaccttatttcttagatcttggttctgttgtaacactataactgcttgctctgcttgtttgtagctctatctaacaacagctgtagagtctctaccttcgcccatagatcagtgcattcgattttaagagtagaaagctg

SEQ ID NO: 60626 - DNA, 1062 bp, Arabidopsis thaliana landsberg
gtactaatcaaaggcccataagtttaagcccattaagattttccagaaccactagcaatattattacctaattttattttattttggtgagaattattattagctattctttaaagaaaatcttttctcttttatttttctatctctcttcatttttcatttcttaatgttttcctccactatgaattgccctgcaagttaagtttagaattattgagctcaaaagccttcatgtttttcttgtgtgcccaccacttctcgatccacactttttctatggcatatatacaaaatacatacaattgattaagtacttatttatttttaaaaaagcatatcaaacacctttctacacatagtgaatatgaatgaatcttaacttttcttcaacgaaaaaaaaaaaaaaattcttcaacgaaaatgctcatataataataccaatatgtgaatcacactacattatacttgtgtctagtgtagtctataaattgaaaaaataaaataagaagagtactacaagtatagactagttgacctaaatttagcaaaaatctgatggaagagtaaattttgagacgtaggtgatcattttgaatttgagaagatacgataaatctaataaccacaatcgatcgtaaaattaatttatgattttggtctggtgaaataaatcatttttaaaattaattaaagaaatcagctttgataattaagttcactcataaataaggtagaaaaatccattaaagagtgtttcaaatccatccattgatagaggaagaatggcatattgtttgtacaccaaccccaagaaaatcccgagtttgccctcctcctcccgcattcccaatatcaactcttctacgcttccaagggtaattctgtaattcacccatccccgaaacgaccgtaacgccgtttctagggttcccgatctcgtgaagaccgttattattattactcattaactcgacactgttcgatccaaacgaagcaaagaacctgtcgctgccaccatcttctacaatctgattactcttcgatgcaaaactctgaagatac

SEQ ID NO: 60627 - DNA, 149 bp, Arabidopsis thaliana landsberg
caaccttatatttctctggtgacatattttcactcaagtactactactttttctgctatctctagatattataaaatgggggaagatatatatatatatatatgtagatagagacccagccggcgacttcgcccttccgctcccccccc

SEQ ID NO: 60628 - DNA, 404 bp, Arabidopsis thaliana landsberg
  unsure (1)..(404): unsure at all n locations
tttcctctgaaaagggcaagggatcaacttcaacgttgtacattttgaannnnnnnnnnnnnnnnnnnnnnnnnnnnnnnnnnnnnnnnnnnnnnnnnagggaagcaatgcactatggagatattgagcaccgagaattgcatcaggcatatgggtatttctttgcgggaagtcaatggtatagtgtagtttggataatcagaccttggaatccaggtcttcagctatgtcgtgttttttcttggggacaagcaatgtttcgagggggtggtaatgtgacatccggtctctgttgctgtatcggagatagaagaggaagctggcacgaatgaagaatagtagaagggtatgggtcatagctgggccagatctttttgttactacagaattgttgcatgggctgg

SEQ ID NO: 60629 - DNA, 854 bp, Arabidopsis thaliana landsberg
aaggaacttacaagctataggcaaacatttttaatttctttctatgttattatatctacaatcttttaaatgtcttctctcgaaattttagttttcaagtggtacaacaatactctatcatctaactttccagttgctaccagttgacgaactatgaattgagcaaacatatagcaagttaactagcatcagagacgtccaaactatgaattgcttaaggctgctacggctagaattgaccaacactattctatatatatatatatatatatattttgtcgcctccaacatcaatctatgcatacaaaaatatgttctggtaagacttataattgtttgctataattttgaccagactttgtaagtgtgtttattatgattaaagaagacttggtaaaaatataagtctgatatggcttacgtaattgtgctatgatcacgacatacttacttaaaaatctctatgactacgacagactaacatcaaaccatgcatgggagagttataagttataacattgttttactattagttacacaaaaatagtcaaataacaacatatttttcagcacgggatatgtgactattcgtgaataacatacaaatattggccgcaaactacatctgtgactgtaaccatgacaacaaaaaccggctggtaaatttggcccattcaatcacgaactacaaactcgtggccatggtcactatatcatcaatatgtgaattttgctgcaaaaataattgaattcttttttttctaactaaatgttatttgaggagaaaaaaaagattgatgggctattaattttatctaattttcaaaattttattatatgagatacacgtttat

SEQ ID NO: 60630 - DNA, 506 bp, Arabidopsis thaliana landsberg
  unsure (1)..(506): unsure at all n locations
cacggcggggtgcggaatgttcgcgcccgcactctctccgccgacgtggacgcgcccgaggtccgcgtgggcagtcagccagggttcctgcccccggcccacggagtgcgcggccacccactggagcgccgtccacgcgtccccgtagagagcggggaccggatgctctggcgcgaggcggtattccaccgacacgatgattgcgccggcagccgcggctaaccggttggcgtgtgagtgcaccgccgcatcaaacgccgaaccgaggcagaacccgccgccgtggaagaacaccaggacggggagcttgccgctgtaacttccggaagaggggggcgctgggaggtaaatgcgaaccaataggcaggcgtctgggaggatggcgacgtcctttgaagaaacgccggtggcggcgtcagtggagggcggggcgaagtcgaccggcagaaagcgctcgacgcggntcgtcctgtacactcgtatgaagccgggagcgtcgaggatga

SEQ ID NO: 60631 - DNA, 419 bp, Arabidopsis thaliana landsberg
ccaaaatggtgtaatgggattttgcatgaatattattaagtttgaacttaataattgctatatttgattgcaaacataaaagaatgcgaaaataatagcaagtagagatgtgaattataaatgtaaaaacaaaaataattcacgaactaaagtctgctatattcataataaaacagacaaatatgtacaatatatatagcaatttgcagtctaaatgccaaatttagacatcctaacacaaattaagactgaatgtgcatataaaacagagtcttatactaaaactctgaatttaaaaatgataaacagaccattctgggcccatgggaccagcccaggcggcctgccaggcgggccagccagcggcctggtggctagcacgtcggcccaggcgtcccaccaggaggccatggtgccta

SEQ ID NO: 60632 - DNA, 1093 bp, Arabidopsis thaliana landsberg
ctaatgtggatttttaaaagtaaaagatgtgtactcattggagaatgttcagaacagagtttgctattccaaaaaaaacagaatctgaggcggttcaggcgtaccctgttgctgatatcggctggatcatcctcaaaaatatacggccaagaaaatcgagcatgatctaaccacatccagaaatatacaggttttacgagtttgggccgggactgaccataatatcttaaatctcttagaaatatatatgttggcatattgttggaatgatcgtgtcatgccgatgatgtgaaaactaataattttaatttgcgtccacgactctattattacattccctacttcataatcgacccaccaacgtgcgtggcacgagttctaaactcaaaacctctcgacgtgcatcctagtatcatacaacgttttaccataacctcctatgattatagactcgcgttacactatttgtttcaaataaacaaaacaaaaaccatttgggttctttctccaagtaaacttaactttctctggagaaagacacaatgggcgttctccttccgatattcttcggagtgttactcttattcaccgttactccaccgtctatgtctcagcttcctccgacaatcatggttccggcaccggcaccggccccgatttctccatcagatctttgcaacggaatatttctctcttatgatttcatactcggtcgcaagatccctccgaacgacacagccgatcagccttatcggttcgagtcagttcttacggttctaaacaatggccgtgaagagttaaaagaatggagagtgtttgttggattccaacacaacgaaatccttatttccgccacagatgcgttaatagtcaacgggacagagcttcctgctttggtaggaaatggtaccatcttcggtggctatcctgtctccgacctcaaaacggctattcaaacggccggagacttgaagcaaatgacggctgagattgagcttgtcgggactcagttcatggtggctcctccggcggttcctttgccatccaacatatcgcttgttaacgagggttggctctgtcctgtgcctactct

SEQ ID NO: 60633 - DNA, 343 bp, Arabidopsis thaliana landsberg
tattcccatacgcgcagccgccggccctgatcttcgagcgcgaggttcttgttttcagcgcttcgttggcagtgcgcagttcctcctgctgcatgcgcagcgcttccgccgacgcctgcagttcctcggcctgtgcgcgcgtttcgtcgagcaattcgcgcgtgcggatcgcgctgccgagcgcttccagcgccagtccgatcgggcgcatcgcctcttcgagcagttcttctgtggtttcgtcgagcgcctagaacgtctccagttctagcgcactggaaagaccgttgatgccgggcaggggccagggacgaactcacggcggcaccgttatacctaggcc

SEQ ID NO: 60634 - DNA, 904 bp, Arabidopsis thaliana landsberg
catttccctctggtactcgaacgtttgaagaaatcaaagtacaacgatagataaaacaactctacctttgccctcttcaatgttctttaaagctaatcagatcttgtttcttatttttcaggccagtgtccccagaagagttaagaaaaacgggcaagtgtccactaacaccagaggaagcaactctggttcttgctggtcttggattcaagagaaaaacatatatttacttagctggatctcaaatctatggaggctcttctcgtatgcttcctttaacaagactgtacccgaatatcgcgaccaaagaaactctccttacacctcaagaacttgcgccattcaagaacttctcttctcaggtaaaaagatataaacaatcttaaacttactttttcccgagttactctgttcttgctcaaacttcatttcgatgttttcggacgctgttttgcagctagctgcactagatttcatagcttgtatagcatcagatgtctttgcaatgactgattctgggagtcaactatcatccttagtgtctggatttagaaactactacggaaacggtcaggcaccaacattgagacctaacaagaagaggcttgcagcaatcttatcagacagtgaaacaataaagtggaagatttttgaagatcgtgtgagaaaaatggtagaggaaggccaaaagcttcgtactaggccttatggacgcagcatttatagacaaccgagatgtcctgagtgtatgtgtaaattttgatccttgaaagtaaaacaatagtgtctggtctgaaatttttgattacccgttagtacaaaaaaagaatgaaggtactgtatatcattgattttaagttttgactcgttatgaaacattgaactagaacccctttagaaactc

SEQ ID NO: 60635 - DNA, 409 bp, Arabidopsis thaliana landsberg
ttttcttaatgtctaatcgtttcaactaaaaacaaaggtttaaagtctagattgtttatttacgtttgtgtaatataactatcgattgtgatgtgtaaacataatgtcgagatattgatgttattgttgcggtcaacgtcgaagcgagtagtgggtcacggtcctcactactgttccatcgtcaaccctgataggctcctttcatactacagtctacaacttcaccgaaacaaataagagaaacaaaacccgtctaaaccgaaataggttttttacccaacatgtgattcttgaaaggcctctcacaacccaacaaacatacattttgatgaaacataaagattacacacattcattaaatatcagaatctagatagctttttggggtggtttgttacatgggaaaaag

SEQ ID NO: 60636 - DNA, 259 bp, Arabidopsis thaliana landsberg
atcgccgccgattgttaattaagtggtcttcaatcactgatcacttaatcaattttgattattggtctattttaatcatcaaatttgatggtttctagttgcgacttgctgtgaatgaaattcaggctttgtcttggaggttgcaatcgaaaatttcactaattgctgaacgttttttgattctctttcaagcttagcatcataaattcatgttttcttgttgcgattgtgtatgtgtgtttctgattaggatggaaga

SEQ ID NO: 60637 - DNA, 1009 bp, Arabidopsis thaliana landsberg
catggaacaaaaaatcatcgaaagggatgaagaaaattatgaagaacaacaatagtaggcaacaacgagaatcatttattcaagatgttcttcatttggttggaaagagaagtaacagaaaagaatcgagattataacactcacaagctgccgacaaatctcttgttcaattttggaaaaggtagtctccagtgcctccactctaccagttgcgtgacagcaagaacatggttcactgatcataaatgttacactcggccgaacctgtgaaaaaaatagattcactacaataagtataaatcgagggggcgtgctatgccaaaagaattaattagaagctctacagaaagagaaaaacatccacaagttgggactataccctttttcttgttatctccataagtccgtgtctagacagctctgatacttttaccagtgacctatctctctccacggctttcttaacctcttcataaacgagtctcttatttgctgaaacccaaaaataaaaaacaagagtatacaggacatccatcattcaagaaagggatttgcacatcgagaatatttgaatatgtgattggatgaataaaaatgacattctaactcacattcatctgccatgtcgatgaaatctaccacaatgataccgccaatatctctcagccgaatctcccttgcaatctgttacatgatcgcatcgagtattacttaataaatgcttttcaagatcagcatattgcaaaacttgagtagacttcaaggagaactacacaagacaagcaggcctcaaacagttactctttctccatgttaaaaatttcctacggcattcactagtcatcagataattcatacacccataaatatgctcgaatctgaccgcattacgctctatagaataattactagggcccttttcagaggcagaatttctgccgcaaaaggttggcaaatgaatatgcaatctagtagtcaaaatgtatcacatacttggctggcagcagca

SEQ ID NO: 60638 - DNA, 722 bp, Arabidopsis thaliana landsberg
tttttcacacccactttaaatcataatattgtagggaaataattttaagctacatattgtacattccgagttccgacagtgctgcattccgatattttaattgattcaagttttgattacattttttctttttgctgatttggaaaaaaatcttgattttgtatcgtcatcaaacggttgaatttagagatttattgtattttatatattctatataaacttaacttttctcgtgttcaagtagtagctaggtcgccgaccttctgcatgaatcacatgtctcgtaagtttagagtagtaagttaaaattcattaattgtattgtctcaagaaacacgcatgatacaatagtatttttttttaaaaaagtaaaatttttattttattttattgttttcatatatttcaggatcgaccatgatcagaagttttctagatgatatcgacacgaaatgtcagtctatagaaaccgttagcagtgatcagtgatcacttatatagttgctaaattgaccgttacttgtcatcgttttatgttttatcttatcctccaaactgttttttatcccacagtaaacacaattgatgacaactaaaccaaataatatacgtgtttcaaacttaaaagaagaaacagcatcgtggaagatagcccattcccagagtggctattttgtaattaatgaagttttccatgtcctcgatcaaaacaactaagcgac

SEQ ID NO: 60639 - DNA, 1411 bp, Arabidopsis thaliana landsberg
tggctctcagactcttggtatattcttgatatttctaactatctctcgatctctatttgcttattcgtcaaaagacttacaactctgtttcttgatctcccatggaggctatatgagacattggtgatggagaactagactctcaagtcatctattcttcaactatgacacaatctattaccaaacatttccgatcttaattacttaaaacacacacaaccaactttactcttgtcggttcttgtttgtagctcttaggttagagacactgatcatccaaggaataatcaagtgatgaacaacccttctttttattgtccatactatgaaaagattgacgcggttacatattcactcgataaaatatttaagcatacaacaatgcatctcatgagttaccatacgataatgtggaaagaaacatcacaatctctacttgttcttacttttttttcactctttaggtaacattcaacaagaacaccgtagagattcaagtggtgtcatcgaaaccgaggtagttctttttagaaaccgagttaatgaacttaacactgaaatcccagagtttctgtgccaaagtctcatctctagcaagtttgcttggagtgacttcgttgcaatcagcaaagtactttcctgttactcccttcacacttggatgcagagcaacataacatgttgttgctgctccctgacaacatcacaagaagcatcaaaatattgttcttagatttgtctttatttagtaacatagtcatagagtaagatcttgaatttggcttagtcttaggattctttctactagtatagtacctgaggtatatttttccacaagtagaagctgaagaacttcaagaaccctgccaaaaacggaattaaaaggaatgatttgaagagaaacagagaaactaagaaaatgatgtgaaatcttactcattaatagagcagtgtgttggaagagattggtgagaataagaccagggtgaactgaatttgctgttatgtttactccttcttcctaccaaacaatgtccccaaaaagattttgagtttttattttctcaagtgtttatgaatttgagatagtactaacactttgaaatatcatatatgtgtttgtgtgtgtcagtgtgtgtgaaggcgacctgaagctgacgggagagctcattagcatgcaatatattggctagtttcgattgtccgtaagctcgcttatccgagtaactgaaagaaagaaagaagatggttacaagatcaagatttatttagttttgaaacaagtaaaaaaactgtagaatttttacctgcaaatgtcattgatgctgtcgaattggattccttcttggtaagtataaatatgagctacagatgatacattcaaaattctttcttcaacaccactggttta

SEQ ID NO: 60640 - DNA, 739 bp, Arabidopsis thaliana landsberg
ccctcgcctttccatcgcctcgaacatctcttccgctacgatatgccgaccatgcttacaatgacaatcaataagcgtattccaagtcaccctatctggttcaataccttcgcttaacattctatcgaaagtcgtcatggcatgatcaagacaattaaacttcccaaaggtatcgatcaccacgttataaaactgtctatcgggcttaacaccgatactcttcatctctttaagaacttgaaatgtcttctgccattcacctctatcgcgaaaaccagctaagagtctactgaaaacaaaagaattaggctgtacatcaccagcttccatctctttcaacacaattctcgcactttcccatctacctgcattaacatacgcatcgataagcagactatacgtatgttcatcaggcgaaacacctcgcttctccatctcagaaaccattgactctgcgtctttcaaaggacccgtcttcacataccctttaagcaacgcattgtaagctctcgttctaggcttaatcccactctgtctcaactcctcaaacaaagcttcagcctccaaagtcctccctgaatccgccaacgcagagataatcaatacaaaagtagcggttttcgcactcaaacccgtcgcttgagccataccaagaagctgcatagccttagaaggatcaccagacttagcaaaacccataataatatcattaactaactgcacatcaagctcaagctta

SEQ ID NO: 60641 - DNA, 902 bp, Arabidopsis thaliana landsberg
aacacataaataattatcctctgagaagttggcgtgtgtgctcaaaaaggaaataaacaaaaattgcagaaattactgaactagagatagaatgaaacaataacaacaaccacaaacgaaacagctaaagaaaacgataattaaaaaaaaaaaaaagaaaaaaccagaaaagcttacgaacgccattggagaagagcccgaaatagaagaagaagactatgcttctcttgcaacaaccaccactggtttcatctcgatttcactctctctacttcctcactcaccaccaccaccaccaccaccaccggtttttccaaccaccaatctacgctttctctgcaacaacctctgcttctttaccttcaccatctccatcttcttcttcttcttacttctcctcatggaatggtttagatacaaatgaagaagaagaagacaatgaattctcctccgaggttcaccgtcgctacgacttctctccactcctaaaattcctctcaagattcggaccagtcgacttagttctagattcggaatcagaatcagaagcttcaccggaatcgcttaatcctgtagagttcgagctagtcgaatcatacagagcagtaccagcaccatactggcactcactgataaaatcgttaacctcatcaacatcatctcttggtttagcttacgctgtagtgtcatggctacaaaaacataacctctgtttctcctacgagcttctttactcgattctcatccacgcgcttggccgttcggagaagctttacgaggcgtttcttctctcccagaaacaaacgttaacaccattgacatacaatgccttgattggtgcttgtgctcggaacaacgatatcgaaaaagctcttaatttgatcgctaagatgcgtcaagac

SEQ ID NO: 60642 - DNA, 447 bp, Arabidopsis thaliana landsberg
aatggtcgggcattagggtgcccttcacatcgttctatatacctcactatcgaactactccctcaagtgaatttccatgagtgacatgctacgtcttgttaattccagtgaggtcaggattgaaggtcatgagacacttgattatcttgacaaccttagccacaaacacactaattacggaaccgtacacaaatcatactataagctaagccttcccactatcattagataaatagcatcaacctctatatacagaaagtatgcatataaactttacactaccccaataaatacctaaaatacgcacaagtttggaatattatactaattactaattagtgtgtcaattatagatcagataatgagaaaacttatgtaatatgcacgctgacattagaatacatgtaagtaacagaacgatagaactaaatcatgacagctatgttt

SEQ ID NO: 60643 - DNA, 1685 bp, Arabidopsis thaliana landsberg
tctgaggaggcatgtttcctgaatgctttcactgttacaatacaaatcaacagggaacacaaccatgagcatgttgatccagacattaaccgaagcaaagtgttagattattaagcagaacaattaacaaattatcacagccaagaccatatggtaagcacaaggattatttaaactcagacctcaattttaagcgattaatcaacacaatcaacatcgcaatgtttacaagttgtgaaaaaaacaagatcaaaacgagaaattataaaacgtggattctaagattgatcgcttcccaccgatgtgaatgagagtacataacctaaatcgatctacaggcgctgatagaagtctagcaaattttaacgaaattcattggaagatcaaattgagctaagacttcataaacaacagagaaaaatctcacatcgttacgaacctctggtattggagttatcttcttcctttgaactctccaaaactcagatctgctactgcttagagacgagagagacaaagcgaaagaggcgagtttgtgtccttattaccgattctacccctacttgttggaatgacattaataccccctacatactatcaggcagtagatgggccatcgtgtatatggtattgggccttcaatattgtttagttgtattattgggtatgttgaaaattgagaacaccaatttgacatttttaaactgaattctttatatcattgttcatatatataataactgaagaaacataactgttactaatataagagtcaaaattatatggtaaacaaagaaattaaacaaaagtataactttctaacgtatggatattttggtcatatttaaatactcacttggagtcaaacagtcaatactataatgtaatgtagaaagtcaccaaaagaataatacgatataatcttaaaatgttcgtgaatagccaagcattaacatatttaatgttaactttgtacaaccaaactaatacagatatttctatgacactagtataaaaatacttaaattcaagttttgtgtaagtgcatgtagtcaccttaattaactagatcgtatgaaaccaacatgtgttcgttaagtgctagtttacgtaccatgtagataaaggatcaggcacgcaaatagccaaatattatatgattattatctttatcaggaagacaggaaatactagatttgatagttataatttctcataaggacagacaaaacacgtacagtgttatctctgttcccattctactttgtagaccaaaatgatttccatctcactaaaccaccatagcgtgggggtacaaagaattttaaagaaactttttttgttggacaaagaatttaaaagaaactaaaaggtctatattatataccaagttacttgaaataaaactacatgcagagagtgtcttgaatattttcgttacaagaaaaaactcaacatctccaaaatacagtatatccttttttacaaaacaaaaaaatgtcaacatctacatcataacttcattattgttttccaggtagtacgtgatcatgttgtctacaaacaagtgataaataatttcccaatataacattctaacgttcatataatcatatttactttacacacgaatgtattcaacaatagctttcgcagttcacgtgcttagcaaacgttagcacgtg

SEQ ID NO: 60644 - DNA, 983 bp, Arabidopsis thaliana landsberg
gtgaagagtataactgtggtagtggaagagtataacaaagtttagtactaattaattgtcaataatagattagatcattttaatttactaagtagtttgtgttagggacatgggagtgttggcacgcgaggctgagtattagcaatgcatgctcgagtgcttatgttggggacccatccatgcatgccatccttaatttattcccaccaattatcattacctatcccttgattatgcatggtatatttttcaatatttaaaacctatacaggataagaacagaaataatgtaatttgaatacgtacagagttatatgctagtatttacaaatggtattggtatgtatattgttttctgcttcatagttacaaccatttggacatgggcatgttaaaaatttaatatgtggcaaacataaatttgatacttgtcgtcatggcttgtaaataatatgcaatgtaaaccttcaaaaattgagattcagcatctataatatatgttgcataacttgtgaggttcaagatcctaatcatattattaaaaaatccatattcttccttccacatttccaccattagtggattcttaagagagaagaaaaaattaaacaaccttaaacttgttagttaagcattgagcaccaaaatcgattatacattataatcctagtttacttttgcgtaaatgtcaaaacaaactcattgcgatatatttatcgtggatagcacaatttttcacgtatatgataattttttattgtgcatgcatatatacgccatactatgaatacaagatcggttgtgaatcatatggtgaggtcaagctggttgtgtgattttgcattattgcattgttggatcatatggtcaaactggttgtgtaatttttatgaatcattgtgatatctacaaacatacacacatttgattttgtgagctttaaatgtccgtagatatgcatatctattaactgaactactgat

SEQ ID NO: 60645 - DNA, 761 bp, Arabidopsis thaliana landsberg
aagaaataagtaccgttcactcataaccggatacgtggaagctgttattcactagatatggtatattggtattactattaaccttttgaagtcaagtggagatttaactgcaataaattttggtcataccagatacaatgctagataataaaagcttgacatggttttctaaatgttaatggttttgagagcgcgtacatatgtagattgatgattgatgaatggaagcttgacatgctttggtcaaagaaagaactgcaactaataatttgatattggctattatattaaggtgtttagaccaactatactacttataggtttatgaagtcaaatgtttttgacttttcagtaagatatacatgtacatgtcaatcttacgtatagatgtgtattgcgacacaaaacaatatatttaagattgggtttgatcacatcttggaccgggcaccttcaaaacaatttatgtttgtttgtattgtattttcaacttttttaaaaaaaaatagttcaaaaaaacttgggaaccccgggaaaacatgtacacacgggttcgtggtaagattttttagaaattacctaaacataatagtttgaatggtttctatatgttaaatgtatttcagtatgaacccaagtgataaggcgcaatggtaagttgggatacattatgtagacacttcagtgtgtacgttggatttcttacgtactaaaatctttagtataaagattttatttcgtagacttactggttttcaaag

SEQ ID NO: 60646 - DNA, 792 bp, Arabidopsis thaliana landsberg
aaaccgctttcaaatttctaaaaccaaaaagcaagcaaaaaccaaatttcaatttggcaagaggaatttaccaaatagtcccaaattctcaatgcgaaatctgaaaagtgaaattcgagataaaaccaaaattttcttacgatgatctgctactgctccagacgccattgctatctgcaacaattcagagtcaaaatctctgaccagtcgaaagcagtgacggaaataagtagaaaaaaacacagcggcaaaattccagcttatcccaaaacgacaataaagggtaccgttttttaatcaggcccattatcatcagtcttttgcctaacgggcctttgttttttcgtcaacggatccaaaccagatttatttgaatgacaaagtttcttgaggagagtgcatggttgacctttttctaccgaattgtttgaactcatgtgaaaactaaacttgttttctctctctctgcatgatgtactaatatatagtatatgttatctaattcgtttttagtttttgggcaactatatggttatctaattctcaaactcaaattagctcgtttaactagtatcttggatttgcgtttatacaattatacgtcttgtttgatagtaccattttttcagtttagtctctagtttgcagtttggcacattaaagttcgaacacaaactacacttgatgacctatttttcaattaggtcaatcaactctggtcaaatactccacagttttctaaataaatcttctaaaaaaactattaacaatatcaggttcttatctcaattt

SEQ ID NO: 60647 - DNA, 1589 bp, Arabidopsis thaliana landsberg
atgctcagaaaagttgagtatctcaaaaaggctaacattgaagaattctacctaccacttatccatccttctcataggtcaagtttttcacattcaacatttcatcaaatggcataaactcgataaccggacttattggcttgtcgcgtgtcaactcaaaaaatccaaatctcatcatcattcaatcccctcatgataacacaattacctgtcaaaaccaagaacgatttgcaaaaactcttgaacatcaaatatcgttctgctacattcaaacagaaaacatgaagaaggattaataaacatactttcacaggattgtatccaagctcaatagcagtatcaatcgatttcataaccctatcatgccctttacgtctagtcagaaactcaaactttgctggaaccagagtatccaagctgatattcagcgaatcaagtccgcattccttaagccttggtagttttttcgcaagagtgataccgttggtagtaatagccaaattcttcaacccttttaaactagacaactgcagacaaatctcttcgatatctttcctaaccgtaggctcgccaccagtcaaccgaatcttgttaacaccagcagaaacaaaaagaccagccaacctaacaatctcagactgtgacaacaactgaggcttaggagtaagttccacaccttcagacggcatacaatactgacaccggagattacaccgctcagtcaaagatatcctcaagtaggtatgtaagcgaccaaatttatcaatcaacatgtcagagacaggattgtcttttatctgatcaacttgatgagctgcataactactgctaaataaacgctcactagtagtagtagtaatggttctcgttactgaacctgaaccaacttcagaaccaacctgtttaagaattccaaataagcattgattctctaaataaaagaacacaaaatgaattcattcagctcttaaatccctaacctttacactatataagcaaatactagtagctacaggaataaatcaattcgaaaaagcaaccaacttgagtgggagaaatcgaaacccattgtagcagagaagtgagaattagtaaagttgggaaatttaccaataagaagttggaattcttgaaacccaagtggcaatcagtaattttggagaagcacctcctcatcgttaacaacactgtagagaagatcgaaagagaatttctgagaaaggaggaggaagtcagaaaatataatcaaaagtgagagaaggaggaagaaaagagatgacctttggtaaacggagagagtctttgttcaaaataaacgactacgttgagaaaatggagacggcactctcaagtagagagagagagagagagactagagagactagagagagtttggctaaaagcctaaacaacaaaaaaaaaaacatgagactctttcgtcttttatgatgatatctgtcggtctcgccggttaccggttataggcaatcaaaccgacctcaaatggtaaatataactggtccgagtgaaattcagattgcatctggatcggatatgtcattagaataataatttattaactgtgctta

SEQ ID NO: 60648 - DNA, 516 bp, Arabidopsis thaliana landsberg
cgttctggacattcttaacctcgattacagttccattttcctcatcattcgtcgacatttcaaatgaaagcacagacgaaagatcggatttttacactcagtgactcattagctttcgacttgaaactcaaaattgcttcaaattagagccgattctggaagtattcaagctctgcgagcacacatgaatgtaaaaattaggggttctacatgaaaacgatgaaatcgatcgcaacaattagatcctgggtgattacgattagatctcataaatctagctaaagttcctacaagactacaagagggtggttcatcaatcgctgaaacaattatctaagaggagaatgaaagaagcttacctcttaggagattgcgagagatagaagaaacgcgtcgcggaagaagaacagagagcgaagcttcttctttagaagttaaatccaccgtgaagctgtattatttagggttaaactgtttaagagtgttcacttacttgtatatataagagaatattat

SEQ ID NO: 60649 - DNA, 429 bp, Arabidopsis thaliana landsberg
tgacatgattcccatggacacggcgggtgcggccgactttgctggataggatagccgctcgcgatactttattacgggcagctcgtcagcctgcgcacgcgaggctacaggggaaggggtcaacgccgtctggtgcgcccgaacttctggcaccaacccggatgacggcatgtcaggcacaccccccgaagtctctgatcttgggggcaagcgctgcggtgctacaggccgccgcagagacaattgaggcggacattaacgctagcggaaagccggccagctctgcgggtgtcttcatgcatagctaccgggctggtctatacttacacgttcctgaccctggcatggggtacaggacgacggaaatattttacggaagggcccaaacccagccacgacagcttgaaaaatgtgccgctagccgtatct

SEQ ID NO: 60650 - DNA, 2104 bp, Arabidopsis thaliana landsberg
  unsure (1)..(2104): unsure at all n locations
cttttatcattttgtatgcaaaatgaaggcttaccttggtaaaagctggtgtgtgttttaacttcttatcggctgcaccaaaacgaagcagattaattggctaagggcattgtgtgaaatgtaaagtgggtgaaagaaacagttgaataaaaaatcatacgaagctagaagagcttttctgttgtataagcaaaagggcttctctaatttttcactagagtgttggttccaacaaatttgtccacggttcttgtctacaatggaccacgtgttggcttttggttctttgcagctagtgagaccaaaagcttgcttagttgaaatgttcttgcccgttggatgatgaggatagcctttgtgcttattcctagaaactcttgtcgcggtgatgtaaggaaactgtaaataacgaaacagacagagtttgatgacagaagtttggagtttcaaaataaggatataagtttgaacttgaagattaaagtgttatgattccacacacctccttgttgttagagctataagagtttatttccagcagtgtaggatttgtgatcagattataagtagtggcatcgagatttctcacatcacctccaaacatgagaggggactttgcgatggaccacaatgtcatctgagtaagcaatataaaaagcataagaaatttgaacttgtggttgagaaggtactaataaactaggatccttgaagctagatgaggtccaaagcttgtggtatacctgagacttttgttcttcaagatttagattacacgctcgatgagggccaacatttgaacctttaccaaacattataaaaagacaaaccttcatttgtaaccatatatagaattgaaatttcaaaattttaagtcaaaccttgatcagtaagccatccaagaggtaacatatctagatcaggccatgattttccttgtaaccctcgtgcaccgatcatactagaagcagataaatctctggaagaacgaaaattatatgacatcaaagaaaggtaaaaacttggcaagagtatttttcagcttgaaacctgacctcgagatatcaaaatgtgccgtgacatctttccatgtgtcccaatcatcacccgttattctatacatgttaactaactggctaacttctttagccattgcaggtgtcacactcgtccctggagatatggagtacaaaacaggccgatcaagctcctttagaacctgcgaaaaataagaacaatgtttcatctctatgtacctctgactttaaccagaagattggtagttatcacaaatatgtacctctgacacaaaagttatctcctctatattgaagtcagtgccaaatacgcagtcatgttttactaaagaccaagaaagtgagacaagattgagataatcatataccgaataaagataaagaaggttacggaaatgaagtcgattctcttactgaaatcaacgccccattccgcatattgtcgataaagagacctcaagaaagcttttcctgcacctagcttgatattcacactcatgaacccatgtgacatccaaacacatgccttctccttgatcccaatatctttcgctcgccaatgtctacccgattcttcataagcacctcccttcaaccattaaaagattcacttgttgataacttcgaaacaaacttcataaacacagaaagaatcaatcaactcaataccttaacactatccataacgagactatttgcgttataagcttgtgcacttattcctcccataacatgaatcccaaacttcaaacccattctatgaactttctcagcaacttcagtgaaacctttaccgcctctagaagatggccatctacctggatcaggatgcaatcttccccattcatcaatcacatcaaacccaagagaatccacataagctccttcaactttctttctataccaaagataatccaccacaacatactgtatccaaatcaacacacacaaacacangcaattaanaacctaaacttttacattctaaaaaaactcacttaccactagggcttagtgtttatgcaattacctgataacctgaggaagaaagacgctagaaacattta

SEQ ID NO: 60651 - DNA, 514 bp, Arabidopsis thaliana landsberg
tcgaagtcgacgcgggccagaccctcactgtttcaggcggcagttccaccttcaatggcatcattaccggtggaggcggactgacacgcactgtggcgggatccacggcaggtaccctcatcacttcggacaagaacacctattccggtgtgacgacgatcggctccaccggcaccgcgaccgcaaactccacgctgcagatttatcacgtggccaatggcggttccgccagcggcctcggttcctcctcgaatgccggcgccaaccttgtgttcaccagcacgacggctggtaccaacggtggcgttctcacctgggctggctacaccaaccagagcaccgatcggttgttcaccttcggcaccggcgccaacgccgcgcgcatcaatgcttccgggggtttgatcggcaccaccgccccggcgctcgtcttcagcaataccggcgcgcttgcgatgagcggctccagcacgcgcacccttacgctcggtggcggcacgatcgcggaaaccag

SEQ ID NO: 60652 - DNA, 329 bp, Arabidopsis thaliana landsberg
ccccacacgtgtgtcgaactaccagctttaagctttgacaatcaatatatgggtttggggttatactattctactttttcttacttctttctactttaattgatggctttaggttagctatttggaattattctagttaccatttggttgcttgcaagaacaacatcaatgatcaaaatcatgtcattctatcgcaatattgccattaccgcccggataaaatggaggaaatgaatcactccatcctcgcttgatggaactcagtcaatcaaaacctttgtatgcttcccggttcggcagcccgatatgtaaggacttgaatgatcatc

SEQ ID NO: 60653 - DNA, 640 bp, Arabidopsis thaliana landsberg
  unsure (1)..(640): unsure at all n locations
caatacttttgacgctaggcctagtagaccaattgggcttttttacttttaacaaaaccaccaaccaatctcaaaaaaaaagttaactcaaacacaacgacacatcgtaccttgagtactatgcattatattagattgtgtctgagcacatttgtcgcatacctcagaagctgatgagatctggcgaagcaacaacactcttctttgtttttatttcctcttgttaaatcagctcatatgtgtctttctctctattatatttgtagaaatgcttcatgaatcatgatgacacctacaagacgtgatgcttgattattctataatgaatttgtgtaaaattttcgctacaaaacaaaacaataacaaacaaaatgtagttagatcgacagatccaatttactccacgccgccacattgtttattcaggcatgtactctattttatattcgagaaacaaccataaaataatctgtcaaaagattccaaaactctatttgaaaatgtattttacagagacataaatataaaattaaatacaaacaatataagcaaaagcaagagtggaccaagccatacttcagagtgagataatgaccnacactgtagttaaggaagatgggncatatggtaatttcaagat

SEQ ID NO: 60654 - DNA, 495 bp, Arabidopsis thaliana landsberg
tctctctataattcagacacagtactcaactttaaagacactcttttatgactttccatcaggaccaagctgagaaagagaaagcaatacagaaagaaagacaaggaaataaagcttcaataccaaacccttctttaataaatattgccttttggttgtctcctctttatcaatcactttggttccatacttttaaattcagttcttcacgatatctagatatgtctttgacaatggctgatggtgtagaagctgcaacaggaagaagtaaaagacaaaacagcttattaagaaaacaacttgctttagctgtaagaagtgttcaatggagctacgcaatcttctggtcgtcttcacttactcaactctggtaagtataatctaatattcatcatgtaccaaaattatcagatctttgttgttctcatctttgcatttccattttctcttcttttaaatcttgggttacttatgagtactatgttctactaattt

SEQ ID NO: 60655 - DNA, 615 bp, Arabidopsis thaliana landsberg
tttgtgtagatggtgaatgcatatcaacaatacgggtgaaaaatttcttttataaaatactttattatgaaataaaatattagacataaactacacatactaaaaacaattatattaaatttgcaattttggtttaacatattattgaacatgtatttagttttataaatactatatatatatatatatatatatattaaattaaaaataatgacatgtttaaattttcctagataataacaaagataaattttacattgagcattcactaattcatgtaagttgttctagaataatagtatgtcttaaaataaaactgtcttagtttaaaatattattaagtcaaataattttcataatttatcgataagtaaaaataaaatatgatctactttggaacacacactataacttatagtttattcacgaaattatcctacatatactataacgatttaagaatattattttattatttacaagtggaagaaccactttttctatatatatgcgaatgatacgatattacgtcatattgaagatctgcatttgtagtgtcctccattcaaagctatagatatactccatgttttaatctggtaaggaataatttta

SEQ ID NO: 60656 - DNA, 1592 bp, Arabidopsis thaliana landsberg
taaaaacacgacccaataaataaaaaactttaggtacttttctgtcgtttctttggtttttattgtctattcgtgttatatttgttttatgcttgatttattattgttgaatttaattctagttcgagttcagttacatgatttctctctttaatctctagtattttaatccatcaaaattatgtggttgcatactccatcgagtttagtacaattactaacatatatagctttgtttagtcatatcaagactatagtaagttgttacgcatgaaagataattattacattcaaacgaatgaccactcaattcttatatcaaaaagatacaaaaaactaaagtctacaacttataggttcaatgggagcataaatagtccatatcattgaataataatggtcttcaatagagttggttgttcaattattatttttggtttataagaaatgaattgaacttttgcttgtcaccattcacattttcttctcttttttgtacttttagttttcctaaaaactagaaaaactatgttcccttcgtacctaaaacttactttaaaataaccaatttgatgatagtttttaaaaaaaaacttcaacaaagattatatatttcatcctgaaacaaaaattacagcaaaatttaaatttaaactagtagcaaaaaatataggatgtgcatatgttttctgtttgccacgtctgttttccattaaatgtacgcacaacattgtttgagttcaattaactatttaagtaataaacaaaaacaatgcttgaatttcactgaatatagtatataagtaaaaatgtatacaccccaaacgacgtcgaacccatcgttcaaaagatattgaagtacttgaactagttgttgagctaatcatcatattactttataatttaactacacaagacgagttctttgaaagatgcgaatatattatatacacttatacgttatggagagaacagaaagctcataaaagcaatttatttctctccctttaagatcttttcttgctttgtgtccgaaacagacaaaaattgattctgttgttttttcccataattaactcacacacacacacttaacgtacgtgcaatatctgtatgtgtgcatagtatatactatagccacacgagcggttcaaaaatgttttttggagtttccgagactgttgagactgtggggcctatggtcatcgaaccctcccacacgcacgagcgggtctcgttttgcatgcatctacactacacgtacccaccgacttttccaaatcccttacttttgcacgtgtagagagagagagctttgtactaaaagtatctcattattcgaaatttttcgtgtaagagtaaaaactaaatcgcaacgtacgtgaaggaaaacgtgaaccttgaatatttaatgttttcgtgcggtttcattttaactatttaattaacacaatattagtacaataacaagcagctcttatgaagatagtgatgaaaaattgttatagatctatcttggaattttaatgatcgaatttcgattttgtacgaccaccatcgaggcatcgactataaatatagttaaaatgtgg

SEQ ID NO: 60657 - DNA, 336 bp, Arabidopsis thaliana landsberg
agtgacattcccggagcaatcaagaacaaggatggtattgatattccggccttgctcaagcatactaaagaacacaggggtgtcaaagggtttgatggtgcagatccgatcgatccaaactccatactggttgaggattgtgatatcctcgtccctgcagcacttggtggtgtcatcaacaggttagagcttttttttgctacaaaagcttacatattgttttgaaactttttaaaaactattagttggattttggtttgaagggagaatgcgaatgagattaaagcaaagttcatcatagaagcagctaatcatccaactgatccggacgcggat

SEQ ID NO: 60658 - DNA, 475 bp, Arabidopsis thaliana landsberg
ggagaccgggtaaaaggtcacgatcggggccgaatcggcgaccgaacgacccgactgggcggccggcggaaagatcggccgttccgccgaacttcccaaccacgctctagattcgacgagcccatcaccgacccaatcggaagcgaggagggatagggaacttactactcgggattcatggcgttggacgcggacgggatgggggtcggggtcgggaccggcagggacgaggcggctcctgctctctgggggaagcgacgaccgaggaggtggggaaggaattgggagaactagcggagggagcacgggacggcgcagagagagatgggaaatgaaaagagaggaaaggaggaataggggaagactgggttgtcgagtggggcacgtctccgtagcgtctgcgtgcgccgtcggccatcctacctttgcctgccagcccggtccagccggccaggacagcaacgccacgaaccac

SEQ ID NO: 60659 - DNA, 2350 bp, Arabidopsis thaliana landsberg
tttattttaatcgttggggatcaactagactaatagagtgtaaataaatggttacaatggggttttttttgggggtccaaatggagagtatgatctataatatcacctaaaaactgatgaccctccttttgaagatgatgttccttcttgcaaaaccatgttagatttacgcaaagaaccaaacctaaattggattctaaaccaactcacgtaacgattctagctagttcaatacgcataaacctcagatggtcaacgactcgagatcacttgatttcgcatcaccaaatgcagtagttgataaatcatctcccttttttttttttttttttaaaaaaatcatctccctttaacttttatattgtgaaactaacaacgataataagagaggtccccagctatacgagcatataacccgcatgcaattccaaattatcaaattattggggaaaacaaataattacattactaaattaccatttctttagcgatttttaataaatttggagacagacaaagtgatactaaaatatgtttaggtgagaggtttctccacgcgtaacatataactaccgcgcaaggacttttgaggcccacacgacttcacacgtgcgaagcaaaagacacgtgtccctacaaagatttcttacgatttcgatgttgtgtgtattttgtcacactgttcccattcttttcatttttcttttcattttgttttcattttcttttacattagctaattagctctttatattaattaacctgccataaagaatactcacaagcttaggcaaagcagtgtatatacaatcaatttttggaaccagatttgtaacattagataccttgaattaccatgcatgtgaataaacgctttaattatcagcatatctaactttacggtaagcgaatattattgtgtaaagccgttaaaatgcatttggacagttgaaagtagcggtataagggtatgtcatgcgtttgaaacggcccaaacgcaataaatatctattttggtataacaatgggtccacgggtttatttgagcatgtcccttagagtttaaggcttgatcttccagctttctccatccacgatctgcggggaactcattcctagaaatctctcatttctcattgttatatttgtcaatctctttagagtaatatgtattgttttcgactaaaatataagctagtgcaacaagctatataaattatgcctatataatcacataacttgtataaaatggctgggttattatttaatgactttatcattctaaaaatctgtgatagtgtcctactgcggcagaccgattttatacctaattttgtccatattgtagaatatgtacgccttttaaagaaagaaagagagatacatataatcacatgtttccgtaaagtatatgtcaaaataataatatcaaaaagaggttgtgattgccgcaattgaagcatggactactacgtatcgtaccatattcaaatgtcactcagttgagaaatactttagtttttatgattgcattcttaaaaaaacatatataagtactagttgcgactgagcgtatatcaaggtagattagtaccagtactacgtgaactatgagtcaatcacggaataaacataagtctctatctttctcgttccttacctttttctattttttattttttacagtttttctaattatcgttagttgtttcatgacacttgcataattttggaaaattcagaaggcttttaatgatagaaaacattcgttgcattctaataaatgttttgattttcatttatacatatatcaatatataattaattagttatacatgcatctatttcgttatgatgttgttcgaatcgcacaattagaaaggttactctaactttaaaacgtttacctttggtctttgacaagaatcgatttcttctaatgaaaaaacaagaagataagagaatgagagaccgtggtttacatcttaacggaggctacctgatcgcaggttgttttggtcaattgagtttgaggttacaaaacaatgggaactcacaatctatttcacacctataaatggaagctctcgagtctcgacctatcgattttgaagttttacccataatcatagtttacaattacatagtacagaaaaggactaacctatacccgtagtcgttaacaagctaacagtcacactcgtttaagaattcattaacttttgtttgagagatccttcagcttaatcggaagctttcttatatctatagtacgattcccaattcacatggatccctttgtttacttgaacaagaatttatcaaaacccattctaactacttatcaaac

SEQ ID NO: 60660 - DNA, 514 bp, Arabidopsis thaliana landsberg
ttttaggggagttcggctgtctgtgttggaacaatgcccgacaacaaataagatcaagatttgggtgactaagaacaagattagtggagataggaaggagcttgtgtcgtggagactgttaatgacagtgtcgataccaaacttcccgagattacaagatctttactctaattctcagccgagttacttcatggataacaatgatgacaagaggctcatcgtgtgtacttgtgatgaaagtggtaagccttgcatatacattgtgaagggggataggttcaagaagattcaaatgggttttgaggttgagccttggccttttcaccttgtttatgttcctagtttggttcacattcctttagcctaagagcaacaagaatgacaagtttattttttattgacttattgttcgcgtttattgcaaaccaaactgaataagatttcatttgttttatggatcatagattaagaaaacaaaatatatttttcttaatggtttgattagcgaaacctt

SEQ ID NO: 60661 - DNA, 519 bp, Arabidopsis thaliana landsberg
tgcttttttgtttgggctgaacataactttattgataaagagtatgaccggcctatgtatgaggctgctacttatcgacagcaacatgacttgagtgaaagtgaaagtgatgctatcggagttgttgttgttgttcaggactaggactggtatatctttgataaatggttggccagcaggccatgcttgcacttgcatcaaagcttgaataacatctttggtatcctgactcataaattacatgtttaaagcccatgtttaggataaaaacttacatcaaattaaacacttgaaacatataatttggaataagatctaacgaaaacttattggttataaaacaatcaaaggttattagttatctaattactttaaacactgcgtcaaatcctctaatcttgttggacaaacgcaacggtaaaaacaacgtcaaacaaaacggtaaaaaaatattgaaaaaagtaatgacgagtcatatgaggtcaaagaagccattcagtttttaaaaaaccgctacac

SEQ ID NO: 60662 - DNA, 1267 bp, Arabidopsis thaliana landsberg
cagcttaaaaacaaatttaatcgcttttacttgtgtttggtaatgatgcagtttgacgacgctatgttgttgctggttcgtggaacagtgctgctttcgaagtcgttattaattctattatgtgatgagaccatttactctcgatgatctacttttgatccgcgtttatgttgtattaggcaaattagaatacttgttttgttcatgaaacaaggacttctaataataaaaacaaacaaaattacgttttgagaaatgtcatgagacggtaaacactagatttttatttttacatccttcttttaaaaatcttgaaaacttaaagaacaatacatattgatatttctacacattctacaaacaatgtttgtagtatttccttttctcgccgtgaatcaaatatagccattttgggacattgttcaccaatgtttacttacaagctcagaaaatggtaaacgcattagaattcttcagggagaggacgaccacccaagaatgctttaaacaacacaagcgctctcgcgggctgcgagaatggtacctcgtgggctgctcctctcacagtggcaaacgccaatgtgttcccataaacttgagtccacccaccaacctgtaacaccaaacctttattaccacgtctcttaaatattcaaaaatctgtatccgaaccgaaacatatcaacagtagattcgaaaaacatcaatcaccaagaattgagcacccttaaattttagagtcatgatgctcacctgttgtcctgcgaaccaaactcgataaggcacggttgttcttagtcccaactcttcagccagtcgcttcactaatgttctacttccggttaacggaatcacagagtcttgatctccactgttatgttttaaacagacacgtcaagcctagtttaacagaagttcacaactctgttatgaacattgctttacctgtacacaagaactggaacaccagctttaacaagacttcctacgatatttatcgttggtacttccacatcaagtacttcgtaatccagcacactgtcatcacaataaaacgaaacaaatttagtaactagacccaaataggcaatttcggttaaatgtttacgaaagaaaatgatattactcgctgcaaacagtccatttgcgagttccgacaagccgagcgtggagagctttttgcacatctctccggttaagatagttcaccgtttcatcttctagacacacatccaccgtcttttccacttgctacatcattccaaga

SEQ ID NO: 60663 - DNA, 275 bp, Arabidopsis thaliana landsberg
gaattaaataacattaggggaaaagggtaagtgtcgcatgtgaaaccagccacttctttagccaattgaaaccatctctttgacccaactcttttttaggatactgacgttatttgcaattatcgacattgaactctctctacacatctttttttttttttttttttcaatcgactttctttacacatctaaatagtccttttgagaaaccaaatattcacgtgaatgagcagttaaatccgtgtttttggcaattaataatcaagggatattta

SEQ ID NO: 60664 - DNA, 491 bp, Arabidopsis thaliana landsberg
  unsure (1)..(491): unsure at all n locations
tttattcagatccccctcaaggtccaggtcgtcctggagctgaaagtctagaaaccgggagcataagtcgttgagatcttcccatgtaactgacgaggcctgctcatgacaccagtgcacgagcacttggcgaactcctcgcgccaggcgagtgcgctcgacccggaggggttctagaaccaccacgccatggactgtgggcaggtcaggcggcgtggcgggcgaagcccgacgaacttcttgagtacgccaatatggaacacatcatgaagacgcgcgccgggcagcagttccaggcgaacagcgacatcgttgatcaatttagtgacacggcatggcccgacgaagaggggcttgagcttacccgtggccaaacgtggaagggagatggacgcgcgctgacagaggcgcatgaacgcccagtcgccgacctggtacgacaccggccgatgttgtcggtcgtagnnnnnnnnnnnnnnnnnnnnnnnnnt

SEQ ID NO: 60665 - DNA, 1224 bp, Arabidopsis thaliana landsberg
catacttcccctacagaaaagaaaagataattcaattgttgctttatttcttttctttttggtcgacaatgttgcgctgtcaaagttaatgatttcccacttaatatcttgtaaccatgcattcatgaaaaatacagtaagatagctcatgacagaaatagacctacctcacgaccagaaaatggagaggtgtttacagagaaggacattttcacagttggctcttctactttgattgtaggtagaggcttcccatgtactttatcagcaatagtctccccaatctgcaaatttagggtaaacaaggaaatctattgttacaactcaattagcaacaaaaagaaaaatgataagtggcagaaattatccaccagagttacaacagtctctcacatttggcatcaaattatctattggcatatacgtgtgtacctgaatgttgactatgccacatacagcgcaaatctttccagcttccactgaatcagtaggtactctgtagaatttttcatatacaaaaagctcactaactcttgcaaatctacaggaatcttcagaagtgcacacctgtaaagttataccacagtaagtctactataaaccatataagtactgcaagaagttggtgagtttgtataatattctcgctgattcttaaggttttggtaccatcccccattcaattacgtcttggacgtatttcatcacaaaatttaatgaattagaaacctaggaaacttaatagaaactttgtccgagaatatcttgtcctgcttaccatttagctatcttttacacgctatattggcagaggccacctgctctacaaggtgtaaagacttgagagattgactagcttaaggtgatattttttctatgatcccacattatttctgtcccataacaaagcaataagttcaagataatcaaaatgttaccctgacatccattcctttgcgcagtacccctgcgtgtagtcgtccaatagcaatgcgtcctttatgctcatcatactcaatatttgtggcctgaacaaaaagaaaaagtatattagtttcatacaagtgaatatccattcaactagactgtctggtatattgaaatttctttcacattttggtttgaggaatatcccaatttattaattatggccatatatgcaaggacgcaaagtcttcgtgatctttagtttggaatagatgaaacaaattcatcaatttgact

SEQ ID NO: 60666 - DNA, 543 bp, Arabidopsis thaliana landsberg
taaccattagtagagggaagtaaagggcttacacatctgaagagaaaaacttcacactaaagctagagccagcaacattggcaatcaagtttgcatgagttaatacgactccctttaacatatttcatccagaagaagagcaggcaagggaggaatgagggatacaggataaaataaacagtaagttagatgctatagtcagggtaaatatgaaataaagaacagtactaccctaaatgaagataacatttcaagtaagtaaaaccttgggtgtcccagttgttccgcttgtatagcatatggttgcaacatcatcgggttttggtggaaaaaatcgctgagggttactacgaccctgaaacaaatttgttggtcagaaaacaatgaaaccaacatgtaccaccacaactgtgctgctatcagcgagaaagatactgggtgactatattatctcaatgagaaaactattatggatatatgggaaaaggtgagaagtagtcctgatataaaaaaaaacattgagttataagtaaaagcgtaatg

SEQ ID NO: 60667 - DNA, 520 bp, Arabidopsis thaliana landsberg
gctgtcgcataggcagctcaggaacaagacgcgcgcggcgctgctcgccgacgccagatcgctgcttcatttgcagctcagaaaagctgcgcgacctgaagaagtgggctggaggcgttcgctgccgcataggcggctcagacagacgaaacctgtgtttcgcgcaacactgaattgtccgctgccgcataggcaggtcagaaaacatagggccaaatcattggcagcatgtggatgttcgctgccgcataggcagttcagaaaatggatgccggcgcgctgcggatgcgctgctagttcgctgccgcataggcagctcagaaagcctgcacaaactccaatgaaccgggacaagcgatcgctgccgcataggcagctcagaaaataacaagcccgcgcgcggacgccagcagctcggtcgctgccgcataggcagctcagaaaaaaccggagttaggtttgttcacataaggccagttcgctgacggataggcagctcagaaattcccgaacgcttgca

SEQ ID NO: 60668 - DNA, 1419 bp, Arabidopsis thaliana landsberg
ttttgactattttagaaatgaaaagcagattatttttaaaatttgatataaaatgaagaatattttgattttgaaaccaaaaagagaagcaaaacatggaaagcctcaaagtgtgtgttgagaaaaagggaaacgaatgtttgaaattctggaatgctccaaatgcaaatggacaaaacaataatggtaacgagagtgatcaatccaaattggggaagtcttgtaagttgtaacagctcatgctgctacttcgttttaatcatctatcttaattatttagtcttcgcataagtctaaatttgggaaaacaagtaggaaaataaataactagatttagaaactcaaattcctttgataattctttttctttctatgtgtgattggatttttggactttgtggtcgcaatgcaaatgttatgatacattacggtcaaatgtatgtgtaaccactaagccaaggaggatgatgggcaagtggtctctggcgtgagggttcgacccatattctttactatgatgaaaaaggctcacgccatattctctcgatcaacataacaatatcattgaattataactattattgtcaactggatttgtagaatttgcggggcaatgtaaatatgatgttgcattacggtgaaatgtatatatgtctaaccaaaagaaaaacctctgaaagtcattagctaattcttttcttctctatatatgtagttggatttgtggaacttatggccacaatgcaaatgtgatgttacattatggtgaaatgtatgtgttgaccaatatacaaaaatgccacacaaaaaaatacatttaactgtgaaagtccctttatcattcttgtttttttctatatgtaactggatctataggtcgcaatgcaaataggatgatgatacattacggtgaaatgtatgtgtagccaatacagaagagtggattcatatgttctcaatgagcttaacaaaattatggattacaagcaattctggtttcgtacattgcaatattttcttatgaccatttcaaaataaagttaccatggttttgttttctagatatgaacaaaataaagaccaataattttgtgggtccaatgaaaatgcaatcatgaatcacctatgttcccttcctataaaaaccctatcttccttctctcttcctcatcacttccaaaatccaaatgagactttattagcttttgatcaatctcattaatccaaattaaatagttaaactagaagatgaacagcaaaagggcatcacaatatcaccaagtagaaatccctccaccacaacctttcttgaaatcactaaagaacacttttaatgagatccttttcgccgacgatccgttccgtagaatcaggaacgaatcgaaaacgtcgaaaaagatcgagttagggttgagacac

SEQ ID NO: 60669 - DNA, 1083 bp, Arabidopsis thaliana landsberg
gaaccttgccaagaaacctgagcctacacacacaaccatcaaacagctcaatcattggcttttgtcaagaaacaaaaaagagtctgagcatattaatggaagatgagtaaatccgaaactggtacccatttaattgacgatgtgcttgagaagcaaaagcttcattcttgaaatccacaaaagcagcgtttctcaatctgtgacaagtaggattatatgtcaagttagagcaattccacattctctagagtaaacaaaaagtctttccaccttgtaacctaaatattccattcaaaagcctggtgaacaaaaactgtctataaccttttcagtcttctacagaaatctagaaccttcttactaatatgaatctccaagtaaatagaaaggaaaaggttgctggaaatttactttccaccggagcaaggacgaacagcagaagctccgtactgagaaaagagccgagagacgatatcatgaggaattccatcaggaagatgccgaactagaagagttaccccgaacggctctgtaacctgagattcaaattgcgtcgccgggagattcacggccggctccgatgtcgcatgtgcagccattattagagctcgaaaacccaaactcagaacgatgacatgttcttttcaataaaattgatttgggagattaaaccggactagactttggggtaagttaccgaaccagaaaaaccaagagagaagattgaatcaaaccggggagacgttttgttttaaagtgtatgggcttttccacacatgtggcccattaaaatgttttttttttggttaacagacctatctctttagctttggcaaatggcaacaatcatttaaatcttcagtaatatattttgttactttaattgataaataaatttaacattacaaaaaaaaaaaaatcaatagatagatgttaatgtaacatgaggaaataaattaattttgaaaaagaagaagaataaactgggagatggacaatgcaatccaataagaagatagagttgatagtgaagtgaacatgactataacaggttacttgactaaatatactttctttcatccg

SEQ ID NO: 60670 - DNA, 535 bp, Arabidopsis thaliana landsberg
gattttttttggcttcgggggaaaaacaaacatacatgttgttatatgatactaccttctcctgatttttcattctgacatgcatttttgcatagctattaccttcttaaattgtcttccttggccgtagggtgttagcaaaggtcttgtagctgagaagatactcacgttgatgatggagaaatggcggcaagcagattttgtattatgcatcggtgatgacaggtcagatgaggacatgtttgaaaatattgatgatatcatgaaaagaaacattgttgttctgaagacaccgctatttgcatgtacagtggggcaaaaaccgagcaaagctaggttctacctcgatgatgcatttggagtagtcaatatactaagcttgctagcagatgcttcggaacctgcccatgtaatagaattggaagatgacctggctacatctgactcatgcatatatattagtgatgaacccgcacagcttggtattagagaggatgaaggatcttaggcttgaacctcctataaattacattgc

SEQ ID NO: 60671 - DNA, 395 bp, Arabidopsis thaliana landsberg
taataactcgttttctaataattaatttctttctatacgagagtggatttcatctggcttgaaaccgaatttcttaattaagaccactaattgagaattcgttatacatcaattttaatatctactcaccaatatattctgcattattagttgtctttttggcctttacgtttgtccctgttactaaattatacaaatccaacaagattatatgccatagcattttctctctcaaattatcgaatttatataacagcaaatctaaccaaagatttattggaccgaccatctcatcatatcatccctctttctctctattactagcctatttcctactcttatagtaaaacttatttccttatgtgtaaaacccaaagaagaacttgtataaagaa

SEQ ID NO: 60672 - DNA, 188 bp, Arabidopsis thaliana landsberg
gttcatggacaggctaattgcatgcatggaggtggagacatagcttatcccctcttgcacatccgacacagtgtaacctatcgctgggaccgccctggaagcccaagcatcaaaaatgctatcctaccattcatctttaggaaaagccatcaccgagactgatgagagacctctctccttcttttgca

SEQ ID NO: 60673 - DNA, 538 bp, Arabidopsis thaliana landsberg
ttcaaataattatgaataaagaaaagagaaagaagaaaacaaaataggaaaaagaaaagaaaaaggaattaaaaaaaagacaacagcctgatgggccgacctctccatttcggcccaccaggaacccatcctccacgcgcgcggggacccgtggcttccacatccactgacgggcgggacccactcgtcagcaagctcgcgccgcgccgcattcgctgtcgcatggggcccacacctcagctcgctgcctacctcgctaaccacctcagccgcgtcgtccgccgcgaatctgccccgtcgtgcggccaccagggatcgggttggtgctcccaacagcgtataaagggtcccaggaacctacctccgcctccgtgtgccgttaactacccacctcgcctgcaccgttgggaattttgtgccgccgtggggggaaaacgggccgccaccgcggttctggccgtctgtgccgtagagggcgctcggttgttcagggagtatcgcgggatctcggcgggcgtatttctagaggaatcaagtg

SEQ ID NO: 60674 - DNA, 1697 bp, Arabidopsis thaliana landsberg
taaaattagatggaatcactacctgtcatgattccagtctcgatttgatgaacttttggagactgtttttgaaagtttcaagcactgccctttgctgctccatgtatatatctgtttcattgacacttgtcttggtcttacattgggaatccttttctccattgtattgaacatctatcagttcgatcaatcttccacatgattgtatttcttcttccacattacgactctcagactcacttgacagctcaatggcttccttatcatcaggctttgtaaatatcctgttctggtcctctaagtgagattttaaaggaagtatgttgatgaagccaaaggaatagtagatccagtgaagtgtagattttgtaagagactacagatatacctgcagttgttgtagcagattctgacgctgcaacgagaagtgagcataaatctcccaagtccggaagaagtgtagaggtgtatcccatgagggaccttttctttctagtagcacaatgaaaattcagttaaaatatttatgattatgaggtgaaggaagatgaactatcattttaggaaatgcaaaatcgaacctgtaaggaagtttaggagagcaagacataggggaacccagagcattttgaatggaattgtcaggtatcgaaaataacggagctggacaagaattccactgctattccggacagaaaaatgagttttatggagataaacccaaaagtgcatatatgttatgaagcaagtagtatatttcacttgcctcagttagctctcggtctcttctcctccggtatacttgtggggaattgtgagcagaaaatgcaggaggctggaacgcttcactaacattcttgcagttgatgcatttacagttgtctgagcacagaagattagcctgaaagcactcacagtacttcttcaaacacctggttcttttacatttgcagcctctcgaaagcagtccaggtttagtatcaggtgcagccttacactacaatacaaaacacagaacatcccagatacttacaaatgaaaaaggatgtgaaatatacctctttgaagcttaacctacaaaagtgataggtgtcaagaacatacctgattatcagttaggctacctaaagccttttcactgaaggcatttgggttgcgacctagtacattcaccatagctgcttctctagcatcacatttctcagagttgttatgacaatcaacacaatcacagtctgtacataccactcctgatgcaaaacagtcacagtacctaataaccaagcgtcaaacaaatatgcaataatgcatcaatctacagcagataatagaaatctcactattcaacattatactcaaatctctatcagcttaacactaagtaattcttggatcctgaaatgaacttacaactttaaacatttggactgcttgcatcgacatcctttgtgtttcctcgaagtaatgccttcttcatgtgtcttatcctttgcttctgaatgctctctgcttcaaaatcaagaccagtggagatcagagagtagattttggattgaaattactcaaacgagaagcatctctagtgaaaattggcagagaaactggaacaataccgagaaatcggaggacaaagaggaagttctttaacaggagactcccggacgacgggagatacctacaatttggtgaaaacgagc

SEQ ID NO: 60675 - DNA, 1449 bp, Arabidopsis thaliana landsberg
gatgatctctccagtagcaatccaacgtctttaaaagaactgctctctatttccaagaaagtaaaatcgatcagatattgtagtgtcaatcatatgtatacacgcagagaaaaaacaaacatgtacctctatttcttttatgtatccatcatcaaagccagattcttgaacaacatttaagtatgaagcaatcagataatcacctaggaacttccggagaagattaatcaatgttcggtaactcccactcctacagacgatattcttaaagagtaaagctcaaggtctttctcaatgggacgcacgtccagtcagcatatacaaagattctattaactttagtactcaccccgtcaaattatcggagcagatatcaagccaacgtcttagtgaagaattcttcctgcgaattcctctgaaagcgtttggaggttttggcaggtgcggaagggacaagtcttccatatctattgaacttccctcatgcaggttttcaagggactgtaacatggtctcttctgtgatcccagaaaatgactctgacagtgcttgttgttagattcatgtgagaagagaggtgttgtgtcctcacaaagcaagatattgttactatcataaatggaaaacaaagaaagaagcttaccatccagtaggtttcccgaaatagccatgaactctttcaataacttggccaagctccagtatcttggatgctacaacaagaaataagatattggaaaatgaacataacagcaaaacctgaaaatatttgttttagagaatggagcatcgtgaagatctacttgacagatttctttaccttctgcggattagaattcccaacaacgatttcatctacaacagcttgcatgtacctaggaaataattgtgtgttaaattcatattcaatagtcagcggttgaagtaccatggcttctttcacatgggcataacaaatgctactacaagcgtagggcttactggaatatatgctgagagcaactttcgttttcacccgtcaacagcagttgccttaagtcatagacatgcttcctttgaacctagagaagaaaaataagaaaatggtcaagtacaaacttaacttgaattagtcataatggtgtatcccaaaaacattataaacttctactcagactatgccatacatataatatttactacaaataatacaaacttaaattagtcacccgacagcatcgtttgggagttgatacataagtgtgctacaaaataaatagaaaacagctgtagtctttcaaacttataatcatgataatagatatctatttccattgttgcccaaaaaaaaaaaagaagatatatatttccatatggtcgagatgaatatccaataaaagtagttggaaaagctggtacctctagcacttcgtcaaactcgaccaggctttttcttatgccggagaagtt

SEQ ID NO: 60676 - DNA, 542 bp, Arabidopsis thaliana landsberg
cgtttgtctgaacgtcactactctataggatgattgataggccaccttaatatgcatgatacccatttttgatgaccaagccgggtagcctgcggatctcagcgactacgcttgatagttgtcttagcaggtgtgccacggcgagaacttcagtttgcatagcgcaccccaccagatgacgttcaagacagctgcctgctgttcactcaggatcagcaccaggacagtctaagagttggcgtcagaatcatccggacgcggcagctcaccttggctgagcgatctgctgtgcggattggaggccgacgggcggtcgtgcgggtccgtgcttctgcggctggatgcctgaacaccaccggagctactcgtgctgggtctgcgcgcgcatgggagcacacgccagacacggaattagtcagctggatttgcgttacaccttctccacagacgcacgaccgtactgggagcactgcaacggcatgctgggcgtatacgaggcgtacctgccaaccagggagccgctcacgctacgtgcttcgcgc

SEQ ID NO: 60677 - DNA, 265 bp, Arabidopsis thaliana landsberg
tgttgttgtgcaagtgctgggaaccgtgagcgacgaactgccatcaccgccttggtgccgcgcccgggcaagcgtcgctaccgtccagtcccgcaacaccgtagagcgatagtgcaatgcgtcgaccgatgtccgtccgccgtcgaaagcggtcacatccagtcccgataaaaaaagagagtacccgctcaaaggagctgctaaaacgatggatctagatggtggccacacacgcctcccagacctattggcgcctgggtgcctg

SEQ ID NO: 60678 - DNA, 1336 bp, Arabidopsis thaliana landsberg
ggggtcaaatatcctctagtcttgtttcgtccagcgatcccactacgattcatcctactgatttggtcaatctttatcgtctctctgctatttcccatgttgaacatcaaaactcaaacccttgtccaagtcctggctcaatgactccatctcccgtctctggtcattcttccattcctgcagatagcaataacggatccaggtattgacatacacataatcaagtctggtttattgataacgagctttcatgatttattcgctttccatttgcttgtgctgtctctataaccagctttcatgatttgtatggtttccatttgcttgagctgcacaatgcagatgctcttatacttcctgtttcgcttagttactgggattatcgtctactgataaataatttagatggctctggaattctagaccatgtctctttattatgcagctacttcttggagaattggtcaagcctttaaattgtttagaacttacctaaaccatatgtaatatatcttcatcttttcttgtatctgtcatcagaatctctcctggcccttctccatctcgttcatctcaaagtccaaaatcatctgaagcatcctcgcttccggaagccattaaatcgaaactagctgctgcttctgcaaagtatggctatctcaattcctcttcatttgttcagaaattggttataaaaactgactgggacatacatgcatgcctccaggtacaaggaatcgatctctaaaagtaaacaaggtcttaaagagaagctacttgctcgcaataactcagtgaaagaattgagcaaaggagtgcaacgtgagatgaatgcaggaatagctggtgttgcacgaatgatcgaacgcatggatttttcttcaaaacgttttggagggtctgctcatgtatcaacctccactgctactgcttctggattcaatttctcattcaaagggaaacgtgtagaagccaattctaagtctaacaacaatggagacaaaaccgaaccccaaaagctgcaggtttcagacttctcccggtttcttgtcttctaacatttgtatctttaaaacataaagctttttatgggttttgctaatgagaatcgttgaattcatctcagggaggagaaacgtgctgaggcaatcagaaaaatggagagaggcctttaatgcaagcgatgtacgtttccattgaatcaacttacccgttggtcttcgcatcctgcattgttcagagctcacggtctagtctctcctctctcttctctctgttacctttgcgataagaacttttagatggctaaaataagcaactgagtaatatttctatt

SEQ ID NO: 60679 - DNA, 1522 bp, Arabidopsis thaliana landsberg
gaaccgaacaaaaaatgttaaaccgaagactaactgaaccggaattggctgaaaattagggttttactgattaatagagataaggttttttatgagccgtgttcatgttgttatcttgtacgatagattttttggccatgattcgtgaacctccggattaatgagctctccatgaccatgatcttgtgaagttaagtttatgaattgttcaatcccgctctcgccgagatgtaggatcaatatcacaccgattgatcttaactaataacttcttgtgttcatctacttctcttatctatcttctccatcattaatctatatatgttcttgagcatgagttgttagatctttgttctggttgtttacgattgtatttggtgtagtttatgcttcgatttaggttccagattgatgcaagaatcgaagaatgctatcatattcatagccccatgttacaattttaatggtggtggatactactattgatgggagtggatcattttgatggaaaggtgatttgtaactatggatgaatgaatggatgctaaagacacaatccatgtctaaacaaaggtagaatctggtgaaacacataaattgacttaagactccttaaaggttagtttgtgatataggaagacttaaaacttgataatctttattgtttgtgattacatattgcgggagaacattaattgcaccctcgatgtggtctactttaacaagattgtataggtaaagatcgtatctatatgcaactcaaattctatatatacgtttgagatggaaaaatcaaagttgtataattgatgtgaacattgatgatttattctgaaattggtagaacatcttagcaatcttggtgtagctatatccaaagaggttcaagctatcctctcaaaatctcattgcctcacaagtttgatcaacttaatgaaacactttaggtacggtaggtactctatatcagcttcgatgaagtcattgttgcagcaagctctaagaagaggagagttgtgtgattgtagtaggtctcataagattcaagttgattaaacatgagtgaaggtcagataaaagggatgatgatttttatatcatgaactaggtcaagaacaaagactaaaatcacaatgttgttttttggaagaaagaaagacatcttaaagagatctaaatttattacaaatggttttgtcgctgtaacactgtcctcgatacgattacaacaccattctaatttgctttgttaaagagaagaaaactagagacttcaatatgtaaagaggaccaagagtgaatcctggcgatactctctatctgtcacttaaagattccgacctaacaaccaaaacacaaatcattaatatactattatgatgaacaaagtatatatgacaaaagaatgaaatagatttcaataatagttcaagatagagaaaaagcattttgctaccatgaaatcatcggaatctcttcagtaatttgtttaaccaccaagcatgtgagactctcgagtttt

SEQ ID NO: 60680 - DNA, 413 bp, Arabidopsis thaliana landsberg
gacacatttcatgtttttttccttctgtggtcttttacggctttaaatcgaccgttaattttgtcataataaataaacaaataactaccacaagttttctatgttgtcttaaattttttgccaaagctttttcttggtgtatggatagatgtcaaattattaaaaagaaaaaaaattgataaaatgttgtccactacagaaggagaccaatttaatggtaagccatacacatctcaattgagagagagagagccatgagatcaacaaaatcttctttctactcgcaagtctttgatgtcaacaacataaaaaacaaattaaagatatctgaagaagctcctcttacaaacttaaaggaagttacaatctcaaaaatccttaaaacacttgagcaaagaaaaaagaaagtgttt

SEQ ID NO: 60681 - DNA, 1532 bp, Arabidopsis thaliana landsberg
tgtacattaggtactccactgttgatgatgtaacataagacatggtatagattagagagaattctggtattttatcataagttgatttaaatgttaatggctttttatcaccatttaaggttttaaaaatggattctatggttctataaataagcaactatcattatgtaaatactggttttcaatagttgataatatattactcagaattttatccagtaaattccaccatattaaacctaaaattataaagtattttataataccttttttctcaattattaatttatagaggttctggtgttgttgtgtttatgtatggtgtagagctactcgaaggctggttgtgtcgagcaagcactgatccatgatgcttcaaccatcgatccaatcgagcagccgtgtgttgcctttgtacaaatgcttatatataccaaagaactaggtatttaatttgcataatcttgtatgtttcaaagccgttatcgtgtcacatatttggattagtctacaaaatcaagaacatatttattaggtaaaaatttggtaaaagaaacttatcatgatttaaattctatgactttgttaagcaacttgcacaagtgtgtataataaacttcaaactgttgtttcttttagaaaagaaaaatcttaagagagtaatgaaaattggtcgttgggtttacgataattaaacaaaggttgaaagagcatcaaccgttgattagtcttcttaatcctcaacgacgaattcaactgctcctccaatattctcttccttcttccttctttcggaaacaaccacagaagcaaagaaatcaatctcctatgagttccaagagacggcggagattcaatctccgaacagtgttctccatcatcttcctcacctttcttcctctgaatcttaactctcaaggtagttgactaatctctatgtttctctatgcaaccttttgtgtgtctctttaaatgatgacaattcatttcttgaagagattgtagaggtctttgattcttctcaagatcacttcttgatccaatcccgagtttatgcgaaccatcgcagccttatcgatacacctcttcctggcaaagaccctgcccttgatgcctctccgccatctcctgaatccgctatcctcaaagatccattgctgcctccgccaccaccagaaggcaacgaaaccccgagccctcctcgaagtggtgtgccaacacaaacaccagagaccccacctgctatcactcccctgcctgtaccactggctccagctccgtctccgtctcctcctgtgtctccaggaactacaaagaagtctcccaaagtttatatgatcgttggcatagtcggtggggtattcacagtctcggtagcattaatcatcatctttcttatcctcactcgaaagattccaatcaagccttggaccaacagtggccagcttcgcgatgatcttatcacaggcaaacacactcttcagtcttcatctctcttttttctctcttcatatggaatttctctaaattta

SEQ ID NO: 60682 - DNA, 264 bp, Arabidopsis thaliana landsberg
  unsure (1)..(264): unsure at all n locations
catcataagggtgctcaggggcctcacatgctcccttctctaaatcatgctctccttcttttgcaactgtataacactcccatacccccatgcctattgctacttcctcttgagcatcgacataacgacccacacatgactccgcccccatannnnnnnnnnnnnnnnnnnnnnnnnnnnntagtaaaacctatactcgcaactgtctgatactaccactgcttcctaatcgcacatcatattcaaccctatgaccactgctct

SEQ ID NO: 60683 - DNA, 1060 bp, Arabidopsis thaliana landsberg
catgattcatgtctttatgttgcatattttggccccttttactctcatttagactatgtggtgtttgttttgatgccattgttttgattttccatcaattagtaattttttcagtccgaatttcaattcttcgtcattgaccttgttgatgattcctgtgctttcagattcctaaagagcttacatttgttactcaactttaaagttttgacgctagagattactatcctcttgctgggaactcaacgtgaccaggtataaatctcagctcatagataagcaaagtagttttttttctacatctcttagatttgtaccctttttagctcacagtatcagttcaataaccaagctgatccctcttatgaacttacattcattggttctgtttttgctagactgtgtttgaaagatagcaatggctggagtattagctggggattgttcattcggtgagagtggtgtttcatcttactccaggaattccaatgaaaagcaggacgaggttgcccgctggtattttggaagaaaagaaattgaagaaaattcaccttcaaggttggatagtattgacttaaagaaggaaacatacctccgcaagtcatactgtacatttttgcaggatttaggcatgagattaaaagtgtaagtataaatttctgacctatatatttcagctttatacattgcattttccatttgattacttcttgcgagcttggtctaggacatgctagtttctcctaccatgataattgcctctattttgcttatagtattatagtgaattcttgatccccttacattagggtctgtaggatcgaattttgaaatttatagaacttgatatcgtagaggtcattagagcatgaataagctagtcagagttattgccttattggcaacaaaaaggtgaaacttgtgggttcatcttgtgttgtatggcccaatagtcctttaatggctttctgaaatttagtatatagtgatgaacacaataatctgaatttatcttcatattgacatggtttcatttgcactgatagctttcacttttggc

SEQ ID NO: 60684 - DNA, 651 bp, Arabidopsis thaliana landsberg
  unsure (1)..(651): unsure at all n locations
agcggaatatttaatttatatatatatacagaacaaagcatcaagagggttggaatgcaatataaacatatacgtattgataaagacatattatatggacaaacttaaagactaaagagaccaaacataaacatagataagtgcttttgtaagatgatattacttcttatattctatagggtacagattccattattccacagttcaaaaaaatcgaacaggaattcatttttagttgacttggtgtagttccctcctctcttgtttcaaacaaatcaaaactcacacaatgaaaatgtactcttacttatacggtttttaagatattcattttaattagtttccaacatagtagaagtcttttcttaacattatacatcattccactgaatttacaataacttctttattaacattttaaaccttattaaaagtcttctaattaaattcctaacactgtagactagtagccactaacatacaaatcanactaaatctgaaggtttatgctactagaccattaagattatgacacttcgaaacaatactattaagaccatgacacatgtatggtatagtattgagtgaaagggtctgacatatatactaaacatataacttgatactaatttagatgattncacgatctaa

SEQ ID NO: 60685 - DNA, 1613 bp, Arabidopsis thaliana landsberg
  unsure (1)..(1613): unsure at all n locations
agcgaaaagctggagagacacgattgatttatctgatgttaatagttcgggtttataggttcaatcactctctggcccctatgatcggatgaggtatttaaaaaaaaattggttgtaaaatcttaaaacagttgctgcctaagctttaggttaggttctgcacatgccctagcttggtgtacactctaccatccctaaatacatccattccatatttccatggatctaaactctcttttgatagttttagtcttcatgttgaagtagagcaaataaaaaggaaagaatagagtgcatcaagatttcgtcaagtattagtcactccaacaataattcgtccttagcaactaatctaataaatacgaaattcataatttaattcttagtatccacccataattcaagatgtgtactttcttcactaagttcctcaaacctatctaacaaaagctgaggatccccatggtatcatgaaacctagcagataatttagagttattaatgaaatcatttaaaagaaaaaaaataaacagtcctaaatcctaatataaatccaagtcaaagcaagataaacaatgaagaagttattaagagatgagatcccaacagttgttttggaatcctctaaaggaagataataagaagaaaaaatcctctagctcaggaagaggtttcttcaatactcctttactcgacacttagccactttccataattttcttcttctcacagactctcggctttctccccttagtcctcaatttccttttcatgaactgaattgggatctttaatctatcagaatctacctttctcttaagacattcagggatacatgaaagggtagtctatgacaggtttatcatcacacaacctttgactcgccatcccaaacatgtatcctaaggcaatcccgactggaacagcaacaacatgccactttccacaatcttcatattctcccaaactctagcctttcttcccttagtcctcatttcctcttcatgaattgatttgggatccttaatctaccgatactaatacaccatgtacctacattgaggaacattgtatgcaccagcagccattatgcctcatcttgcttggtaattcttgtttacaagacgagctacaacataacgaccaacaaatctttccatgaaacctaaaagatttacaacgttctccatcaagacgtatttgggcttcaagtatagtctatgatattcatgaaaccgtcacttcattgtttttttttcatcttgaagtggtttatctttatttctaaatcggtgtaaaaccactaagtccctggcatggaagacccccacatacaagatgcacatattcctaaaagaacgacacaaggtcgaaaagttacgaaaagtggggaacaagaaatatttggaggatttacatgtgtaattaacatgacttagcttacaagaagtggcaataaatttgactggaaacccttcgttacgaattccttaagtttttatttgtattttctaatgaaaccatatacagattagaggacaacatgagaaggcccaagcagtaattaaaaaaccttacccccatccatcatacngctcccaaggatcttcttc

SEQ ID NO: 60686 - DNA, 496 bp, Arabidopsis thaliana landsberg
gcaactgggagttctgtgggctgaaaaaagattcttgcattcttcaataaataagcttgtcttcgctgaaataagattactgcattcttacataaataagctcgtttgctgaaataagattcttggattcttgcataaataagcttgtgtttgctgaaatactaacttttgcagatatttgttttcaggtgggggaagaaactgttttttgggatacataagcaagcaatatttcggtagcgggaggggttggttgtatacatgacggggcaaaccttatgaagaagaatctttttgggataagtaagtaacggaatctgcaacttttgttagttctttgtgtgaaagaacttagtgcactctgcacataattctgtaacacaaatgaatgagccaaacagtatggcttaggaagctaaacgtttaaacattagccccatggtagagtataacagaacttgacaatgttcattgtagcatggctgttataatgctc

SEQ ID NO: 60687 - DNA, 562 bp, Arabidopsis thaliana landsberg
agcaacgatttgtttaccaacagataacctttggaactatcaccaatgcacagataaagacaacaagaaactaatccacatccatcaacgcatatatggattcaaaatcaatatccaccttcaaaaatcgaacctgcccatttcaattccatgattctaagacataccactaaaaaagtcttaagaattatcacgaactgagaattaaccataaaatcaaatcaaatcagtattctaagaagtaccctacagagaaattatccgactttttaatgactagtactcaaagatccagaatccaaagtctatgcatcgaaataactcagattaagatttcatatcttagttctactaagcctcctgacccttaacgcaatcaggaaccaaaaaaaacaagtagctcaaaacaatcgtatcaaagcaaaagcagaatccagagaattttacccagaagaagaagaacccaagaggttgctgctttaggagaatattcacataaaaaggattgaagaagaatcgatactcgaagaaatgggatctagcctaatcaattggtttagac

SEQ ID NO: 60688 - DNA, 536 bp, Arabidopsis thaliana landsberg
cgtgggggaatgctagggtgcgacaagcacaaaggtagtagtgctacgtcgttcacgctattgttgtatatatactccatattatgctgttgtatatatgtatgtatattagggttcgtattcgaattccatccatctcatctaagaggactgagatctgatccgtacccgagtttagatattcagtgttggatcggtatttgatttatatatgtatctgtatactcgaagttgaatatttaagatatcaatatccattcaaatttcatccgcacaactcgataatatccgtattcgattcaaatctgaagagagaaaatatgtaaacgagtaatatccttacatatccaatccggttaaagctatgccatatagtagatatcaatatctatgccatatataaaatctatcacttaaaacttagcaaaaccacccaaccaaatcactgtcacacccataaaggtcataactccccactcaatccattaaaataattacatctagacctaacacaccattaaaacccacgatttaca

SEQ ID NO: 60689 - DNA, 1594 bp, Arabidopsis thaliana landsberg
gcaccactaccttctctctacggagttgagatcaatccccccaaatctcggtgtggttcctctagggtttttgttcggaatcggaatcgataatctaaccggcatgaggccaatcctattgccggatccacccagtctatctaccggcgtccctgatattttcgaacaaggcggttcccataacgtcgtcagacgcgccgtcgtcatcggaaacggtttccctggctccgaaaatcagtgtattggtctcgttcgtgcgctcggcttatctgataatcaccttctctacgtgagtttctttgatctaggctctagacgtttttagcatctgcttagtgctttcatttcttcgactataaaccattgatactatactcgaaattctcgtcagtttttgctaggcgcatgatgtagttgagagattgatgattgcttttggataggagtttcttttactttgttgtttcgtcgtgtgttctaggtttttagcttgttaggtctaagtctaagtaggagtggaaatttcatattgtttagtacttctttagagtgtatgaatgttcagagaaggaggaactatttgaatttttatggaaacaatgaattggtaaatatgtaaatttgccaatatctcaagttctgcaaatttagggtaaacagtggaaggttcttggggtgtcataactacctatattgtcagttttatttataattttttttggtaaatcttaaagagaattgaatcattggtggagcatgatgctggtgcaattactgaatttcgtttacaaggaacactggtagtggagtctttaatgcttcttttagatcagtttggatgcatataaggctgttttgctgtgtctggtttctctagcttcttgatcattcatagactcgacattcacgtaaatttacatttaacatgatttttggttagctgagattatctctttttctttatgcaagcgagtgacaaggcctaaaggaggactaaatgagtggctgcactggctcccagttggttttcacaagaagttggactttatcctcaggcatatttacctctactccagattgatgcttggatccaaacaaagtaaatacacctcatctgtaccctcagagaatggtggtaatgtaggtttggcctctattctagaggctgatgtgaagggcattgtaaatttggcccgtcagacctatgaaaagtatgtaatctttctgaaatttctttgtggtgcttattcatttaaacactattgcgtttctatgagttgcaagtagtactcaagcgaaatcgaagcctgagtgtatgcctttccatcatcacgaatttctgtttgtccatggaatgggaatgggtatctaagcgactttatttccttttcgcagggatggcccgttgatcgtgattgcatgtggaagagatactatttctattgctagctcgataagacgtttggcttctgaaaacgtcttcgttgttcaggtctattataaaatttaacctgtttgtatgttagttattaaggcacagtagactaagctctgaaatacaattcgagacaaactttacttagtatctttggaa

SEQ ID NO: 60690 - DNA, 544 bp, Arabidopsis thaliana landsberg
aagactagaattgaaacccagaagaaattacgacaaaaccagatctaaattccactaaaagggacaaagcttgtccttaaactcagtttctacaattacaaaaaaaaccagaaaaatcagtaaagcagttgttactgcaagaaccttaacttcctccaaaattacacaattcaaccaattcgaagcgctatcttgaggcttgaagccgaagatgatcgatttaccttgaacggaaaagtaaaaatcacgcatttgatgatcttcttctttttcttcaatttatacaaaatcgagctcaatttttctgacgagcgatcaccaatggagagaaactgatcagtagagattttctctgtggttttcttttgtagatttcttactcttttgaatcaggagagtttttcagagattttcattttcttttgtaacatctactttatttaaattcgtaaaagggaaatacaaacaattaattaaccaaccaatcagagatttataaaagaattaaaatatatatttattttaaattaaataaaaaaaaata

SEQ ID NO: 60691 - DNA, 1815 bp, Arabidopsis thaliana landsberg
ccattaccgcggttaacataaactggtctatctagtaacgtcggttttacctttacgattgagtctactgattttaaacttttttttctttacaagttaaaactattttgaggaaattatttgtatgaatattttgtgaatgatgggaaagaaatccaaattagtttaccagctcaatttgatcaaaccaattagcttaacaaaaacaaaacctagaccatactagtgcccattcaaacaaagtacaatggaacagttagagatacaaacaaaactcaatcaatatatttgacaatctaagttcataaatcacataataatgacttttaacttgtttcatataatgtctagtgtttatagattgaatgtaagaccggttaatggatcattaaaaatcgaataaaaaatcttataataataatatagatgatggaattgaaaagtatatcttaaagtaaaaatctaatagctgaataatatatataggagaaatataataataataatttagagaacaaacaaaaaatatttatacaagtttgttatcagcaatgtgactagagagaaggaagaagaagagagaggggatggaaaaggacatgttcttgaccgctttatcagaatatttttcttggtttcatacaaaaataaaaacaaagtcttcttctaatattttaaggtagaagaaacttttacaacaaaaatatcagaaaataaaaaggagtttgtctttaggttcttctctccaatctccatttttctctccaatatccttcttaagtttttgaaccctctccacttcaatataaccgacctctcttctctcttctgaaaaaaacaccaaaggagctttaaatgctccgttacataatctctatctctttccaagaatatagagaaaggaaaataatatacaagaattaaaagaaggtatatcatcatctctctagctagtgatcaaagcaccgtcatcataatcatatatcatcagcttgcctcagaggagaagaccaacataagagagatcgaagatcaaaatctatctctcttcatcatcttctgctgttactatcatatcacacgctctctcaaacatcatcctatatatagacttctcttcatcatcatcaaatgcaaggtcatcaccagaatcatcatcaacacttatcatcatcctccgccacgtcttcccatggaaacttcatgtaatttttactcacttaataactttttgaattgattgatgatccccatgtttttaataagagagctttaatttatgtgtgcaggaacaaagatgggtatgatattggagagatagacccatcactcttcctctatcttgatggacaaggacatcatgatcctccatcaactgctccttctcctttacatcatcatcacacaactcgtatgcactctctctctctctcttttctttcttttttgggaattggggtttgtttttttggtttcagcagataaggaagattccctttaggtgtgagagagagatagagtcacagcaaaagcatgccaaacagatttcaatctttcttctgccatcagtactctattctttcagctttgaccagatcctctctcttttcagacaccaaatctttcaaatccatatctcttacacttctttaaacccttttctctctctgtcctttttcttctaattagaagaactagtccactcacatatttatatacatgacttgttataactagaccatttctcatacatatggtcacatgactcatcttatggcagagaatttggcgatgagacctccaacatcgacgctc

SEQ ID NO: 60692 - DNA, 565 bp, Arabidopsis thaliana landsberg
  unsure (1)..(565): unsure at all n locations
actcgttccagcatcgtcattagcagttgatttgcgagaacgatgaagcgggccaatgacgaccatccgaggtgtataggcttcaggtttcacatcacgtatccgacttggtaccctataaatgcaaggctcttgaactttccttaccggtaactcaaattccatttttttctgcatccagatttattagatatgtagtacaatccaatgataacatacagtatgtagaaataaacgagataaacatagatcaaataaagacataattataaggaagaaagcttactggtagctatatattggcaatatggatgagctctagaatgaagattcaagaatcttataaaccttatttagaaaatttgatacagagaagatgatcatataaattgtctgtgaataaaatggtacaacttgtagttataaaaagagactggatttacagagagggcgatgatattaataaaaagaaacgtgggtcttttaatattaataagtcaatacaataaagtagttcaactagtgctttgtttatttttttaactcanaagtaagggaaattatc

SEQ ID NO: 60693 - DNA, 890 bp, Arabidopsis thaliana landsberg
attgtttgatccattgattattgcctagaagacgcctttgatttatcttaactcttggatagaagatattttcgagctaaaaaagaaagagtcgaagatcttttattcattttatcactacgtgagaaagtccaaaatcaagtaatttgtggttgttatttgtcaacaatgtaagtgataaattacgggaccacgaagtcaccatgagacttgtaaccctaacaaaaacgtcttaaaaattgatgtcctcatttgtatcatacaatttatatatttactaaatggaacacccacatgcatacgtcaatctatcaagcccgctaactaaacgaaacgaatttgtgggagcgtaattgatataggctacatatcaatccaccatagctaaaaaaattgatgggaagaccaaattaaaaacacaaactcacaaagcattgaactatcacacatcacagattcacaattcacacaaagcacagacatagcattgagaccaaggggaagccaattaaacacgggttacaacttgcaagatagtatagtgtcttgatttttcttttgctagtataatattgtcttgtttatttcttataatgttgcatatatgtaaatcgaccaaacagtcaagtttatgtttacatgcaaggtatatatattgaaaatttgtgttcaagtgtttgttttacagcaacggataataatacatcacgaataacgtaactgcattttttttggctaaatcagaaacaagtatatatgtttaccaaaccattcttcttgttttacaagatctcatcgtgcatcaactcttcatgttttttttttttggggcacaaaaccaaaatacataatttattaactcttatatgtggtaagtacaacaaatacgt

SEQ ID NO: 60694 - DNA, 1345 bp, Arabidopsis thaliana landsberg
ggttcgatattctatggaaaagggaccgcctttcaaaatttctacaaaaatccgtgttgggtttcgtctaattcaattgattgtgtaagctttttagcagctgtgtccaaatgggtttatcatctgaggcttagctactgctagggtttatgttcttttcggttaggctattaaaagttttgttttttcatttacaaattcgtccatgtgttttgctttgtgtcagccagaggaaactacagaacaatattatcaatgttggtgttaaaatccaaaaccgattcagagttgtttgtatgggaatgctggctccaaggaaattcctgcaaaagaggaggaaaatggaggttttcaaggatgcagctgacgagacggatcagaagagatggagagggcttatgctagagattgaatcgacgggttctgctgttccggtgcttaggcaatacaaaactgacggtgaccaaggtcttccaagggatcttgttttgggtactttggttagatttaagcagcttaagaaatggaaccttgtcagtgaggtatgtggagaatgaatgactcccttttctgttttgatacttttagatacaattgagaatctgaaaagaattggaccctttaagtatatatctccatgttagattggctggaaagaatttcatgaacttagtcttgaatcttgattgagaaattagatgagtcatcttaatctacttttgaggatttcaatagtggtgctgcggaaagctttttgttatttatacctgaagaatttacgtcagcatgaaagaaactgtgattactctcagcactgttagaagattggctattgcaagctcctagttttgataggaaagttgtcgggttgtatctgatatttggttccttcctttcttttgatttgcagattcttgaatggcttagataccagaactggtggaatttcagtgaaatggactttttgatgctcattacagcttatgggaaactaggaaacttcaacggagctgaaagggttttgagtgtattgagtaagatgggctcgactccaaacgtgatttcttataccgctctcatggaatcttatgggagaggaggcaaatgcaacaatgctgaagcgatatttcgaaggatgcagtcttcaggcccagagccttctgctataacttatcagattatacttaagacttttgtagagggggacaaatttaaagaagctgaagaggtttttgagactcttttagatgagaagaaatctccattgaagccggatcaaaagatgtatcacatgatgatatacatgtacaagaaggctggcaactatgagaaagctcgcgtagag

SEQ ID NO: 60695 - DNA, 478 bp, Arabidopsis thaliana landsberg
tatgatttggccacattgggctaattccttttctttaataccgggcttaaacccttatttcattccattgcatgaattctggaccctatatatggattttctagcgttaggaatcgtatttctttaatcttgggtattggggtagcaaagcaacaactaagataaagtaatgaaaaacttttcactatagaagtaagaaatatatcttcaaaaaggcaaacgagatttattccgtagcgtgcatccccataagggttgattcgctttccagactagagaccatgtgccctttcttcgagctttcactcataaattctgactacaacattgcttttgttgaaaaaacggccaaagcatagtgatccaccgcttattcgagttagtactgaaaaaagagccagataaaattactattttttcgtaaacatggcttttctatttagtcgtttcgagcacgctcattaaactaaagagttca

SEQ ID NO: 60696 - DNA, 503 bp, Arabidopsis thaliana landsberg
cggctttttctaaagatattactttcatataatattctaatttcacaagagatgtttcatggtttagggacgaaattatatgacgattaaaacagacatgaataaagtttataatccaatagagtggtctttaattttatcgagtatttactaaagaaaataatttttttgcggtaactaggtctccgatcctagataagacggagtgttacttcagttcagtataaggttttaatcaattgacaacctcgaagtttaatagtccccgaaaagtttaaagcatggtatcctttattactatacttagaagaaggaatgagaaatcttgggtaccttgaggtacaagattattgcagtaagatagcttttataaggagatggtactacaactgtcacattttgatctttgattaaatatatagtaactaactacctacttatcaattagttgaggtgttctaaattatgtgcttttttttattagtgataactaaattttccta

SEQ ID NO: 60697 - DNA, 652 bp, Arabidopsis thaliana landsberg
aactcagaagttaattgatataatcggaatacgaaaacgatgaatacaaaatcagaaaacgcgaaagaagtagtagatgcgaatccaacagatctcagagtattcgagagcaaacctgagagagagagatccaggtatggagatctacgagggagtcagatctagaagaggtggtcgagggactttgggttgtttcgaaggtcacgctgataatctctctcactgctttgctttggttgcttaatgcgttcgcaaagagagcgaataacgaaaatcaagaaaatcgtgggtgtgttgggtagttattctctgtgacgcgcttatacaatatgtcggtgcggtaatcaccgtgcctaacttcatctgaggccaaaaaaaaaaaaaaaaaaacttcatctaaggccttgaatttctattggttgaactggttataattaattatatttttaagtaaacgacggtttttaaatgagatttttgtaattttttagttttttttaaaaaaattttaaacacaactaaattaaatggagagagtttaatgttgttaatttttaaaaaataaacaaagccaatgccaatttttggaacaaaaaataattttcacatataattgacatttttttttgtaagaatttttttactcaatttg

SEQ ID NO: 60698 - DNA, 317 bp, Arabidopsis thaliana landsberg
aaaaaagggatacccgaaaacccccaaacacaaaaaaccaaaaaaacaaaaaccaaagaagacaacaaaaccccccccacttacaaaaaccaccaccgcaacagacaccaccaatcaaccaccaaacgcaaccgctaaagcggaaccacaacccccaaacacccaagcaccaaccaacgaaataacccacaccgcctgacgagaacaacaccgaaaccaaccgaagacaaaacccccccaacgaaccgaggggacaaagcccaaccccctccccaaagccaacacaccataccagaaaaataccacccaaacaagac

SEQ ID NO: 60699 - DNA, 588 bp, Arabidopsis thaliana landsberg
tttatattcacattctctcaacccccggggtcctgtgaagaccattcctcagatctatccgttctaacacattttttctaacgctgcctgagctaatctgccttgctcccaacgtagcccgtcgcatgcccttccccacctgcaacactgcccgcccccgcccattcctagtgcccttgccccactcttccttgcaacgtctacatgatctttctcgccactacattgagacctatccctgcaggccaatgagcttatcaaaccagcgagacctatctcttgaccgaagatgtggactaaccgtccacctttcctagagccctgcccttcgagaagatcgccatttgacaactccgcacctttcttattgccctcacccttctagaatatcgccattcaacattgtaagcaccacttcaattctttcagatagatcttaactacatgtctgctcctttcgttcatataacttccttttttaaacttctatcgtgtattgctatgaaacttaaactatattgcacaactaccttatattgacctgctcggtaaccccatgttggtcttcttggccccataattcttatc

SEQ ID NO: 60700 - DNA, 474 bp, Arabidopsis thaliana landsberg
aagatcttgcgtcctttgaaacagcttatgttgtcaagctgcatagtgtagcaaagcttgctccttccggggctgtgagtctctctctgtctccagcattttctaatagcttaaagtgttctctttaaatacatttatgcaagtcttgtcgatctgaccatctcaggatttttggtttggtcttaaataggttttcacatttactcatccaaacttctcaacgaaaggggggagcaacgctataagaagcttcagttcagtctaccaagcgatgctggctcagctttggtgcatgggacctgcttttttctagcccttttttgtttgttaatgtcaattttacatctccatttccgtaatctgaaactgaatctactgcgatcataataggattcgctggctattttgattccgtcctttataaagatgttcatcttgggatcgagcctacaacagcaacaccaaacatgttca

SEQ ID NO: 60701 - DNA, 549 bp, Arabidopsis thaliana landsberg
  unsure (1)..(549): unsure at all n locations
taaattctacaaactggggagcacagggcaaccacacaagagagaagaagagacttggtccttcatagaacataattgaacaaacaaataaatctttttacttctggctttggaagaactaatttagaaggcgaatcgtcctatttgcatgtaaggcaagaaagtcttcttcttcaaatctttcgtttctgctttcttagacatgtaatggaattcatgggcggagaccgatgatgaccctcttcctcgtgaactcgagttcttggtgtcttcttgcttcctaaacaaacttgtaaacgtctttaccgaatctttgttgtgccttgctcttccttcggatgcacttcggaacagaagaaagtcctttagtctccatttctttgaggaagatgacttgcaagacacgcaagctgatgaagatgtagatggaatagaagacaaggtccctttcctctgttcttgtacatctctctgttcttgttcttggtcttgttcttgttcttnccatggataagccgaaacccgaaaaggcgaaagtgatcgagcaac

SEQ ID NO: 60702 - DNA, 1359 bp, Arabidopsis thaliana landsberg
tgctcgacttgtgcttatgaacagatcaaagagaacccttcaagttagctttagaggaaccaaaggccttacatgacgcggagaggctgcggagacctgcacctatatcacgacaggaaagtcaacatcttgacttttcaatgacgatgcctactgcttcaccacctgcaccaccaccaccacctgctactttggatgagaaggtcacggttatgccaatcatatcacccgaaagacccgttaagaaaacttcccctaaacgcttacccttaacttctgtgaagcactattctattgcttctcttcaacaatacacggaaagcttcgctcaggaaaatctcattggctcaggcatgctcggtagtgtttatagggcccggcttcccaatggaaaggtataatgcattgaattcaaacatttcagtctcagaaattttgctttggttctcagtcttttgtctttcacagttgtttgctgtcaagaagttggacaagagggcttctgaacaacaacaggatcacgaatttatcgaactagtgaacaatatagatatgattcgccactccaatatcgttgaacttgtgggttactgtgctgagcacgatcaaagactattggtctacgaatattgcagtaacggtacgttacaagacgggttgcattcagacgatgaattcaagaagaaactttcgtggaatacccgtgtcagtatggcacttggagctgctagagcccttgagtaagttcttttatttacttcaaaatggaagtgtccaactgtgttttctacctgattgctaacttttgttaatgctttcaaggtacttgcatgaggtgtgtgaaccacctatcatacacagaaacttcaaatcagccaatgttctactcgacgatgacctgagtgttcttgtctcagattgtggtttggccccactaatatcatcaggctctgtgagtcaggtaaaatacttaaacccaatgagcttcattctgatggatataccctctacagatttcaagatgttagactaaactatttcttataatgataatcagttatcagggcaattgctagccgcttacggatatggagctccagagttcgactctggaatctatacatggcagagtgatgtatatagttttggtgttgttatgttagaactattgacgggtagaatgtcctacgataggtatgcatgtcacattgttttatttgcttagttctctgtttcccgttaagcatttattcatatcaacgagtcgattatagggaccggagtagaggagagcagttcttggtgaggtgggcaatcccacagcttcatgatatcgatgcattgggcaaaatgttgatc

SEQ ID NO: 60703 - DNA, 1369 bp, Arabidopsis thaliana landsberg
catgcaagtccatataaattcaatttttatgtggtttcatttctactttcctgtttagtagtatgatttactgacttgtagttattttttgtattatgctgacaagtcaatgtaatgaaatataaattctcacctttttgtgttggctatccctttttttaaatacttgaagattgccggtggaagtgggattactccaatgcttcaggtgattgatgccattgtgaagaatcctgaggacaacacgcaggtgaccaatttgttattgacttatttttcatacgaattttcgaagtacttcctattctagcgctggtttgtttaccaagatcttgaaagtgttatcatcctctacaattcatttctaaatcagctgaaattttcataaaaaaatagtcttaaccatggaaatttacgatttctctgtgtgcacagatatcattgctttatgccaatgtgtctccagatgatatactcctgaagcagaagcttgatgtacttcaggctaaccacccaaatttgaaggtagatttctcttggatttgtcaattgattagtttgctagctggttactattagcatacacacttttcttaaaaagattttgtgttcaaaatctacagatattctatactgttgacaaccctactaaaaactggaaaggaggagtaggttacatttcaaaggatatggctctgaaaggcttacctcttcctaccgacgatactcttatccttgtaagttaccttactatcttcagaaccataatggaacactgtattctgagagtatgacaacaaggatgtaaaaaaaagcgttacggatttgatctactgacgaacaagttatggattgaatcaaacatacatggttaacaaaaatgcggcatgcttcactatgaattcaggtatgcggtcctcctgggatgatggagcatatatctggaggcaaagctccagactggtcacaaggagaggtttgtaccaatcccttaacatcgtttttttcttggcaatttaataacttaaatcctaaaagttatctaaacctttgtgttgaaactatctatacccatatcggatatctctgatagctagtggtttaaatgcaattagcaacacacacgtaaacaacgttgagctgaaagagggcatagtaaatgtattcagggaaaggctatgagatggctcatagcttagtctttgttattaggaaaaaattgataagttgatggcacaaaaagttgaaaaatgtcttgcagtctgtcggtttcgagtcactgtaattagttggagagaaccactcaatcaatagcaagatgcagagaagttcatatctaatatctcgttggttttttttactgcaggtc

SEQ ID NO: 60704 - DNA, 438 bp, Arabidopsis thaliana landsberg
ctgctttttactccagcagtgtgataaggaaaaaaattaatgatatagaaatatcaaaaatttgttatttagttagctattcaaaaaaaaaaaaaacaacaacttgtagtctcttattcttagtttagtaaaaagatttcttgtatccaactctggaacatatatctaataattttcttttgtcataatcgctaaatttggaatagggtcctaatttttgtgggctcgaatatagctcttatattctctcttccgaaattgacttgaactaaagatatccttgtcagtgttcgtgttttctagcaacgaaatcaatggaccaaaaacaaacttgatagttttgataatgtttttgaaaattttgcttaatcatcaatggagagaacccaatattgtgtatggatattaactgaggacagaaaataatgcctatgaata

SEQ ID NO: 60705 - DNA, 475 bp, Arabidopsis thaliana landsberg
tctaatgtgctgttttgtgccaaaaaatacatatatacatacatgtgtatatagagaaaatagaaattagaaaaataaaaggagtttcttggctagtgggcctggcggatgcaattcgggccagctgggcgtggtgtggtgcgggcatgaggcctagctagcccacggggaagggaacaatgggcgatagcgtgaaggggctaggcccacatgttagagggagggggagggaaatggcgcttagcggctactgatgggggagggagaaccggtcgccggtgaggttcatgatggttcttcctcattgctttagtttctgggcaatggggaggtgtgctagcacaaggagaggtgggtgatcatggggccagactcaacttggccggaggcaagctagggaaggccaaccacagtagggtggagggtcaccgtgatggtaatgccactaacgaggtgggtggtggttgatgggggc

SEQ ID NO: 60706 - DNA, 1249 bp, Arabidopsis thaliana landsberg
tcctcgagatgaaactatataattttttggtgggtgaatgagcaggttacttaataccgaaaggatggtgtgtattggcattattcatatcggttcacatggatgaagacatttatgataatccctatcaattcgatccgtggagatgggacgtacgtcaccatttccttttagtataattattttgcttcagagttaacttcatgatcattagtttagcttcttcttatcaaatttcatctactaatacttgtcttaatttattatgtaacagagaattaatggatcggcaaacagcagtatttgcttcacaccctttggtggtgggcaaaggctatgtcctggtttagagctgtcgaagctcgaaatatccatctttcttcaccaccttgtaacccggtacaggtagaaacccatgatttaatattgaaaatgttttttcatcaactaagtataacttgtgttagtccatattgatatcttgagttggccaaggccatacataattcattccaataacgtatcaagggatactgtaatggactagataagtccaggtctgattttaacaggctggtcttaaatagactgatccatatgaaatggtctacaaaagtttaaggtcttttttggtctacagttcgcaaacatatactaccgaatttgagcctaaccatctctatgttgcgactttcaactgcattttgttatactttgtgattatatatatatgatactaattgttatgtactaatgtacatgtagttggacggctgaggaagacgagatagtgtcatttccgactgtgaagatgaagcggaggctcccgatccgagtggctactgtagatgatagtgcttctccgatctcacttgaagatcattaatagatcatttcaaagaacaaaactgtttgtgcaaagaggaagcagagaagtaaacaaatgatcttattaacaaatagtagagaagagaagcaaacaagattggtgggtaagacagaaagagccatacgtacagctagtgatggctcaaagatgagagattctaattataattttttttgtttgtcatgtcaaattataagcgttggttaggttgtccctttctcttttatttatcgtaccaaacgcaagttgagatatgattccatatatatggatgatagatatgtatattaatatataccttcttctttttttggcagctattaacaatatgcctatctcgtctctatctagcgtttgttt

SEQ ID NO: 60707 - DNA, 1364 bp, Arabidopsis thaliana landsberg
aacgtttttcgaaacggcacatcttgaataactgcagacttgtatcctttcgtttcaaacgttaggaaaggcatcggttgtgtacaggtaggagggagctttttgacaagcttgatctgcagtctgtttgaagctaatccaccactgaactcagtacaaatactaacactgctcttcaccgctcgatacagaagagcaacatctaaggagaaagcgatacggtcctcgttctggctcgagatacggtaatcatcaaagagaacatctttgcgaaactgagcaatgcattgaactccatcaccattgagaaggttatggaggaagaacaagtgttctttagtgagaagaagatgacaattcttccccattttgtcaaacgctggaagaaacctcttctctaagagattcacaccattttcagtcagaaacgccttgaacttcatttcactgttacaaagaaacaagaagatgagtgaatctttagtagaaatcactctacgaactcaaattttggcacagatttcggagaaaaagcgattcttcaaaactaaaagaccagattcaatcaaacacaagactattcaaatttaggttaaattcgaatgcaatcaaaacatcggagtgtatgaaattgaaataattaaacgattgcagaatcgtgaattgttagaatcgtttcaagtatacagttcataaactcaccggaatcaatagtttgtaatattctgaccggagatcaccggaatcgtctgctggatgaaggaaactgtagctgcgttgaagaaatcaaacaatctatatcaaaattcatgagcacagtagagaaagacgacagattcagagaatttaggaattcaccaactaagaaattttctgaatttttgcgccaaaaacaactctgagattgaaggagagggaaactggtagatttttatttcttctgaaattttgtgtaccaagcccattaccattagtgtcatatgcatacatgctcaaaagcccataggggtaaaatgggaaactggttataactttttaaagaaaaaaaacttaagtttgaagaacttttgaatgatcaaatttatttaccaagctgcctatttgcattatttttggcttcattaatctgttattacagctctatgtcaagatataaaattttacagcaaacaaaaattaaaataagctccttttctttatatacatacagatatagtttcagaaattcttctataaacactagtcttgtttttcttctacactatgaactttatccaaagactcttgaagaacttgcataagaaatttataatgatccaaagataccgctccttcttcaactacctgaagagagtatttataca

SEQ ID NO: 60708 - DNA, 506 bp, Arabidopsis thaliana landsberg
catcagacttgtaccggaatgaatggcgcgaagctccctggccgcggcagagggtgtcccacggcggagcaggagtttccggtgagcaattgccggcagacacacggcgctcacacactaccgtaaggtcctacaggttctaggggggtaaagggagtcagctggaggggcacttacccaaggtcggcgcgttggtggagctgcccgcgtcgcgcagcgaccgcacggcggaactccaaccccggcgagaaatctcgccctcccaggtcactcagtcgcccgggcacgccttctgctatcctcctggtgccacgtgatggccacgaatcccgcccaggtgtaggaccacccgcgcgacgtccgagcgaatcaagcaacgacggcggcgcttctcccaaccctctgactttggagcttgcacggcagcggtggtcttcggttcctaagcgcggaagctatgcaagcgaggcagctaggtttacgccgcgaggatcccgcacccttat

SEQ ID NO: 60709 - DNA, 933 bp, Arabidopsis thaliana landsberg
aacaccaaacgcagacatacacacaaacgtaacttttgtgctcacattaatacatttaaatgcatgacacgaacacatactctagatggggttgtttatattgtatgatgaatgagtgctaaacagaagtttatgtaactacttactaaggtttatagtttatataagaggcttatcagtgaactgttagagaagttcatttcgtttgaggagcgttacaacactcagcttgcagcccttaccgcaagttgctccaaaatcacgtcagctcataatacttatgccgaccgagtcgacactcttactccaaggactttgcgaacctcaagatcaagagggcgtttagagtttttacgaccctatccacccgaaccctctgagtttctcaaactactgcaaggcctcagctcccaaagtgtaaccggaggaagttctcagcagccaccaactgctcaaattaatacctaccacttctgtaggcttcaatgcttctataggcttcaatgcttctatatcccattatagcaaacactaatagataactttgaagaaaatcaatatgatcccaaaagaacaaaccatcctggtttttctattcttcaatcctgaatttcccaagttcaacaccattttaaatcacattgttcacatcataaaataactttgaaagaaaccaacaagttacattctaaacatttcgtcctttgaaaactcttaaaaacacattattaattaagcatcacagattaatcatacagtcactttacctcacaattttagcaacaaactcatcaatattcttatcagaatttcctccatcagacaaagcttcccttgcaaactccatcaatctccgagcgttttttctaatctccttccctttctccgacaaaaattccataacttcttccaccacattcacaattttcttcc

SEQ ID NO: 60710 - DNA, 1301 bp, Arabidopsis thaliana landsberg
atcagattatcagaacagagagatgaatgaagaatctgctgactcgtgcttgagaatacgcggcttctcccacagcgatttcaacttctttatgtcccgtaagttttacggcggaccctattaatgccatcttgcaggtgaaatgctaagcctaacaatggagtcttatcatcatatgaaaacatttatgctgtaaaacattcccatctctctctatctctctctccctctctctgactttggattctgctgttctttacttttgaggattatttttctttaaatttgtcaagaggatggtttacttgctaatattgggggtcaacaaaactaaagactctattttataagattttcatctatttatctccaaacattggtaagagggtaaacggagggaatgaagtctggataatgcaattcctaacatgaccttcaataaaaatgttataatccgaaatgtttagccaaattcgacatctagtcgagttaattatttgtgacattactttgccaattgaagaacttgtttttgtcaaactgggtagttaaaagtaaaaaaaacgagttagttcgtctcatatctatgaataaacccgaatcttacttaaaatgggggaaaagaacaacaaaaatactaatatcaaaagaatttgtctagaacgagagacaatgcgtgtgagacagaattgaaatgtgtcatttcttcttcttcttgctatcctcggctctaatgagctgaacaggagccgctggtaccctaaaccaccattctcttatccgcctctctagccggtcactactcgctttcctccacccaacttccctcgtgaaccactctacaaacgcaatcgttattaagtacttaacaggaacaactgccaatataactgccacaaccacaagcgatatagccgttgtatctgtcgcctgaaaacatatcagagagacaagagagttactattaactgcggacacctatttatcctagccatcatcatgttttgatataacattatacctgaggaagaattgcaagggtaattgctcttattttgaggagaccaacgttaacagcttggattagcgactcgaactgactaattgcatcttgtagtacgagaagctgctccaccgcgtttttacttggtggagctttcacacgaacggtttttggttctttccctttgttgaattgcttacgccacatcattactatagctactaggagtaatattgacggtaatatgaaaccgatccacccactgcataaataacaagattgatggtgtcatcacatg

SEQ ID NO: 60711 - DNA, 519 bp, Arabidopsis thaliana landsberg
gttgaatttcgtcgtcttggtgagcaattgcacgcacaagttatatctaacggttgggaaactgtggatcacgatggaaggttggcgaaaagtcttgttcatatgtatgcatcatctggcttgattgcttcagctcaatctctgcttaatgaaagctttgatttgcagtcttgtaacattattatcaaccgttatctaaagaacggggatttggagcgagctgaaactctgttcgagagagtcaagagcttacatgacaaagtatcttggacatcgatgatcgatggatatctagaagcgggtgatgtatccagggcctttggtctgtttcagaaacttcacgacaaagacggtgttacatggacggttatgatctcaggtcttgtccaaaacgaactttttgcagaagctgcatccttactgtcagatatggtgagatgtggtctgaaaccgttgaactcgacttactctgttcttttagttctgcggagccacatcgaatctcgatcagggagcata

SEQ ID NO: 60712 - DNA, 385 bp, Arabidopsis thaliana landsberg
tagtggcgaaagggggatgagctgcatggtgagtaaaatgggtaacccctcacatttccccacaacaaccttgccaaacgactgacagggaatggctcgggcgtctaaggggcgctctatctcacattatgtgcgcggtgctcaccgcccgctttgcatgcgggaaacctggcttgccctatgcattgatgaatcagacctcgccctgagagaggccatatgcgtattgtgcgctataccgctatctcgttaactgactacactgcatacgaccctcaagtgtagagagcggagtcagctgagtctaaggagggaactcacttatacacatagccaggggctcactgacgacataacatgtgagcaacctgccaggccaacggca

SEQ ID NO: 60713 - DNA, 327 bp, Arabidopsis thaliana landsberg
  unsure (1)..(327): unsure at all n locations
atggaaaatcttagattactttatcataatatgtcttgagaaccttatatatttngatacatataattcataaatataactagattgcaaaatttcttagttggcactttggcaaacaaattaaagagctggaattttatttttttgttttgttggcaacttagcatttgtgatgcacaatccgcaagacttgccgagttttttggtttggtcggccaatatttctaacgaaattgggtcttactctagtgttcacctttttcacatcacaacgttaaagtaaacactctcgcgggctccaaagccccgctagtggtagtatcgtaa

SEQ ID NO: 60714 - DNA, 514 bp, Arabidopsis thaliana landsberg
tcaagttttagtgttgatcacaaactcaaataaaaagaagctaaaccggtttattggttctgaaacgaattacagctcaagattgaaagagacgcaggtcgagtgttcaaaggatggcatgaaggaaaaatcttctttgcaccaacttataagtactcttataactctgatgcttacgcgggagacactagcaaagaaaagaagaacaagagaagaactccggcctggtatatatagtaaaccggatatattctatttctgattttgattggttttggttcggttaatctgaaccaggcttctgtacattttcgtcaggtgcgataggattctttggcacggtgatggaatccggcagctctcgtacgtgcgcggcgagtcacgtttctccgatcaccggccggtttgctccgtgtttgtcgtcgacgttgaggtttgcgagggtaaaaccggaactaggagacaataacttacatcaactgttgaaaaacgtcttggtagaattaagatataa

SEQ ID NO: 60715 - DNA, 464 bp, Arabidopsis thaliana landsberg
gatttgaaatgggtcaaaagtctgactaatggaaaatagtaataaagatttgatgggccaacaaaataatttgtgttgttgagattaattcaattgttaattttccttctgtcacttggaaagaatatgactttagattgcaagaaccgacaacgatagatatcttttaaattattagaacatgacaaagctcactgattagtatattatttgtagccattgttttcttcaatataaggacaaatatttatttctgtaaaatcattctttttggtcatattgaaacagattgaaagagatgtaaaaagtagaagagaatctcaagtttggattaaagaaacaaactaataaacacagtttcatagattcataatatataatgacagtaccactagagtggcttaattacaaggagtttcacagtagacgcgaaaagcaaaacgcttaactgttcactagtcaat

SEQ ID NO: 60716 - DNA, 466 bp, Arabidopsis thaliana landsberg
  unsure (1)..(466): unsure at all n locations
tttctgcgcgacttaagcttcgatgatttatcaaaattctaatcaatgcgtgaaatatgtaatgattacatatggtacgatcaagacctttatccataataataataagtgtcttactaatcttttaatatttgttacatttagatttatctcatgctttgaaaaaggccatcagctaaacgataaaacacttgtaggtgaataaaaattatgataaaccaacacgtccaagagaacggacgaataatattttttccgatgagataaaagagcccacccaccatatcagttctggtcaacggacaacaaataagtaatgcattaatctcggtaataaactactagtaataacaatggtattaatacactaatttcatgatttaatgtgcanagatatactcccacgtgccgtaacacgtgcttcgtgaacctctagatcactttgtcgacagttttttcgtttcct

SEQ ID NO: 60717 - DNA, 1145 bp, Arabidopsis thaliana landsberg
tcttatattcgcgactgtttcatccgggggaggatttgtgtggggatgggcgcttttgctatctcgagttgacttccaagttaatcctaaccacatcacatacttctattattccattttcaacctaatgtaaataattcatatacatgacaaatgcatttagagagaaaaaaaacatcattcatgacgacaaaaacttagtctattgaacttttctagcgttttctcttgccagcatccgggttcatcaaaatctgtatattgcatattattgtcattattgacaaaaagacattatttacaacttctatgtatcgtatatttataaacgtctagatgtctttttaatttaaaacatctttgtaaacctttaatcaaatatctgattttaaataaaatcaaacataaacataaacaaatatagtgttgtggaagcacttggcccaatggttgattaagggttcattaacgcccgctaaaatgtttttttttctaaaacagatgaatgtaacctaacgtgtgtctcgtctctagaaaacataagattcttaaattctaacttctaagttaagaaaaaaaaacattacttgacataatatatcaattagaatgtattttttttagttagaatattttgtttggatcaaaatatcttttggattttaaatcactaataaactgcaaggttcaaaatatagttaggttcaatagcttagttttcaaattttactcaatttagtataatctttccgattttaagatgtttgataaagtgaaacgaaaaaataaattactataggtgtgacatgtatttgtttgtgtgtgttattttgtgtgaatgtatgtcacaactcgcgagtattttatacggtagagggtagggtgtcttcttcattgcatctctctagagtctggaccgtctggcatatatatgaaacaaatataccacaaagaatttaaagattcaacaaaatccaaagaaaatataagaacaaaactcaagctagattcttcatatacatgcatatacatatgatgaatcgagatgagcatattgcaaataaagttgaaggatcaatctctagcttctccggggagaccagtacttcctcaaaacaaatctatgttaatcccgtgaccacgac

SEQ ID NO: 60718 - DNA, 510 bp, Arabidopsis thaliana landsberg
gatcttccgcctcctggcttctctgctgttcgacgccattgcctcaccggaatatttcttgtcttcggagcgaggaaaagaggaaaccaattctcgacggggtcagctcagcttggtcctttttaaacgcggattttaaatcacttatttcttcaaacgcaaatcgtcgtcactaaagagtttgtcgcgtttagaataatgggcttcttaacgggccaattcaagtgtgcccaattacttcaaaatcctaaattgattggataggaccaaaagtcaaagagaatcatcaagacaagtgtctttagttttggtcacggcatatgccaaaaaggcccaactagtgtaatagaaaaaagagagcgttgcctccacgcgaccacgaccagagcccccaccattcctttttaaaattcaattcaatcacccacagtttcttcatcactgcgagagagaccaaaaccaaaaagagagagagcgagagggagatgcaatcgctgcatgataaggcat

SEQ ID NO: 60719 - DNA, 1481 bp, Arabidopsis thaliana landsberg
  unsure (1)..(1481): unsure at all n locations
gaagatcctagatcgaggatctgcccgtttagcctttatcactggtcagatcaacggcgttccttctccacttttttccgattctacttcttccctttcccagtctgaccttcaaactgaccaatccttaccggatacgattccccctcgcgatcagattcttaaagctcaagaaatcggtactctttcgctctctctttctctagggaatattgtcatccttggattgtttgtgtgtgtaagaatttgagcgacacaatcgaattttacttactctattgggtgaaaggataatcaaattggcttctttgatcagattttatgtgtgtttggctcgtttcagagtggaattcatgtgtgttaagaacccggcttgaaccattggatgtttgaaatagggcaaatttgtagagaagaataggacaacgcattatctacatttttatcttttagtttattttgtcctctgagtatagcagttaatgggcagtgaagctgttaaatccagatttcaacttggaacctacttgtctttagctgaaattagatattatgaacctgatttcactgttctctacttttgcttaagtcacctcgccccttgaaattttctttgccattctgtgaaattctttataggtgtggttcaaccacagtcaagtgtttggaaagcttattatgttgtgtgtttttgaaatttgcttgccttgtattgtgtcacaaagtttggaaggaaaagattgctacgctgcttgattggagccaataaatcttaaggcgttgtatatattcacaatcagtgggttcttagtggtggtggaaaaacccattgattgtgaatgttctttttggcgtttcttgaagctaacctttgctgattttgatgatccttggttgtgaaattgcagttttcacaagtcaccaggacaacatctctgatgctgcaatgcttgagaatgtggatcatatcatccatcaaagcagggaagaacctcttcagcctcagaggcatgctgaaacattggcagaagcctctgcttcagatcctagagacacaacaacaatacaaccgcctcctacaacatcaagtgttcaaaacccatcagtggtagatttaggtgcttctcaagcatttattcctgtggttagttttgtgaacgccatcacaccaaagcacattggagcggccattgatgcttcggaatacgcacggatgttcacagctcttgcgattgcacttgttgtcatactatctcatctcggtttctcttccctaggcaacattgtaagcttcaggccagttttcttgcttgtcttgactgatgcacaattgtgcttggacgtgttctgctgagtcatcgtggagactcttcctcggcctcagggacggtgatgagcgggcagggtattgtggaccaagtaggaacngctttggagacggtgatgatggtgaagaagaaatggatgcactcntatggatt

SEQ ID NO: 60720 - DNA, 185 bp, Arabidopsis thaliana landsberg
tatttaaaaattttggtttaagattagattttaggcgttaggctggcagcaacaccgatactattaaccgattcactaagattacgatgtgtaaatgctaaatataagagaagataaaggacctagttgtcaataaaaagcaccacttgctaattgaagatcattgtctacgtgtgaacgagctg

SEQ ID NO: 60721 - DNA, 1029 bp, Arabidopsis thaliana landsberg
tgatggtagcgaccagtcttgagttccattcacgctaaatcacgtggactataaagattacacgtaccataaccataaagctctataaagattgcaattcaaaacaaaaaatagaaaagaattgtaaatgtaggggctagtttctgaatttgcttgctgtaaatgtaacatttcctcaagttttgacatagtttttaaaaaatctccttatagggacatgtcacatgtgttggatgattgattaacaatccggtggaccagaaaacaatgagtaattatacggaggccggctttagttaaacttcacacatcaaaatatatggcccatccctcgccttttgcaattgtcgccgaccggcgcgtgacgatctacaaaatttcgattttaaactcagaaaaatacataatacaatatacgtcaaaattgatctacttatactaatggtagttgaaggaaaaaaatcagaactctatgacttgtgttataccatatattacgacaaaaaaaaagggattaaaaagtcgttgacgtttgacttaagtgccaaattaattaaccaatgcttaatgacctaaccaaagtcactttttattttagtccggtatgacttgtgacggcgacgctgaaaacgattgaagtacacgcgcggggtcctccagcctaattgccacctgtacaccagccctgtccgtcgtaactataaaaatctcattttccttttttattttatttccaaacctccaaacaattaaagaaacggcaaaaatttatgctgaaatctttttttcttccttattctcctctttcgcttgatttcgccgtccgattatctctatcgccgataaatatccggcgtcactcagtagatcttgaagctgttgctttcttgctttgctcttcgcgcaagattctctttctctgttttcattgaggattcgaagttgatcgctatttgattcgattggttttgagttttcgatcctcgacggtgattgaattctcctctttactttatttttggctttcga

SEQ ID NO: 60722 - DNA, 582 bp, Arabidopsis thaliana landsberg
ttttctttactcttgttttcttttcattctctctttatatttttctttttggatatatttttttttcttatctttaaacttatttgcaaaaactaaatgaatctcgaaattccttttaaaacttcgctcaggctacgattttaattttcaaaaaactaaaatgtatatgtgacttagtaaaacgtttcattcaataaagaacataagcacatatacacacatgtttacatataaatcataaaatatagtaaatttatctgaactaatatatatatatatatatatatatatatatatatttttggagattttagtttattataacgcttaaaattttgttttttggttagagtctttgggtctttaaattttttttaaaaaataagacaatctaaacttttatttatgttaaaacaaattttgtaagtataacaaaagtagcattcacaaccgttgataacttgatatagaacacagacttccacatgctttaaatggaaatcataaaatatagtgatattacaagaaatacaccattatttcgtacttcatttgcaatttagctaagttgaatctattaaa

SEQ ID NO: 60723 - DNA, 1802 bp, Arabidopsis thaliana landsberg
cacgctaatccattgatattgactatataaagttgcaggtcactttgatttctaaaaaaatgacaggtcacaaatatgcgtgggtctagtcttaatcttattaggcaccgcatgagaaactaaaaattattggtaaacgagtaaacgactcgtttaacgcgtcgtgaattaaacatgctcagattcttcgcttggatcttctattcttttaatatgggttcccactttttatatgacatttttacaatttacagatactataaacaaagacacacgcattaaacgcggtcgaaggttagaaaatggttttcttattctttggtcatcgtttatcaaaaaaaaagttaacaacaaccatagttgtcaaatgacaacccaagaaaaaaacacaattattattaaaccaatgtgtgtttgtaacttcctttattattattttgcagagtttttctatataaaaaaaaccacaattattattattataccaatgtgtgtttgaaagaattataataatgagaatgtaattaaaaattaattactttagattaaaaatagttataaactagatgtaatcgctttctacccaaatgtcgttgaataaacattattattcgtagtcgtatcatttaatcagattaaagggaacatgtcaacaacttaagtgtatgacatataccatgtttaaataattgtaacctgtcaagtcacatcaaactgattgatgtttcattttcaaatgcgattctcgtggacttcaatatgtggttcacaagctttttgtaggtgtcttctttttattcttcttttatatgtgtagtcattaacaaatgtttttttttaaatttagctttaatgtcaatctagtcacgttagatcattaccaaacctgtaatcaaatgagcgatcgagtattcagtttacttaaatctttgtattataaacttgttaaattatagatttatttatattgtatgcaataagtttacaacaaatttaaaaatttaatacttagaaaatttaatacgtttttagtcctcatgaattatcaatcaatccaatggactgcaaatgatcaactgacttgcgtttcgtctaccattttgcaagcatcatatatgtatgtgcaaagtattaagctgttacgttctaaagttgattaaagttactatgttccaaagccctatgttcatttttttttttaataataatctatcttgaacttccctattttaaaaatcataaacgtactacagaaattaaaatgttgaaatcatataaaattatcctaaatgtgttatcttacaatatgaatttcttaacaatatgtatcttgactgcatatgttctacaaaccatatgaattttgatatcgtaatctcttgtattaaacataccatttggtcgagatttgtaatctaattgatcaatacttttaatgtctcaaaatcattaattgaaattttataagaaatagaagggttttttttgccaaaatacaaaggttattttatcaatcaatatagttcacgctctatctgtgagagattttaataccaagaggtttatatgcaatttattctaaactcaataacttagcaaattattttgacccgtttcaacatcaatttgacccgacccggttggttggagcatacgaagatagattttcgagttgtcgtctccttttcccggtcagttttagtggggaagcagaagatgtcgaccggtttagctctgaatcgctgttcactttcggtatgtagaacggccgtttctttacttaaccggccaactgttctccg

SEQ ID NO: 60724 - DNA, 189 bp, Arabidopsis thaliana landsberg
taaaaaagattaaagacaatattaaaattatataataaataatgatgattctaccatatttggtagtagtaatttgtaaaaaactttcttttaatgtaattgagttttcagaattcttattttttaccaatccacacgtatccaactaatattacattaaataaataaatgttcaagaaactaattgga

SEQ ID NO: 60725 - DNA, 1477 bp, Arabidopsis thaliana landsberg
attgtttgctggattctgtgaatcatctctcttggcatctacattaatatgtgtgctgggggtcatcttatctacatctgaattagaaaaattcccgttttcctctatgttgacttcactattatgaacttgagtgctagtctccggacttttcacttgatctttggcaaaatttggggtagtattattcccatccaaatacacagaatcatcatccatattctctgccgcacacctaataacctgatataaaaccaaatgaagactgatacgtgagctaaagattattccttcaaaccaacgaaacccctggcaccacaagccccaaatgccgctttaacacaagaaagaaccatcacttgacaattgagcaacaagatgtgagggctaaacttacaggcaaattgtcctctttatactaaaaatgtatatttctcagtaatatatcttctggtactttaatcaccattaatattaactaagaaaattataggaaaacacaacctatcagtgactaaattctccaaaaccatgctcattaagaatgatatccactaaagaagatagtcgtgactatgctacttgtaacaccaagacgccttcaatcagatatatgcaaagttacgataaggaactgaaagaatatgcataacagacctgtttagatcttttcttgcgtcttttccgtttcaaacgaagttgaagtacacgatcacaagttatatcatcctcttctttgacctgtagatgatttaatgtcatactaaagctcataaagggtaaggcaggagttgtgagtagtcttaaatggtatttcatatatatagatttactgccaactccgcaaaagcaagaacataaggagcagccagaaaaggttataatttcaaaagtagaacgcttaattccagaaatctaagaagttaagtgaaacactaatacctttagataattttattttgttctaacagccaaaaaaggtaatactttcaaaattcgaagacttggtaacagaaatctaagaagttaagtcaaaagtaatacccttatataatttgtcttttgttcttcagtaagggcaagttctctttcgttgtcaattgcatcagctaaaaatgggtctgctaagcttgcatcaatctcttcaatttcctccacctaacaacaaaattaaataataaatactgtgataatcactccagactgccaggagtataattaagattctcaagctgtaggatggcgtgatctaggataataaaagcctgattgcatcccaaggttgtaaatagtgcctcgcatcatctaaaactgctacaactacaactaatgataaccaagtataagctcgaatttatttatagagtttggcttaatattttgatcctaatgaaaacctacattgcagagtaggttatgttttcctgtcatgattatggcataacagcgggccaaaaattcagcaacaagcaaacag

SEQ ID NO: 60726 - DNA, 575 bp, Arabidopsis thaliana landsberg
gaataacgctaaagaacgcgtatggctctgataacatattattaatatttacatttattttatttaaagtagtccattcataattgcacacgactaaatgctacacaacttgtcttagttgtttaatcaagatatttttaccttatgatattttgtgaaaaatgatacctataaaatccctaatgagcacatcaaccttttttaccttattatattttgtgaaaaatgatatctataaaatccctaatgaccacatcaaccttgaatcttctctaataaacctttttttgcaaacacgcactaaaccaaaaattaacatctcaagaggaaaccatttaaaaaaaaaacagagttaaattaagatcaacaaatatagttgaaaagaacatatgttaagcaacattaccataaattcataattagtagtgattaaaacttaagaatactaaagtatgaatatgaaaattggtgtatttctttgtaggccgtaatatgcgggaaatttggaggttatcctattcattgaaattcatatatgtttgtaattatcattttttaaaatactaaaaaataaa

SEQ ID NO: 60727 - DNA, 1468 bp, Arabidopsis thaliana landsberg
aagattggggtccccatacacaatggtctggccttgccaccaaaaagaaatatatatacgaaaaatacaaataacgcatttattcagaattgactttacttcttcagtttgtttttatgttttccttggtgttggtttttccacaaacgtgataacaccaaaatgtagtgtaaaattgtaggagcattataatcatatacccgattgtctactccgggttgcaagtggcgcgacgatattagtgagtcagtggcatccacaaagatgataagaaacattctcgagattggcttggtccatgatcacattcaatcaccctgagaaaaacagtcccaacattaaatgctcgaggccgttttcaaattttcgacaaaggttgttaatacaaactatgcttttgatttagggatatcttattccggttcacgagtgttatactacccctttatcaacatgatggactattgataacttaatttacaaatttttactcaattaagtagttttttattaatgattcattgccttcatgtttggagtttttttgtcaagagcttcaaatcaattgtgattaagtgaagttttgaccactaaaatgtcaccttgtagctgtaactctataattctataggctgagactcattgtcctaagaccaaaaataatttgttggtgcttaattggttgaaagaaaaaggagttatttggtaacacaacagggaggagttggtgagaattgagaacgacttaggaattggttgcatccagcacacatttgacaaatcttttgtcgatttcatcaccacctttcgccaactttgacaaactctgcaaaattacaatatataattcaacattcgtttaccttaaatatactacacggcaagcatgactcggtttgacgtgttactgtgaggttacgactatcttcaactttttggaagtactttttatacattcaaaattatataaaggaaaatgattttataattgaggacctaatacgaatgcatgtaggttaggtgattagtaacatcggagacaagataagacagtacatgatcgggacgcaaatgaggtagaacataaagtatcaaaaactgaaaacttgcattttgttctaaatgtgtttctagattcatatagaatggaaacgtgacaaaacaatacagcaacaaaatgcttatgtaaaaactactttttcacggtaacaatataccaccacaaatcataaagtcagattgtaaggaaaaaactaaaattgatttgctgaaaatgtaaaattactatgtcggtcgtgagttatattttagggaggtgctttttgtcaaatcaccaaatctctataataatcatacttactgtaacaactttgtaaaactagattggtcttaaaagattaaccaaattattcaaaaacaaaaagaacaatcctttaaattatgaacttgcttggtttttgttaaacta

SEQ ID NO: 60728 - DNA, 1336 bp, Arabidopsis thaliana landsberg
ccaatcctaatcaaagaaaaaggcttaatttccatcacgcttggagttatatgacaataagaacataccaacttagagtacttttttctttataataaaaactgaaacaatctcgaatcatcatctttgtttttggttatagaattagtgaaatgatgaatcatagagaacaaattgtgatgcgaaaaattgtacaatatacataaaaattgtgaaatgtcactaccaaatgaatcatttgattagaaaaatctcacctagagtgaatcatttttaaaaaaagaatggagaacttatctgaaaccggacaagcttggcacgaacaggtcagtggctacattgtgtgaagtccagcgagtgatctaagcttctcgcatagtatgaacgtgatcatcgtttgtggcccgagccgtgcgaaaattgcaaagcctctgtgtcaagtaagaaaacataatacatttttattaatttatgtactacgaattatataaatatatcttcatgaacaagacggtttttttttcttcaccctttgtaaagtgccagaggaccttctttgcgaacaacctgaaatatcatactcgttaacgatcaacgcaagcaaacaagcaatgctcagtgagaatgtattaatagaagggcttgaaaacattaccttgtaaccgcaatgaaacccgtttctgtaggttttggtgctttcagaaccttgctgcaacatcaagcgggttttaatcatgtccatgggtgcggttatcagtgtgcttactaaacctgcaaccacacttgagcttcattcctcaagtgctaaagtaagttagtttttgacgcttcaattgatttttgtctgaaaaagaaacagcagtaattactgctaaacttttaccacaaatgaagatgaaacccttcttctaaagaagttcgtttaaccagaatctgcaattacaagaaaatttagaagctgaagtgttagaatcaataaatggttgagaagcaggattacttgacaatttctcaatttcaaaacagatcatggaaattacttcatggtttttaaaaagtggaaaatagtagtcttagaatatgacccgtttggcttcatcatatgttgcaagctgtgaggcagttagtgctgcagctctaaccatggcaggaccaactcctttccataaagctcctatgccttctttagagactatatcccgcacttctgcaatgggaactgcgtttggattcatctgcaaccttacctaacgaaatgcaaaatgaaatgtgtcttaaaaaccgaaaaagagatctaatgaacagaataaaaccaatacttgaggtttcatctacc

SEQ ID NO: 60729 - DNA, 277 bp, Arabidopsis thaliana landsberg
gagtttaattttggatgaggaccactttatgatatcaaaggggcaacacaacacgtgagcaattcataagcgaagagatccactgaattcggtgttattagggaaactttggtcagtccaactcattctttaagatttctatggaaggtggtgttctcacggtaatgaacaaacggtacttcttggttcaaagtgtcattggaggacttccaccccctttcacttgaagatgaaataatttgggctatgcagattatcattacatgaaggattgatt

SEQ ID NO: 60730 - DNA, 499 bp, Arabidopsis thaliana landsberg
  unsure (1)..(499): unsure at all n locations
cgtcgtagggtgtaggttggacagtcgtagggtttaaaagtggggaggaaaggtttttatagcccgcacaaatcagatatagctaattttttgcagctgcgcaattcccgattgaannnnnnnnnnnnnnnnnnnnnnnnntatttcattaggaactctatgtaaattcctggttcaactagaaattgaaattccggttgaacctaaaaattctagagaaaaccttgatgaattccgttggcataggacccggttcaacctgtgtgcacagggaaaaacaacttttgaagtaaatgagaaagaaaacaaatggtggctacgtaacttttcaaaacaaggtccctattactaagatagaacataccatccttaccttgtgaaaagaataagcatgcgaagatccctattactaagatagaacaataaaatagcttgtgaatcttcgccagaaaccatttgcagatctttattttccacctcttggtttcgcgttagctca

SEQ ID NO: 60731 - DNA, 234 bp, Arabidopsis thaliana landsberg
ttggacatcggcttcattcatcgaaacaaattagggttctttcataaaaaaaactttattaataattagggcttttcttctcgagaaacgcaaaattgtgaaactcactccagacatgtttaattttgttagcatcccgggatagatctaagtagtttggcaatggctagttaactagggtttctttcgaaaacatcatatcaaagccgcttggattgatcagtgttttaagct

SEQ ID NO: 60732 - DNA, 511 bp, Arabidopsis thaliana landsberg
acattttctttttttgagagagtcgtgagtgtcacaataattgacagatgacgaaaagaaaaccagagttttatctacgagctgaaacacaagaactcactgttaagactcagtttcaagtaaaagtttctacaaagttcgaatgttttcaacatcgagtgaagtaaaccagatttcactgaaaaccttatcgtgtttctctctacttcacgagttttcttaatacagattctgcgcgctgctcaaatcgaggtagtgcccattcgtgctggattatgtctaaaccatccttctctgcacccagactctgatcaattttgcaaggcaacgataccaaatcaggtatggccacggagcgaacaaaacaacaacacttagcaatcatatattcatatatagtttgattacctttgatgcatcaaatccaaacccacccatttgcatcataccgttgtgtgtcattaatggctgcatacgaagcaaaagtaaaagattttgaccacagtttagt

SEQ ID NO: 60733 - DNA, 1776 bp, Arabidopsis thaliana landsberg
tacgttttatgatatcaagttagttattatatatactatattacacttatatatataaggttaatcacacgtttctaattataacaacgcacatattaattaattcctccctctaatgcattatagtactttcattatccatttagaagactttttttgtttctgtttcaaaaaaccagttaactaaaatttaatttatatgcatggttaaacggtcaacaaaattattttacattcactcgtgttgattttctagtcggtaaaaactaaaaaggaacctcgtcaataatagtaacatcagttagtcgttacatcatgagtaagtatcgtaattggcgccgtacgtttgttgattaaccatacaaaaaaaaagaatgataattatgtgatttcttatacactaactaacattcagtaattaaatctttgtttataccacagcgatataaattatgtgaatgataattatgtgatttcttatgttttgaatccgtaataattaaccgaacatgtttgataatcatatttaacaaaatctttgtttataccacagcgatataaattaaatgattagggacggtactaatattacagttgaatatgtattatagtttgtaagagatttgatgtgcatgtgtttatttatagtttgtacattcattttcccttgagcgtaaggacagcgtcactatgacatcacatcggtccgtgagaatgatagtataacgaatatgcacgtaactcgtaatgacataggtttctttttaaaccgttgatgttcgtgtgtgtttagtatcatatgatttacatttggccaaaacgacggaaattggaatttactaaaaaaaattggggaaaaagttttttttttataagtaataatatgaatctgtttaatgggccttcagaagtggggaagagattggagtgtgggttggcgaatgtaatcatttcgtttttattatatttttactttgtttttgttcgtatatgtatttgaaattttacattattcgttttcacatccatcacctttcttcctctcgctttacacagtttcaataattacattttcagtgatctctgtacaattgctagtttcattttaagctttatgtctaactaggaccgtaactacgactagttttgtccggttcgttcggactgttcccatagatttgagtaaccggcaaatcggataggattgacaaacaaaacttgtggtttgtttacgaaatctagaatcagcaatttggtgcctagacgagttgaaaataaaacagtaataatgagttacttagaaccgtaaacaattcagtttagcgagtgaagctggaggaatgagtccattgtctacacatgtatctaatctaatactaaaaaacattgatctcgttgactttctaacaaacaaaaaaatcggaacacaacatacttataaagttgacttttgggttaatcacaactaatgaaacccaccaaaaagggaataatagaatctttatcgtacaaatttacaacacatatatatgtgcataacaatttataaagatttagtttaatataagggacagctaaggaaagaaaagaagatttttaaaaggaagaagatttttttctgaaagaaatataagagcggggcatgaagataaatgatgacaccatgcggggactctgcgtctgttaagagttataatttgacaacattatattgatccgaccatccaaagctgtcttgtaatgtccttcctctgtcactttatgcgaccactctca

SEQ ID NO: 60734 - DNA, 522 bp, Arabidopsis thaliana landsberg
  unsure (1)..(522): unsure at all n locations
cttccgnnnnnnnnnnnnnnnnnnnnnnnnnnnnnnnnnnnnnnnnnnnnnnnnnnnnnnnnnnnnnnnnnnnnnnnnnnnnnnnnnnnnnnnnnnnnnnnnnnnnnnnnnnnnnnnnnnnnnnnnnnnnnnnnnnnnnnnnnnnnnnnnnnnnnnnnnnnnnnnnnnnnnnnnnnnnnnnnnnnnnnnnnnnnnnnnnnnnnnnnnnnnnnnnnnnnnnnnnnnnnnnnnnnnnnnnnnnnnnnnnnnnnnnnnnnnnnnnnnnnnnnnnnnnnnnnnnnnnnnggggggggccccccccttttttttcttttttttccccccccccgcccccaacaaaaaagaagaggttttttttttttttggggtgtgtggaggggggccacacaaacaatcttttttatggggaaaaaagaaaaaacccccccctcctttttacaaaaaaaaatttttccccataaaaaaaaaaaaaacaacctctcctttttttttttttttttttttataaaaaaaaaaaaacaa

SEQ ID NO: 60735 - DNA, 485 bp, Arabidopsis thaliana landsberg
gtacaacgcggtggttcacgctcttgccaaagctagctttgtctccgaggcgagaaatttaatgaagacaatggaggaggagaaagggattgagcccaatgttgttacttacaactctctcatcaaacctctatgcaaggctagaaaaaccgaacaggctaaacaggttttcgatgagatgctggagaaaggactcttcccaacaatccgtacatatcatgcgtttatgcggattctaagaacaggagaggaggtttttgagctattagctaaaatgagaaagatgggctgtgaaccaactgtggagacatacataatgctgatccgtaagttatgtaggtggcgcgatttcgataatgtgttattgatgtgggatgagatgaaggaaaagaccgttggtccagaccttagctcatacattgtgatgatacatggtctgttcttgaatggtaagatagaagaagcgtatgggtgctataaagaga

SEQ ID NO: 60736 - DNA, 450 bp, Arabidopsis thaliana landsberg
tctatttgctatacgtttttgcattaaaaaaaaaaatagtaatgctaataataatatttcaaattatacaaatgcatagcaaaaacattaagtctaaatatattatgttggtgttaaatatttgtcacatattatattttcaacctaaaatgagatgaattaatgatgaattagtaactacataactcgttaacaatatccaaaattatactaactcataagaattttaatatcattttatctacgtctctttttattgtagaaaattttaatctgcaaaacttctttcacagtttccaccttccaccatgcaaatttgcaactgaacatcattatgtcatatacaactttcacgtttcccaccaagcaaatcttcaatgacggcaactaatgatagaacatcaatcattatgtcactttttaaacatgacatgcttttgcttcatttga

SEQ ID NO: 60737 - DNA, 1139 bp, Arabidopsis thaliana landsberg
attttctcacctttttggaattcagaatcttacagagaaagcatagataaatccaaaaacatagagaaagcaatgagggtaagtgagacaacccacaagaagttgtattcataaccataataattcttcatgaactcaacaaccgtctcacccgtatcgagccttgtctccacatctccgtattgagctatcgtcagtccgtacaacccccaccacccgggacacacgtaggtgaaccatctcaaccatacatgcattctctgcaaagttaatatccatttaaattatgagcattcatagccaagctgaaactactataattgattaattgtgaacattttggttacaaaatttagaaagagaatctacagaatttgttacttacgggacgaggaatagtgaatcctgaaaagacgttccacgatgtggatatgacaccattgagtatcgaagcgatttcttgattagggcttacggaaatgaccataataccagtgtatatagagtagaggatgctgatgaaggtaaagaatatgttcaaaaaaaacttggaagctgtccattcgtatcctatcatcccatagacaataactccatagatgcaagcttgagccattgtatatgggatctcgattatcacctacaaaatgtataatgttcaagtttataaaccaaaacgtattataaaacttgaaccaaaacgtatgatagggtttaattggtacatagaaaatgaaatacctgtgaaaatgcatagggtagagcggagtacattccagcaccggcttctcgataaaaaacagtacgttcagcgattacaactggacgtacagtagccgcactttgtgaacttaagaagccaacaacggttgacatcgcgcctacactattgaagatatcttgccttgttccttttcgttttccgaggctccaaaagatgattccatacatgattccaacagcagccccgaaactgaaacgcaccgcgttataaggaacatttctccaatatgatttgtgttgcttccacaagcaagcttggaattgagagaggtaggattgtgaatattttgttgagaaatgaatgtcttgtgcatgaggaggaatatcgctcagttccttaatcagatctttgtttc

SEQ ID NO: 60738 - DNA, 1025 bp, Arabidopsis thaliana landsberg
aagtcacatgtaacaagaggatcgtcatcgttttgcatggcttatcctgtaatattttgctaaaagctttcttttttataaagaatcttatgataatagttacgtcactaaaattgcgatttttttaataccaaaccggcacaattttactataagtctataacataacgaaacataacataattcaattccaaacgaaatatgtcttcaaatgccatacagaaaaaacaaaattaatcgaagtttcatcaatgcctaacatagctcgaattgtcaaccttcttgaagttctactaaagagagagagaaaaagaaggtgttgctctagggtttcttcgtagcgaaagttttatatctcacactccaaaagaaaattattaactttttttttaatagaaaatcattaatctttaaggaaggtgttagcatgtgaaccatgaactgtaagactgcaaaagtgtgatgatgcgaaggatattttattcaaattattttggttaacacagttaaattatttaatggtgagtgagtccataacacgcatacttagataccgtttcactttcggctaacataattaaaaatttaattatattccactttttggttattatataatgttgtcgtttgcttagccaaccaatcctcgattacccaatcacacatgtagatccaaagtatttttttttttttttaatctctaaaacaccgtactttattaaactcgttcgaaaatgttggcctcatgagccaaccactccggaactaagtggcttacataggaaatgaaatgattaagtatgttaagtaatttgatttcttcgaaaaaaatgaaaatgattaactatcttattctcactagttttaagatcatggggttaaatcgaaacttttaattgcctcattatttttgctactaaaagccgattacaccttgatgttacgtaatcatattaacaaatcctagatgaaagtcatttgcttttttcatgagaagataactggtaatttaataccaatttaga

SEQ ID NO: 60739 - DNA, 561 bp, Arabidopsis thaliana landsberg
ggaggcggctctgcggggaccacggtggcggtgttggactcatccggggatggagcgcatcacgggcggtggcggtggcggttgcgataccaagtcgagatcgaaagtaaatcgagggtgatgtcgaggcgggatggagagaaaaccgacggacggaggaggttcgaggggaagtgtgggcaacagaacgaacggtccagattgatgggaggcagaacggtgggaaggcagaaccagaggaggcagactactcttaggttgttaataagtagtagagatttcatagataactataatatagagcagagaaaacatagaagacaagaaagtgggaagtcatgtggcaaactccaaactggcaattcaaaggataataatattgtttaaacataagtcatattcccttaaatatatgtaaagacaagtgaaaatagaagaaaccagaaataccggatataacctaaatgaagaacttacatacaggattatgcatgtctttagcaatcccaattttcacaagaacagagcgcagcatacccgacaatagtgaaaaaatatgtg

SEQ ID NO: 60740 - DNA, 374 bp, Arabidopsis thaliana landsberg
acacttaccttgccgtagcaagaggcatacggtaaagattcatcaagttttcacactttcgaaaatattttgtagtctttgttactcgttgttagctgctattatcatgctaatcgtaaccaaattttgtttttttataggagagctctaatggtgaagagagcagtgagagtgaaaccacaattgaattcacacaagagattcgctaatgcattcccaaagtattgtgagcttgttgataacgctaggctttattgcaccaatgctgttggtggtcctccaagggtaaattagtcaaaagtcaatatcaaatctattacgatgtcgtttttgggagagatactgatgtgtgtgttttaattgggttggtggag

SEQ ID NO: 60741 - DNA, 1230 bp, Arabidopsis thaliana landsberg
tcttcctcgatacgccagtaacaagcttcctccatggtcgatgcttctcatcggagcttcctcttgtttcctcggcttcggcgttctttggctctccgtcagccaaatcgttcttggcttgcctttttggctggtaacaaaactttatccattcctaaatttctgattcgaattgtttcttcatactccttaaacgccaaaatgagatacaacgaccaagtttgtaaaatcctttattttgggggttttcataaaccctagattgcatcgaatgcttaatcaagtttagatcttgttggtttgtgtcatcgattagatttataaactctattgtttcgtgtgaactcaaaagtttagtatttgtttgtaatgttgttgttgacagctttttgtagctctagctttagctaccaatagcaactcgtggttcggtacagcatctcttgtcaccaatatgaggaattttcctatgagccgaggccctgtggctggacttctcaaaggttatattgggatcagtggtgcagcattcactgtcttgttcagcatggtgcttcaccattcagctacggatctgcttctgtttcttacggttggtattccggttatatgcttaactgtgatgtatttcatccgcccctgtattccggctactggtgaagacccttctgagcccatgtatttcgcttttctgcttgtcactagtatactgtttgctgcttatcttgttgtgacgactgttttgagtgaggtgtttatactgcccagcatactcaaatatgttcttgtggctatcatggtgttacttttgttgtcgcctcttgcggttcccatcaagatgacactttttccgttcaaatgccaagagctctccactggggtcttcagacaatctagccaaagaggaaggtactcatgaagaaccgttgctgacaccttctacctcagcttcaaaccttgggcctatctttgagggagatgatgagtcggatatggaaatacttcttgctgaagcagaaggtgccgtgaagaagaagagaaaacccaggagaggtgaggatttcaagtttggccaagtttttgtcaaggcagatttctggctcctttggtttgtctacttcctcggcatgggttcaggtgttacagtctcgaacaacttggcacagatcggatttgcttttggtattaagcacacaccaatactcctgtgtcttttcagtttctacaact

SEQ ID NO: 60742 - DNA, 1767 bp, Arabidopsis thaliana landsberg
  unsure (1)..(1767): unsure at all n locations
agcaatgatttgtctttctagtgcttcagactcttctttatttcctaaacgtagccgtcttgtgacacagtgaggatggtaaaagtagccacaggtggctgacacgcattggaaaacctatgaacatgtttaaaacacaaagctcaaccaattacttgtcagtcaccattatcaacaaaacatgtctgaacagcattcaacattagagatcaataattgcatacctctgctgctccagaagagttatcagaagagccaaggttcttgcaaatgaagcattgatgtatcttatgctcacagtttgggcaaaagtatttctgaattgcctggaaaacaatccataaacagcattaacatagactccatgcctactcaagaaaaccaagacgcccagaaatattcagaactaatgaaagaatcatatatgttacatacttccacttgcatcttgttaaagccaagagaatcacaaagtgaatcttcaccatcttttttggtagcatgaaatgatctcaggcagcttccttcacaactgcagaaagcagaacacaagacttatgcatctggaataataacagtggatctttagaacctttgaaggcctcaattgcctcaaacgctgaatttgcgtttgcatgtttcacagtattaaaacattttcagtgtttcataaaatatttttgcaaatgccaaacgcaaacagaaggtacgcttgagtttcaaattagcaaaggaaattgttcaagacgctaaaggttgtagactatttgagaaaattcacactaaatgtaaaagcaaacgctggcataaacgcacacaaataatcaaggccttattctaataaagaaagtaaaaggtgtaagactaattatcagagataatcaaactacaagatcaatatccagcaaggaaacataccacaaaatctcgccaccattgtcacatattgcacaaacagactcaaaaaaatcatcgtcttcatcatccaattcatcttcatcggaagctacataagtgtcctcatctccaactatgaaatcatcttttgcattgtcctaataagtaataacaagttcgtatcagaaactaagaccgtgtgaaagtaagtgaaaaaaagggaaacggcacattaggaaagagtactcaagtgggataaaagattcgaacctcgtcaggtaatctccttttggtaggcttttttgtgagaaatgcaagtataaactagtaacacaagaaagaaaaacagcacaaaattaggagagaatcagggtaagaagatgatacatatacagaaaacattcaggccagaaagcgagctaaactcttgataacaaatatgggcatcacaagctctcaggaaacaaaagctacaacacctataagagatttaatggactcttctaattcaaaaatcccaaagaccagaaactctgaaaattctccatacaaaccttcgaattcgccaaatttatatctcttttcgcagcttcagcgattaaaccaatatgatccaccaaatcattctgcgatggcttcacatcatatgacctagaaacaacatccaatcactaaagttaaaaaccaaaagaatgaaaactcccagagagaagaacaaaagacctgaaaagcacaaatcaatcacctcaaacttctagttaatttctcccagagagctttctcggacgcttgnngattcctcctaagaaactgaatggaatgcacgtgaccaannacagtctaatcaaatcnccatagctttttctcggt

SEQ ID NO: 60743 - DNA, 906 bp, Arabidopsis thaliana landsberg
  unsure (1)..(906): unsure at all n locations
ataataataatttttcacacgtgccgaattcggctgtgtcaaaaattccgcgccattagcccatcgatacgaagtcgagttcaaagcccaacaaagttttaaaactatatatacattaaaaagttctttctttgttaatggaaggaaaaagtaaaatccggtaatggagaacgagagacgcagcggcggaggagacagtgttccgatctctgtccgaagcattaacggcgaatcgacgaccgttcaggtttcctctgacgggacaattcgtgacctaaagaaagccctaaaatcctgtttccctcccgcttcctcttcttccaatttccatctgtatatcaaggtaatgcttattattctactacactcgttcgcgattgctttcaagtttcgttttctaaatcagctcttcaaggataaaattagagtttctctctttttgtagggtgagaaattgaaattggacactagagtggctgcgattactattaatgacggtgatatcttgggtttatttccgtttaagaagaaggaacttcgacagactccaaaacctgatttatcaaaaccttcctccttgagttcaagaacctcaactatgaaagatgaaaacgctaaaagagctgaggatcattgtgttggtgagaaacgaaaacgggatgaagaagcgtgtccatatgaattctttaatgatgatttggagtctgagtgtaaagatgcattcaagggtcagaacacagagaagcttgctgaggttttaaagtccaggaattgcttgacatctccaggttctacaaaatgcttgatgtcatgggattcaagtagctctttgtgttcttgtcctgattgggtgaaaatgtctatggagacattcgcgnttttgatagtttttcatatgttcttcat

SEQ ID NO: 60744 - DNA, 1470 bp, Arabidopsis thaliana landsberg
gcaacgaccaatcacagatttatagtatcaaataaatttgttttttaaaatgtcaagttctctattttgggggcgggggtcgatctcctgccaaagcgtcaagctgtactagaggaaccgtttatacgactgaaatttctttcccaaaaggccaaaaaacgttgaaaaactatcttataatgcatatgcattcatagtttacgttcgccattgcagacatataatctaaacctttgaaaaacctaaagctagcatggaacttactcataacgcggatacaaagctttagcttttaatatcagaattgccttaaacaaaggggaatgcacacacatgtgttttccccactatttaagtggtgcatagcccgtggacaataaaaccaaacatttgttttgaggaaacatttataaacaataccaaaagttgaataaatacataaaccgtttctattccctcttagtgtatgttggtaagcgaggacccatttggatcctttgatgtctttattcaaaatattgtatcattaaaatatatattgtcggaaacccaaaaattctccctatattatattatccctatttcttccaaattattattacctaattagaatcaattttatatccatactttcataaatccatttatgtcttaatcacacggtggagaatcggagatacatgtaaatgatatggactaatcataagaattataactctgacacaagggttataaaaatgagagatgcttcgaatatgtaatcatcagaagaaataatatcctccaatttctaccaacttagattatttgatcaagttgtttccacacatatattatacaacatcgacatgaaaatccgtcttgttacaaagattgttgcactatacatgtgagaaaatcgaccatcgtcaaacacaccaaaacagaaaagacatgtgcaacaagttggtgtttattgacttatgcgtccctctccacttgcatactattaatgacactcttaaatcttaatacaattaatatgtgaattatttgattgtagcacaagatcaagtaacatttgtagatgaactgaagttgaatgtacctctacgggaggcagtagatgtgagttatcatgttatgtgtttaggacattcgaccaatcaaggagtaaaaatggtcaaaatgctaaggcttagtcaaaatatttaacgagatggttaaagcttgctttattatatctccactaaaccatcaacttcatgttgccatttactaagttctttttaggtggtagagactcaatattccaagttatgttttgtttaagagtctttaattagttccacatcaatagcatcttttcataaggaatatgtcatagcttgcttaaaagttaggttctctatagggctgactggtatatggagggttaaaatttgaaccttttttttttgttttgatcaagaaaaagcggatgttaattaa

SEQ ID NO: 60745 - DNA, 566 bp, Arabidopsis thaliana landsberg
  unsure (1)..(566): unsure at all n locations
gagttgtattcttttggatcatcaggagagtgtctactatgttgcaagggctggcacaagttaggacagtcttctcatcttgtgtttcaagcagccacgtttggcgtttcaagatgcaacctttaaggtttactttagcacaagaagctctagttttattatcactatcaattcacaacaatgttattgtggcccagcagttaagtctctgttccacttaagctttgacttataactcttgtagtcaccttcttcttcatagtggaaagatgtggatcgaaagaaagatcataaccggacgtagcggttcgttaataccgtgaaccaggtgaacaaaatttgngtgcttctctcttcttctccctttcttctactctgntatttcctcttattcttctccatactttgcgtgatatgtttttcgtgagtttggtgtcaatgacaaagagctgaaagctagagcctttgagagggtaaaaactttatgtaatattgtgacgacaagatctaaaatatatgcggggatcaactaatatttttaaataagttttcataagagataaact

SEQ ID NO: 60746 - DNA, 571 bp, Arabidopsis thaliana landsberg
  unsure (1)..(571): unsure at all n locations
taaagaattatgctaagcgagctacgaggcgaaacagagaagcacaggcgacaacaacatttcgagcacttgcntaagaacatgatctcttccttaacccacatgggaggatataaggcaggacctatccaatacgatgaagaggaagatggtatcagagtcatcacactttctggatccaaccttggagccaccatgaagaccgagcttgacaacaatcatggagacagagaccaaaatggcgaccacgagcttgatttcctaagcacttatgttaatagcaacttccaagctgtgaacaactcgattatgataggggccaagtacgagactcatgatcctggtgttcatcttgacatttcgggagatgtggagaaaccttcggtgaagatacctgcgaggagttcaaggggaaagaagggtaagactcctgccagaagtgaccgtcgagaatctgaacatactaattgaatggtatggtatattcatggatcagtgntaattctctttttattttcttgtcttgccttctctaaataatcagagaagtggtgcatgccaaagcacttta

SEQ ID NO: 60747 - DNA, 548 bp, Arabidopsis thaliana landsberg
  unsure (1)..(548): unsure at all n locations
gcataaccaatggtgggtttccactaggcatggatttcatcaaaagcgagagaaactgcttcgctaggtcgggaattacttggtgggaatggaattctagcagattttctggtagcaaaggtgagcaaatcttcatatttgacttggttgttggctattattgaagaaagatcatggttaagtcatgaatttggaaaatttgcaggctttctgtgaccttgaacccatttatacatacgaagggacttatgatataaacaccttagtaacagggagggaagtaacgggtattgcgagtttcaaaccggctacacgtagccgtctctaagttaaaaggttgtccattgtttgttgttgtctgttggttagtattgatattgtgatgtggggtttacatctacaaatgtgccaaataatctgacccaaannnnnnnnnnnnnnnnnnnnnnnnnnatatcgttgttgcaaaacataatccacgtattgcttcttgcatatggattcgtctgtggcttgtactggggaaataccatttgtaacctttatta

SEQ ID NO: 60748 - DNA, 784 bp, Arabidopsis thaliana landsberg
  unsure (1)..(784): unsure at all n locations
aggagaaagtctatcctgatttataacttagttagcaacttattcagaagttacatttttagctgtaaaggggcgaaacctacttaacaactaagccgtgcattttacgtggttcaaccctagatgaagaccaatgcactatctaataacacaatgcaatactagaacagagaaatactaatgcagtagtgggataaaactaaaaattttcctagttaacccaatgcatgtatgatgaaaaatcaaattacatatatataccagctgaaggggttttgaagactgcaagtgctgttgtatcattgacccaacgaatgataaatccactatctttgaagtctttaaatagcttctccaattcagtagttctcaaacttggagaaaaaccagcaagtacgaggacatggcgtgtgccatacttggctgcatttaaaagcgtatagaaattcaggtgttgtatttagaacaggcagcatataaatcataatcagatttatctaacatactgcttctacttgttacagataatacaatccaaaaaacagaaaggaaacattgagagtcacaacttacatttcagtgattcatcagtcttctctgactcacgagataaatcggtatcttctgaatcatcatcaaacctcgactcagagaaatctcgatcactgtacattgcatcactcttataagtaaacgttccccttccacgtctcttaggtccttgaactttaggttcttcaaccgaaagctttgatatttcaggcaactcttctacggngagtaa

SEQ ID NO: 60749 - DNA, 1669 bp, Arabidopsis thaliana landsberg
aaaaaatgtaattggatgttactttttttgggatcaaatttactattttatcatcccttgttattatatgacctattaccgttacgaaattgattttcacaagcaaagcagatatggcacaagcacattgataagcgaacaatcaaattgatttcttctctctttttcctttttttcaatttcattcacaccaaagagtttcaccacattcaaattcggatgaatctaaggttataaaaacatcaaacaaatatcactttagaatatatctacatccaacaattttagggtttacatgtactatataaacccaaataaataatcatggatcatgatttcacatacaattccttggaaccataactccagaggctcgtccatgggcgttcctacaataagaagctgatgatcttctcatgtaagtaagcttaatgtcttgtaacctaagccctgtgcaatgattgcttccactacaatccaacttcattgctattggtgttgttgatgtcccctttatgtttgcaaaagtcactccacttatcttcactccagagctctgtttgatcaatcataataagattccattaaataaagactagatttaggatttgagttaagctaaattgactagattatatacctggcgaggacaaccttttccattaggacaatagttttgatcgattatcaccggattttcaacattattcattatcaaatttcgaaataccacattattcacaaaccctctgctaggcctagcccatgtctttattcttactccgttctgcgtcttggtgaaaacagagctcgtaacggttacattttgcacaccttcctcattagcgtaatccccaagactcccaatgctgcatcacatttacaagcaaaattgctttaattggcactcaaccatcgcatttaagttgattattgttgaattcctagttacctgattccatgtcccggtccacaattgacacgttcgatccaaatgttcctagatccttgactaagtgcaatgcagtcatcaccggtcgcaatggttccgccactaatggtgactccagaagaagactgtacgtggataccatcggtgttagggcttccacttggagccctaattcttacgttttcaatccgaacattagaagaatgatgaaccgtgacgtgcatattctggctattaaacgacgatagaccacttagtagaacgttattgcaccagctgaacgatatagactgcaaaagaagccatgtccaattataattaaatcaaattaatataactagctaataaatgaacaaatcaaatccgctagttttgatgtaaacatacccttgcaccttgaggacaatgactacctttctttctacaagaccaataaccagctcctctagcatcaatggtgccaccgtaaaccgagatccggtttactttagcgaaaagaatccaataaccggaattacctatatcccagtagttcgctggagccacgagtgttccatcgtttttgaaagttataatgttcttgcaaggaccccaaaagactaggtttttgaccaaatatgttccacggggaacgtagaccatggctcgagcccgtgagccgcaggctaatgaccaagctgtcaaaaaggacttggtcgcatctgctctcccatcacc

SEQ ID NO: 60750 - DNA, 1292 bp, Arabidopsis thaliana landsberg
tacgaggttagaccatgagtatcgaacaatattttttgttatagaagtgtggttcatacgtataaataaaaatctaagttggtatcaaggattgttctttgtgaaatatttgttttcattttttacaataactaaatgataatttggtttctaaagattagtgactatataatatattgagcaataatatcaattatatgtgatattataatgttttttttggttttagtgatattataatgttgtatattgataggtggtgatggagtgggagaagataagtagcattagttcatcaacgaacgtgttgaagccaagtgagagatacgtgcatatggtgacacgagatgggtttgagttttggttcatgggctttgtctcctacatcgatgctttcaattgtctcaacaaagctctcctcaattcccgttgtgatcatgccatgtaatgtaatcaaattctaactaagaattttcttatcaaaactacgaagactattttgatcagatctcataaaatatcaatttaattttttttacaagtttaccaccaaaattatctatctgattcataattttgaccaaccaaaaattatgaatttttgggataactgagttacacaagtaacttattgatgcttgttaaattgtcattgcgatttcgtaacaaagggtccaactccaatcccatgaaaaattacgaacgatgtgtaatgactaatgacgcaacgtggcaatcatgtataccttcaacggcctagaattctgtagattgcatcaatcaacggctaagatcttcttttggctcttaacaaagtcattggctgattcagtttcccaagaaatgtctctgtcattgtgcagtagataagccactctctctctctttctctctttttgctattataaagaaaaagattcattcccccaccattgaggtttaacttatacaaacagatctttttgaaattggattcatctaagaagcagactctgttttcatggctgtttacaataccaaactctgtttggcctctgttttcttgctcttagggcttctcttggcttttgacttgaaggtaacttacataatcatcatcttacttagtttctcttaagtttgatttgtgtaaagagttacgaagtttggtactgtgttttagtttagatccaatattgatcaagttcgttcataaaaaactatactttaacagaaagacaaagaaagatccaaactttgttgactaaagtcttctgggttttgtcttaatcagggtatagaagcagaaagtc

SEQ ID NO: 60751 - DNA, 564 bp, Arabidopsis thaliana landsberg
cacaactgggactcttaactaggagtgtgtaaccctgttacgaaagatgaagttaatgcaatgaaagcacagtttttagagatcaatgctcgttcagcccagaagggggcaaaaggccaaggcccggaaaagcgagctgcccaaaaaagattggaaaaagtgaggaagaaggcaaacacaatatctgacacagcagatatatcagaccgttcaaaggacaagatgatagacaagctatacaagaaagcagcagagccaagaaagccaaggaaagaactggttgtgtctaagaaaggagttggggttaaagttggtaagggacagaagagagtggataggaggatgaagagtgatgataggaaacggggggagggaaagcccggtaggaacgggcagaagggcactggtaaagcaggccagaaaggaaaaaggcctgctgggaaacctcggggaaggaaacccgggtaagacctccatgtcgaatgaggcgaacaggaagttttgttacgtattttaatttaagttttggcaattcttgacttcttgaattacttgtttactctg

SEQ ID NO: 60752 - DNA, 552 bp, Arabidopsis thaliana landsberg
atgcgcgatgtgatccgcagcagccgggcggagaaggcgccggcggtgccgatgatcagcgccatgccgattagcgcgaggacgcgcctgtccgtcgtgaagtctccggcctcgcgccgggcaaggcccccggtgaagtcgtgcggccggtgagggcttttctgttgcggcatgctgcgtcctgtcgcttgcgttctggtggaggccgccaatatatcgtactgcgatataaatcaacaggtgccgtgccgaagcgacgacatcgggccggcctacacgtttgcggcgcaatgggttaaggctggttgcacgcgtcacggaaagcagggatgggggaatgccgaaggaaaaactgaccgatgccgactacgagggcctgtccaacctgcgctacacgctgcggcggttcatggatttcagcacgtcggcggcccatggcgaggggctgccgccccagcagcatcaggccctgctggcgatccgcggctatcgggagggcgaggccatgacagtgggcaagctcgccgagcgcctgctgatcgcgccccattc

SEQ ID NO: 60753 - DNA, 1110 bp, Arabidopsis thaliana landsberg
  unsure (1)..(1110): unsure at all n locations
gaggacgcgcttcaatgtgttctggtaacccatacatatgccggaatgcatcttcaaaagtggttctgcatcaattacaaaacacgaggaaccaatgtgagcgcagctatctgaatatcaaaatacctaaagagaagtaaattcacatatcgagaaatcgccattatcagcataacttatggttattacatgtacggcatgtctcaagtaaagatatgggttagttcaatattatgcaactgtatactttcctcgccagtatcagcataaatggagcaacagttagagcgcaggaatacctgcagtttccttggttaaggatatcgcacatagaccagaatgtaagagcatttttacttccatacgcatcaccatcgatgtctaatcttgtccagaagtaaataatctccccctttgtttcttgctttataatgttttccagagactcttcagctttagatgataacgagacctgtctccacaacaaaagtatcatcaaacagtgtcgaagttacacaatggatgtaaagatggatacgtattgtttcaaaaagtaatcgactcaagcattcaaataagttcaaatagactgatatttataaactgtaactttgtaaattagttatcaacaacactacttttaaagaactaccttcctaccagcagcacgccatgactgaaatccaatccaaggtctcatgtgaatgctatccactttatttgcgacagaaaacattcctccaatttcacaaaggatatctcgataataggtatcattcagtagaggtaatcggtctgctgcatctacgtcgtctgagcttagccttcgatctttgctggactatagtgaagatatgaccaaaaatcaaaaccagcaatatgaataagcacaagttttaaaaactgtcgactggaacatcacaaaccaatagagaaagcttaccaggctcaaaccacggtacagagagccatgatgcagaaagggccaagccccagcgccattgtaaatctcataaatacataaaggctcgcctgttcgttctagctctccttcatcccgttcattcacctcaaatttgagcttctccgattngcgagcattccggtata

SEQ ID NO: 60754 - DNA, 673 bp, Arabidopsis thaliana landsberg
cactaacttaaggtggggctttataacatattttgggtcattttaaggcttattccacataacaaagatatgcaagttaattaggatcagtgtttaacgtaaattgctgttgtggattcacagctgaataagaattgtaatcaatctaattaaaccggacctagtaaacaaatagtgctaagaaagaaaaaaaattgtcgatttttatgaatcataatttgtcaaaaaaaaaaaatatccttgaggttttgttttggattatgtaaaaaataaaaaacagtaaagaagataagtaagataaagataatacaacagtaaatttctggtaacataaagtactttctcaagtatttttttttttatttttttgataaatagcacttttctaagttgacaaagtagctttgaatatttcataagaatcaacacgttaagctgcactaacagcatgaaatcgtgaatatgttatattagtcaccaaatgtcaattagtgcgaactgtcgtaggcaccttcgtcaccccacgatcgctttcgtcataattttcagaaaatatcacacggttgtaatttcctctattactccaaatatattacaagaaaatttctttgtcttacaacaaaaaaacaactttatcattcttccaaaaaaccggaacattattggcacaaat

SEQ ID NO: 60755 - DNA, 553 bp, Arabidopsis thaliana landsberg
tttttaattcacatcattggaagaagaatggggagggtgccaaaaggcaagatggttgcctaaggaaaaaaaaccctccactttcttcggttgctcatggcgattagaggccacgagaccacgagggcgtagcattgtcggttcggccgctcgggcatgcacatgcgcagtcaagtgaataatgagcctctaacaaatacgtagtgcaaaatctccaccacaaagaatccgcacaagaggggaaaacacatgtatatgcatgtaaagggacagttctacttctgtcatcactctctctccttcacacagttgttgtctacctgacagaaactcttgcagccttatatgtgtggaagaagagatataaatagctacagcagaaacaaaataaataacctatacaaaaataggaaaacaccatcgctactgtactagctcctgtagcatgagtcgtcgtatatacgcgtagcaaactagcttatcagctaagcatgttcctgagactctctcgtcagcacccaccgttcgggttccaggtttggcacgagtgccc

SEQ ID NO: 60756 - DNA, 1304 bp, Arabidopsis thaliana landsberg
tctgcagtgcatacacatcgccatatatagcttcttcttatgattgttccattatgaactcttcttatgttgaagttttttttgataaatttcatttacattttagtaaatttacagttttttttatttaactgaatttaaaaatttagtgaaaaagttacgaaccacactaaaatatgtatgacgtacaagaatttgattcagttttttcccctaacaaactccttcatcagagctttcattaatttattatgatccacgtaaatcttaagaaaattattcattacacagcttaacttaaaatgtagatagaaataaatgatattgagatgtgatatatctagtgcaatcttaaagctataggtttaattatttaattttgcaaaaattccatgagattgattcatcagcatcttgcagggttgtggttttcacgatcacgaaattactacaatcacattttgaatctttcctagttataatatatagataattcataactatgacttaaggcgcatccgaaacaaaccgagacttaaaatatgtaattttggggttgtttcttaaagaatcaagaattgaaaatgttgaccaagttcattttgtaaactcaataaaaaaaatccatggattaaatatttaataaacaactgcttttaatattaggttttatcgttggcacacacaaaaaaaaagaggcttttatcgtcgacataaaataaaaaataaataggaggatttatcgttttaaaaccacaaaataaaagttaaccaaaaagaagaaagaaaaaaaaaacgatcgccgaccaaaaaaaaatcaaagatcaacggcgcataatagcgcgttaggtggacgagcccacgagcaacaaataccctctgcgactctctctaatgtctattcacttccacgcaactatttaaaaaggaactcttagattttcttttatttcttttttaaaacataaaatccaaaaatataaataaaaagaatttagacagaggagcagaactgagtccactagtcaaccaaacagagagatccgttcgttctcttttgtctttcggattcattcctcaaatcggtttcatcatacaagagagaggtgactgtttcttcttcctttctctttcgagtggtttctcttcgtcttgcttctcaatcttcttgttacaggagatatcgaaatcggttttgtgttgttggtctaaaaggttagacttctgagtcctgatcctattgtgcttttttgattcagtaataggtaacctaacttgatttggaataacaaactgggaataaa

SEQ ID NO: 60757 - DNA, 524 bp, Arabidopsis thaliana landsberg
ggagaaccctgcccccgacccccctagaaagaagaaactgcctggggggcgggtggctactcctaggcgcaacaggcgtgttgttggcatcggggtcgagtgtcaccaacgcctatcttctatcaagaaaagcaagaagaccattatgaagacactaggagtgatccgtgatggggattctctgagtcaagaggcgctggatgaatatagtcgcattttcagcacatctctttcccaggtgcagatccaagctcttgcctctcttttcggttggtctctactagaagagatgttggtagtggaggtgtctactttttgaggaaggttttcttccttgggttgcgggtttgttggtcgtcttaagctagtgttttatggatccttcaaaaattctcatttggaatgtaagggggcttaatgcctcgactcgtcaggatgttgtaagggctgaggtcgtctcctctggagtggatgtggtttgtttacaagaaactaaaatgtaggataattctcgtttttggtta

SEQ ID NO: 60758 - DNA, 471 bp, Arabidopsis thaliana landsberg
cccctctttcttcaatggtgactaagatcttcattcctttaatcaacccgactctctactttaaaaatttcaattagtgtctctaagaagtcaacactccatcatccccattctaagctcaacataacaacataacaagaaaactgtcatctttgttatctcatttctcgaagtaagcgtgggttttttttttactcgagtgtcattttggggggaaatctctatatatatttatcccactaaagattctataattacgatattgtcgttttctactggcgttaccccccaagtcgacatgaaatattttaccacgaatcggctagccaaatcctattataacgatcttatcataatgttcttatagtaaacatgttcaaaagtcgacttcacaaccaccagacaatcttttgatagtttactgtttgttgaatcgtccattgactagttcacccatttcagatgtcccag

SEQ ID NO: 60759 - DNA, 452 bp, Arabidopsis thaliana landsberg
gcttggtgacctggatcgaggcatggcggctgctggtgtggcgcgcggcctggattgtccagcagggcaagcggttcgagaacgccgagggctcgatgtccaagctgttcgccggcgagaccgcgatcagggtgaccggccaggcgatgcagatcctcggcggcaacggcttcacccgcgagtaccccgtcgagcggatggcccgcgacgccaggatctacacgatcttcgagggcacctcggagatccagcggctggtgatcgcacggtcgatctcgggcgcgcccatccgctaggcggcacggtgccgtacctggacctgcgcggcgtgcgcagctaccacgaggtcgccggcgacggtccggccgtcgtgctcctgcacggcggcttctgctcgctggagaacctgcggccggtgggcgaggcgctcgcgtcggcgtacgccgtccatg

SEQ ID NO: 60760 - DNA, 468 bp, Arabidopsis thaliana landsberg
atcaatccacgaggatggtataccaaaccgagtttctattatcatgtctatacataagaaacttatcaaataagacgatgagggatccatggaatgcaaatgtgaatttaattttgatttcatatttgaaggaccaagcacaagttagatttagctcatatgacatgtttttaactcgtaaaaaaacataagaacttgatatatggtgttggtgtcggatctcactcatgcattcggtctggataaaggtctaatattaccaaagtgagggatagtaagaatctcaattgggagacggacaccaagaaaacccacaatcgggtttggcgttacaaaggtccatcattttgcgtaacctaaaatgattcatacgatcatcacaaaaatgcaacatgttcaaagaactttatgatctataaaatctttttatgttcgttactatctgtaactaaatcatttctcttacct

SEQ ID NO: 60761 - DNA, 1290 bp, Arabidopsis thaliana landsberg
gcggaaaaaagcgaaccaaatgagggtgtttatagaaaacttacagcgatgacatctccgtcgcaccatgggatcttatcgctgccgctgaaggaagtaccgaccgagtcaaagaattgtccgatcttagcatccattgaaggcgattttgagctttgattgatgaggttttcgtttctggtctctttcttaattcttaaggagagaagttggacttgttgcccaagctcagggaaacagacgatatttatcccttgaatttatcaacaagacccctgtattgttaagacttacccacattgatcaccatatcttctgttttgttattaacaaccctttggaataaaaaacttctgtgacatgtgatggtgtattactgattttttccaataaatttacaagattcataacaactagataagaaaaggaaaaaaactgatttaatctttcacgattagatgtttaacgtggagttttaactcaatcaagcagttattactattgatggtttgtaaaagtagtttctattttttaagttattaaaaatatctgaagcaacaaatttcatattttagatcatagtacttttttgttgtcgattttaatttaggtgatgtattttgtttaattgaataacagtttaacgttaaaatacatatatattcatgtccatagaaaatacaagacttataaaagcatcaaaataatcggagagatttgctgaaagtttgccacttcttcaaactctttggatcaatatcacacgcctcttcttttcttcccctgcccatttttttgctacaatatctaattggtttcatcagtttttttagtatcttattcagtcctagtcgtcgtcgggcttggctagccggagctgctgtatgtatcggggaatcatcgacgactgcactgtacatcaaagagaagcctgactcagataaacttcgaccaagcaaggcattgttgaggtgagcctcgaaagataaccgctcaaaccgatccatcaatgagctttgattgtcctcgaacctctgaagaaatgttggagtctccatggcctgtttttgtgtattgatagcgtgtagtgactgctctttgtacggaaaacataaatggtaatgttttcaagaacaagcaaaggatcttttttttttccttaactttttttcttgtgttcaaagcaacgggatcttctaggattaaaaacaaaaccttagaaacatacaagttatttttttctggaaataatacacaggatgcttttaattgggttctttcacacacaca

SEQ ID NO: 60762 - DNA, 482 bp, Arabidopsis thaliana landsberg
  unsure (1)..(482): unsure at all n locations
cacatttttgaatatttgggaaganttaataaataaaatattctgaaacccccaatattacgcttggtagatttcatccaacggctgagataattactaaaatggcgccttgagctcaattatttttccatattaaaaagcgtccttggttcttggttatttacaggtcaacaaaatactttgacaccggaatcggagtccgtggaaagtcagaaaacctgatgtaacaccatttatggcattaactactgataataatactatacgaaaatccaattattatgccgagaaaaaaagaacagtggtcagagacagcaggctggtcctgctgaagaataaatctaatctaccgattcgattaaataaatatgtgcccgtttctggtacgccctattcaaatcacttttatattatagtatcaaaatacttcatacatttactaattacaaaatcaaggagggataaaaacagttattatccga

SEQ ID NO: 60763 - DNA, 525 bp, Arabidopsis thaliana landsberg
gtcactattttgccctcctgcggctgtgggcacgttggctctagcctcgtgttcgtgccgaggaagaatattactggtctccgtattcgatgcccgcgatcaggaaccttctgtgggagtcccagatgagcgagtgggatcgcttcatggacttgctcgaggccggcaagaggccgcgaggcctgagcgacgtggcgatcggcgcacgactgtcgctctaccatggggcggagtccatccgagcggccgagatgtattgggtgcgtccggccatggcggaggcagccatggacgcgtcaacggacatcccgttcttcaatcctgctgttgagcgaccagcccctcacggagtgatggccttcgagcggccacttcctccggtcgagccggggtccgacgcgcaacctgccgaccattacgcccccgggtgggcgccgacggcacagccgggcgacctgatcacgtggtggagtttcgagggcagccaggtcttcttgatgtggaggccagacttaaagacttcca

SEQ ID NO: 60764 - DNA, 422 bp, Arabidopsis thaliana landsberg
  unsure (1)..(422): unsure at all n locations
tacgtctatattcagatagnacacattgcctcagggcgggcgttgtacggagacagacagacaccaccccacccaaagccttctgtgatgctactctggctcagcatccgtcatccatcgtccatggagagaaacagctctcatgctcacatggcgtgtttcgcgcttgggcgcggccgctcgacgaaggtcgattggtactaccgcagagaatgcggccggggtgacggtccgatgggcagcacagcagctagcgctctccatccaacattaaagcnnnnnnnnnnnnnnnnnnnnnnnnnnggcttgagcctgcctgcctgcctaccgccatggatcctgttcctacaaacccgtctggggcctccagagctactaattaatctacaagctagtagcttgtgctactgctatgtatctac

SEQ ID NO: 60765 - DNA, 190 bp, Arabidopsis thaliana landsberg
tctattttcttgcaatggtaaaagcttattattcttttaagtagtgttaaaaaaagctagaatccaatatctaatgtttaattggagcctacatacatgtaggcggtttaagtgcttaaataaaaaaaaaaaattagctacattcctgataatattatgaagatattatgattcataataaactaacaat

SEQ ID NO: 60766 - DNA, 1141 bp, Arabidopsis thaliana landsberg
atatcaagtttaataatgtatgctcaccttaaaacgtatatactcccgacgaataatgaacattagagttttaatttgtataataagatatgcttggtagaaaacaaaaaagggaaatgtgctgaaaaaagggaaatgtaaacatgcatgaatatggtaaaggtggcgtaattaaggagtaaggacccagtaatatagtggatattcgagaaaaacttttctacgtgaacaaaaataacctacgtgtaagttatcctctctataaagccctcatcaagtctctgagtccttcaacgactcataactcatagctatatcttgtcttaaaaagaagaagcaaagagaattagtggagtacgataagcagagaagtatgttaaaggtggtgttgttgatgatgataatgatgttggcgtcacagtccgaggctcagctgaaccgtgacttttacaaggaaagctgtccatcattgttccttgtcgtgagacgagtcgtgaaacgggccgtggccagagagcctcgcatgggtgcttctcttcttcgtttgttcttccatgattgttttgtcaatgtaaggcactttttttcaatgcaaaaacgaagcatgctttgtatgttcccatgaattactcctaaaacttagtaaatgctaagcatatgatttgataggggtgtgacggatccttactgttggatgacacaccgtcttttttgggagagaaaacctcaggacccagcaataactctgtgagggggttcgaagtgatcgacaaaatcaagtttaaggttgagaaaatgtgcccgggcatcgtctcatgcgcagacattctagccatcactgctcgggactccgttctcctcgttagcacctctacccttttactctttgtcatgtcttacatagatgcatgtaataattgttgaatggttaagtggcttagtgattcggattcatttattttacctagctagaaccagagttcgaatcttctagtaattaatcaattgtcccttttcaaaacttaaaaagaagggtaaaattgtagtgcaacttgcatctttttccttctgattttcttgtaaaacattcaaaatctaaatcattctcacatacatctagccaaaatagcatagatctacc

SEQ ID NO: 60767 - DNA, 1148 bp, Arabidopsis thaliana landsberg
gaacgaccttcatatgtgttgcataggatccctcgcacaaagtgggttttcatttcaatttctctgcttcatgaccccacatagtcttattaaaattatactaatgcttatttatacgtttataattataatgatgaatacgtattatcacattgcagtcagaatacatcgaacttgcttgcttaaaagaaagtattcaaaccttaatccattataggcttgtaaaatctactctgccatagtcacagctttaaaaaattgatcctatatataattcttccaatgatatatttacagattcttatagaattattcagacgttacactcctacatttttcgtagtggcaacagtttatcattttgaattattgtgggagacaacgagtccaaactatttatactagttatagtcatatagacacaataatatgactaagtgagtgtgtggcagttttttccacctttttcttcatgtataaaaatatttattaattagaagtccttctcattttacggcctgcatgccttgctcctttgtcgatttggaggtgtcttcgctctttgttatataccaagcgcacacactcacaaatatcaaatacacacacacttaaagatcttaatttcaatttctctgctccttatttgcatcaaatatatgtacaatgatataaacacagtcacatacatatatacacgtataccttgatatatgtcgagatcttctttgttgtttctgatatcatagtcattacttgttcttttaaagttactctctcttttcctgtttgtgataagatgtcaaatattaagatttttcatttattccctgatgacaaagctattgaagccatgcaacaacctgagagtctcctagttccatcaaaatccgactctcttgattcatcattatctcgacaccaccaagaaaatcaatctaacagacaacggaaccaccaacaccgacaacaagatcaagaactagaaaatctacaagatggatcgagaggaaaacgaaaatgggaatgtaaggatgaagagtctcctgtaaagatcccagagacgccgagaaactcgaacagtgtgtgttattaacctcctcgacagccgagaaagccaaaagctatcccgtccatgaaacggagag

SEQ ID NO: 60768 - DNA, 1739 bp, Arabidopsis thaliana landsberg
aaacaaactacataagtgatggacatgattatttgtgggcctgcgtgttttcctggatcatgacacttttgtggttcttcaagccttgaatcacttccccattcatccatagcttgagagaaagatagagagtgccttgcgtgaattatatatttataaagacacacacacggacgtagctatagtctatagatacatatatgtacaacatatatacaacttctgttttgtctataaagtaaacaaaaacaagaaggttatattaaattttcaagttttctatattttattcacacatttgacatggaatctctatgttgacaaaacttacacctatactcatataatcaagagttggacgttatggtcactatttatggcttcaggttatttgaaatgcatttgcaaaaaaaatatgtcaacatgctcattaaattttgagagtactcggagttatggaaaataacgaaatgatatatgtggcaatcgtcagacgataagagagaaaccatcggatagaaaatgcctctgaaaatatagtaaatctatgcaaaatcatcatcttgccctctagcatgaatcttcttgtatagagatcttgccgacaatggaaagtcacacgtgcactagtaatgtaaatagatcgagttattttactggctaaatgttattggatataatcaagccagattcaaagttgaaccatgccaaaaaaattgaacacttaacgaaagtagtgtggatgcatggttagactccaaaattcttcgttatcaaatttctgaaatcaaactatagcataattttatcataaattacgacatcacaagatcatgaaaacgagtagtatgtagacgtgtcatcttctacgacaaattacaaatttaattaggacattcctttattaatattataatcgtaactaatgtttagtagacatcaattaagggacgtgaaaatatgatcaatcaataaaatggaacagagaataagaaagcaaaaagagaaactaaatggaaaaaggcaaagggagaaaaaattgaagaagaaaacgaagcaacttaagttgcctgaggaagatgaggaaactgatgtgaccaaagacacaaatcattgagacaaagtcaccgagttccgacaaatccttctcctcaattacactttttctccctttaataattcatctccattatatacatacacataaaattttgtatggtcatgttaagagtagacattttatgtatcacataagatgtacatataaaagtgtttaatttaaggtttgcccaagaagaaccaagatctcaaaatatccttcatgggtggaagactaaatgaaagaatcctaggttatactaacttattattaactcaaaatctctactttgatataagattttactaattcatcaacaattaatttggaactactatataactaacacacacccatgcacatacacatatggaatgatcttctttattaacaaaatataatgggccttgggcctagtatttgtttattggcccattcagaaacatgcgcttcttccccatcactaaacttgttcaacgctcaagcgattcttcatcatccgtttcgccatttttgtttctcagtgatctctgaaatggtctcttctctctttttggtcgaatccaatctcaatgatgttggtatctttcttccatcaatgggtaatcaaaacatagaattgatgcggtaagactataaa

SEQ ID NO: 60769 - DNA, 175 bp, Arabidopsis thaliana landsberg
caaccagggcctcaaacgcactctcggctttaccgtcgctaatgcatctcgggctgctaagacactactcgacgaggggtttgcgtctgcggcggaccaccggaccggctacaggcaggcacgatggaactggaccccgggacatgccgcatatccagaggacacaaacagcagg

SEQ ID NO: 60770 - DNA, 1205 bp, Arabidopsis thaliana landsberg
agtttaaaaatcaatcgcaaaccactatagattagtgtttccataaagaagattcattgacttatgtatcaatgactatttaaaaaaaaaaaaaattgtaaactagacaagatttttgctaacaaccccaattatcattaactaattaattaatgattttgtttctgtccctaatatagacagcacaagttgttgattaagattctttgtaccaccctactcttagctttggtcctagacaatcaatataattaagtaggtccaaatccaaggcttgtttatgtgaatgtgaaataagaaataatcggtgatttttattcaaaaaagaaaaaataatcggtggtggtcgttcaatcagtaatctcgaggtccgaaagcacaatgcatatcacgagttcaagatttactggtgattacaattaacttggcacattgtaattacaagatttttatatatatatttcatgtttcactaaccataaggtaaggaaataaaaataaaaatgaaggagtgattagttggagccgtaggccgtagggaacttcgtcgtttctcgtagaaaagagtgtagggacgacaagagttgttgtgaaatggacgactgtgatcgttaatgtgactctctttgtccaatcatgtgttagctgattccacacgaaacatagaccttatcacactggaagtttacttgacacatgtctctactcttttattcatcatcactcagaccttactgtttggatattttggtggattcaactttgtcgtttagtctcattcatcggctctctcgcgtgtatcgcacgcaaatagaacactcaatggccaaatcttggaagcagtcaatggccaccaaccttcaataaattaccactaatcattggatagttctaagaaatgtctactttcatatattaatgccaattttaccggttaaattttgacttgacaacaaaagatttaacttttcttatgaatacaaaatcaaagaataaatttaaactgaacaattggtatacgagatagagaaaccaacttcgatcaaagtatgagtaacgaagcttgatcaaagtatgagtaggttaaagttaaattacttttaacaaggtagagacaggagtggtcgtggatataggttagactagtctaagtgatggtgcttaattaaacggttacgaattgttttgcatcacattcctaataa

SEQ ID NO: 60771 - DNA, 661 bp, Arabidopsis thaliana landsberg
  unsure (1)..(661): unsure at all n locations
ggtatacctcaggggaacttcatgttgaatnctgaatagaaatttagctcgttgcgttattgacaacatgttgtacacttggttttgatcatcgaaaaagagtttatgaaataaacatgatatgaaagttagggtttagaaattaactaaaggttttgaagatctactaaagataatactcaattgtcttgaatggcgagttcttggtgggaaacttgcaatattgtttaaggctgtggattgtacaggcgagcatgacacggagagatttgaggaaaggttttgtggtctaattttgagataaatttgaaaaatactacaactactgattaggttttagatgtaatcatttggtgaatcacatagatataagtttatgtaatcgtattgtaaggtttgctttttccaaaattcattgttcatgactatatatgtaatgttttattatataaaaatgttagatctctctatttttcttattcattggagttttgaggttgaaaagcttctttatcattgtactaatgatatagattaaaaatcttgaattaaattaacataatttaattcaagattttggtagagcaccttatatacgagcttataaatacnccaattttcgatgtgggatattcaagcattctaataagatatgaaatcg

SEQ ID NO: 60772 - DNA, 285 bp, Arabidopsis thaliana landsberg
  unsure (1)..(285): unsure at all n locations
cctggtgatcaggcacgtcggcgaccgcggcacgctgttcgacctggtccgcgccgcctaccacctgggccagcggcacgtcgcgctggagctcgcgccggaccacctgaagatcgaacccgacccggcgctggccgacctgctgcgcgccatgcacctggtggtgcacgagacctcggcgcccttcgaaccggaagccacccttgttccgcgtgggggccacgtgcacggngaccacggaacgcacgtgcccccggacgggcacgaacacgagcacgacacgca

SEQ ID NO: 60773 - DNA, 1182 bp, Arabidopsis thaliana landsberg
tcctttgctctgtactttgctttacaggtcttctagtcccatcaaaatcagtagctgatgttggctttttagatctaaaaggagcatcttgtatcctcatttgtgttccctcaggttttctcttggcgatattttgtggccttctttcatgctctcggcttgtgttgtgttcttcagagttacgaggatctgaaacaaacatccccaagaaaatcaatcaacacgtagctaagaacatgttctcaaacaaacaagacatagttttaaaactcacttccatcaaagtccaaggaatcaaagaagtgtgagatttcaaatccgtttggttcaggtgtaaagatatcaacatcatatggaagcgatggaaacgcctcttcttcatcaaggacagacgggtttgcagactctggtgtaccttcagcacctgttttaaacacaaaattagaaccaaagactatggatctaattcaagaaaccaaactgtaagacacgaagccagtcataaaagatcgaaaagcgagacagagaaagcgcagttaccagtgatttcctttgtggtattcacccattgatccaccaactccttccactctctgcataaacacatcaaaaactcaatgtgagattcaaaagtggaaaagcatagcaagtgtcaatcaaacttgtgaaagatcaaactcatacgcgataagagtcttagcgagttgtcgaatcttatcagaaccatgtttcctgaggccattaacagcctttccaatctcagtactctgcgagaataaccgcaaaccttaagaatctcaaggatcatcaacaacaacttcatacactatccaccaagataaccaaccttaagaatatccacattcaaagacatcaacttaagatgtcttaaagaatcgagtaacaccgagtttggctgcaagagaatacaaaaaagaaccaatcagaaaacacacaaaaaaaatcttcacattgatgaaatttcaagaacttgagaatccaacctcatcttctttgttgagcaagatctctttgatcctagcaacctccttagaaaccacagaaaactcttcaatctcatcactcaaagcctcagcttcatcaaatgtataattgctaacaatctgattattatcccctctgctactattagctttgctctctttactaccaccagcaacc

SEQ ID NO: 60774 - DNA, 1597 bp, Arabidopsis thaliana landsberg
atgactttcgtgattctaatatacaaacaacaaaaatttgcagaataaaatagcaaggaaaactagttttcttgcttaatttctagctgtaattttgttttatttgtttgattgttggacatattcctaaacagaataaaataaaatcatagttccaatcaaagaatcacgacgtggtcccgtataacgcatcaatgagagtatgagatagtgaaaggaatgttataagatcaagttagggtcccaaacacaagtggtttggtggttttggtccgtccaagagaagattattacgtcatttacgataaatagatgatactatctctgcaagtttattttcattggattataatgttcctaagaaatctgatttctcatgttaattgttatttgcactagatgtaccagataccgcgttgatactgcgaagacacggaatcagaagcaacctattctcgtgtttcatgttcaacgagttagaagcgtttaacccgcgagaccaattggcgtttgcgtttgtgagggatcacataaacccgaaggtgaaaatgaacatgtttgaagtcgaagtgttcgagcaagtagttgttgaatacagacacaatctcaagaagattgagacctctacgtatgaggaacaagaagaagaacagaaacaagaatcgttgaggacaatacaaaagagaagaaaatggctagatcatgaatcttggtctctcaatcgtagtagctgtaagaattatctcacggatatgtggggctaaatctcataattgatttttttcttttattatctttatagtgaagtccatatatatgtatcaatcggtcaatataatttcattgataggttaaccaagttgtgtgtatcaaactatcaatgtatgtacataatcatgtgtgatatctaatcagcataactggaaaaaaatttaactataaaatttgatttttgtagatatgtggaaaattttattcaatatctaaccttgtgacttgtgagtgcgacacactaacacgcgtagaccatcaccagtgttatttgaaccgaaccaaccggttttatatttacatcaaactcattctattataatatttcgaaccaaaaacacgagaattatatttaatcatctcattttcttactatttttggtttataagtcgtagcaaacatgcatcaccactatctcagattttccaaaggaacttttttttttaattataaattttgtctttctacattattatttttataaaatctctaatggaaaagatgcagaaatacaaatgttgaaaatagaacttagctaaacaaaaggaattataaggaaaaaacaaaagataatttagctaagcaaagtatcatgatgatgagcgttgacaaatgaatcattcgtcttcttcaaaagcagtgacggggaaagtacgtgatagtcccgtaggattagcaaaagtgatttgagtcggattttgatcattaacaaagatctcagagatcgtaacccaaatcaaaatctctttgctcttgattcccgtgagctgactcatccgacgattctcaaggatcgcagtaacctccgaatcgtacgatacgttt

SEQ ID NO: 60775 - DNA, 431 bp, Arabidopsis thaliana landsberg
  unsure (1)..(431): unsure at all n locations
cgattgaccttgccttggccggcatacttcagtcactcacataacagcaagctcacctggcaatagnnnnnnnnnnnnnnnnnnnnnnnnnatagcagatgtctgagnnnnnnnnnnnnnnnnnnnnnnnnnnnnnngaccgctaggacattcttgagcagcagctattggcagacagggcagagcaccaggctttcatgactcatatcctttagcatatgggtgttcctattcctccagtgtagtctgctccgcctcctacccttcaggccgcaatggtgccaaccatttagtcaggatctcagctccattcctttggtctagccatttctccactcaggatagtcaccctagacttctccacccaggtcatcggaccagttagtactcagccaccaatcccttcaatgactgctatagccactcctatc

SEQ ID NO: 60776 - DNA, 1401 bp, Arabidopsis thaliana landsberg
actcacttgagtagcgtgtcgaatttttcacatggcctcgatgaacgtttgttcttattatattgatcaaatgacttcaacactttagatcgatcatcttgattattcttggtgtctgaaagatatctaatattctgtttctacccaccctaaatggctaaatatccaattattgttttacggtctcgcagtatgaagatacagagcttaattaatatattgatccaatgcttttcaacaaaaagtattggtggaattcgatgattactaatgtttacttatgtatacaacttatacacacatactatcaaatttgaagctttgttatgatacgacgataacatgactttggtattttatgtaaaatatacttgtagacgagagaacgatttgggaattatgtatatatagcatcctcggcaggttaacaagtggacgtagacacgtgtatgggccccgtaatgctcttaagaaggcctacttcgctctcatttatcagcccactctgcttcctcctttctatgtaactctttctaaatggtagaacctctcgtcgtccattaaaatcaaagtagaaaaacctctttgaagtaaatatttgaatagtcagtttgatgaaaataacaaaactaatttaatagttagtgatttatatatcaaaggaaatttgtgtatatcttttgcattggcaattatagttactaatgatataaaaaaatgcaacaattgtagtattcacctacctcatttctctcaattttgatatatgtcatgaagcgtaagagcatgtggcaagaaagttaatcattaaatgtgtctttgactttgaacacattacaccaaaagcaacagtttggtgagttcgtctttaattttcctttttattttcaaattagaaaaaaaaatgaaaaacatcttacgttactactaaaataacataaggaataatatagagtattttatattgaaggcgaagatttcgatccaggtttaggaattaggatacgacactcgtgcactacaattaatttattattggaatatctcgtacattttcttataaaaatatcacatcttattataaaaaagagttatttacttaatgataacaaatatgaacttcgtggaattgacaaaaaaaaacatttatgcatttccacggaattgtgcaattttataaaattgtgtatcatcttagtaaaacaaaaaaaattatacagtattagataaaaataactttattttttgcgcaccaaaacacttattaaggttaaatagtgatcaaccaaagattaattaatgcatcaaattatttactttatttattgagttattttatgattattccatagaaaaacactgtccatcactattgtcgcagtcttatctttatgtatatac

SEQ ID NO: 60777 - DNA, 541 bp, Arabidopsis thaliana landsberg
  unsure (1)..(541): unsure at all n locations
tttgaatgaaaatacgggatgaggaaacaaacaggccttaattgatttcattttaaagatatgagtgtgatattaaatactcaacgttagaagatagcttccaatctttaaaccaccacaaaatcgtggtgcttgctttcgctggattaatgctcgagatactgttaccggcctttcagcaggacaagatctgtctctcatgtttgggcttgattctgtgtttgtaatgttgtaactgagatgctatgtctctcatgtttgggcctgattaggtgtttgtaattttgtaactgagatactctttgtatggtcaaggcttaacccatttgggataatatatttaattaaaaaaagaacaatcatattacatataatttgcatacctaaaattaatttgaaaaacatagatgaagaaattttactttaatgttacacaatanaaactctataaattaataatcatcagacattaatacatgtcttatcccgcattaggagagagtcaacagaattcgttaaaataataattaatacttaaaaa

SEQ ID NO: 60778 - DNA, 357 bp, Arabidopsis thaliana landsberg
tgctttctaaaccaggtaacggcagtccatttatttaaagaaaaaataaagtatttcactaaactgtccagaccatttcaccaaagtacttagatattcataaacacaaaattaatcactcaacttttaaaaatatttcttctagaccaaatcctgtaccaactcgtattgaatgtttcagtgtaaagtgtaaagcgttttcttaaaaaaattagttaaaaaataactgaattatcacaaaatattttcagaacctagtcacaaatctaataaattacatgtgggagccccttcatagtttaaaaaaaacaggggatttcagtcctaaccataaagaaaagcttgcctatggaattt

SEQ ID NO: 60779 - DNA, 503 bp, Arabidopsis thaliana landsberg
tacaaaagactggctggcgttggcttccttgcttcacaggaagcatagctgatatacaaatcgagaattattgttccggggcatcgcacgggcccctacctagtgattatctatgctccaacagctccctcattttgtccccaaaaaatctgcgtccctcatcagaatctgcatgcttctctattgcattttactgcacatgatggatttgtttgatgtgtaggaattttaaggtatgtaaaatatcttaacttttaaaatatgttaataagaacataagatagtaattagtattttgaattttaatgtatcttatcgtaacatgttcgctccgtagcaacgcacgggcattcacctagtatacaatgaagtgtcatactttggccatccttgtcccgctgaaatgttttctgcagaattttcgtgtgcgcacaatgctgtcgattctgaatgttcatgttcagagaatataagctctaactgaacagacatatcattctcat

SEQ ID NO: 60780 - DNA, 276 bp, Arabidopsis thaliana landsberg
gaacatgggggcaatgtgccagcttaaggtccatatccgtcaaaaggcccaattgctgacgattttacataagctccgcccccctgaccaacatctcataaattgccactcatgctagaggtgaccaaaccccactggactataaaaataccagacgactccccctttaagctccctcatgcactttcctggacctacccttgcgcttacccgatacctgtacaactatttaccttccggaagcgtggcactatcttataatttacactctaacta

SEQ ID NO: 60781 - DNA, 162 bp, Arabidopsis thaliana landsberg
  unsure (1)..(162): unsure at all n locations
ccgggacaaggtcgcgaccccgaggggtgctactccgaacgggcctcagtcgattgcngctcaactccctgcatgaagccggaatcgtagtatcgccggcagccatacggggggaattcgtcccgggccttggcacaccgcccgtcacactatgggagctgg

SEQ ID NO: 60782 - DNA, 1370 bp, Arabidopsis thaliana landsberg
ttgtaagttgccaaagatttctgcgtcctctctgaagagtttctgaaacaaaagctgcactttcttttcgtagatagtaccatggtgactcgctacttgatactctatcttcagaattcctagactcatctattgcaatattagacgccagctgcactgaactggatgttccacttccatccgactcttcagcggaaatggtacaaggaggtatgcttcccggcaatagaccaccatcctgtgggtcacatgaacttccggtcactgaatcaaccatttgagttgttgcaagactgggtgagaccaaaatttctgcctgttccagttcagaagcttagcccttagaagttagaacccattagagataatttaaacaaattaacattgacaacatacagaaaaaaatcttaaggatgctgacaatgtataagatacagagcaatgaagccatcaaagagaaaagattttaggacccattatctttcaagccgaaagggaataagacaaaaatattaaactaaaattaaagaacttatccaaattcttggacaatcaattacctaacatagagtaagttaacctggtaaatcccgccacagaggcttagatattaaaccccacttaattgtatgttaactaggaaatcaagtaataaatttcgagatagatccctatcaataaagcaggtcttcttagagttccacaccaccaaactaaacaaacacacagtaaatttacaaccatatgctaagatttcctctaactacagtgttagagagaagttttaggtatagtttggctcagacaataagtaaaaggtctgcagaggtgtttaagactatgagatctaccaacaaatattatactgtagtactgaaattagaaccagaggctgtttcaacaaccctatcaaggtaataagaaaatgttaaatacaaactaaagcaaggaatggaacctacctccttttctggcgtgaaactcattatctcatggtatgaatatattaactgaaaaagcacagctagtgttctcaaaagacattgcctaaacttggattctggtgtttgaaggcatagatcgctgtaggtaagtctgaaattaattaaaaaaaaataaaaaaaaatcagcaaggatactagaatccaaacaaaagggaccagagataaatactagataatgtaataggtaccagtaataactcaagtgcatagagcatacctactatattgggtggcagcactgttatcctacaaaagcaaatatatatacagagaatagatcaacaatctgattggtttgatatgctgacgttaataaactcatttcgtgctcattcgtgctcagtatgatgaagtaaaaaagcatta

SEQ ID NO: 60783 - DNA, 500 bp, Arabidopsis thaliana landsberg
  unsure (1)..(500): unsure at all n locations
attcagttctgtgtccaattaactatatgcatgttggtttcatttgtttggctgaattgagcacagaaagagtctgtgtgcttaattctgagaataagaaaagcagagcacaatgtgtgcttaattgtaagccttccactgatcaggcatgtacaaaaatgtgttatatgatatttcttccaaaaggcacatcactagtctgcgtgtttaattttaagcctttcaaaagtccatcctgacaagaacaactagcattttgtgtcaacatgcggagctagagcagctagcatttttgcgtctactatgacatgcggagcacgggaaggtgacggcgtccagcctcatggattatgcgtgtacaagaacaggtcggatgtgtagatctcaatattaagagaggaagaggtgtcgaggcattacctctacagcgagatactcgagaacagtggatcatgagaccacgtctgcctancacttctggaggcagagatactcgagaa

SEQ ID NO: 60784 - DNA, 109 bp, Arabidopsis thaliana landsberg
ccaccaggggaaaaaggaagatcttaacctcaaaccccccgcatccctgtcaaataaagcatctgatccgactgaagctcccctaaaggaaaggcataaccataatctc

SEQ ID NO: 60785 - DNA, 135 bp, Arabidopsis thaliana landsberg
tgaaaaacgcttcgcggtcgtgtctatattgccaggaatgctgttttcaccttggttgatttgacagaggcgggtttgacatcaagattgcattcggtgaagagaagccatgataactcccattacagctcgtct

SEQ ID NO: 60786 - DNA, 517 bp, Arabidopsis thaliana landsberg
gtttgtgaaacatttctcaacaaaccttcttagcaaagacgttgtgtgtaccacaaactacgttttttcgtatgtcttctccttattcacttcttctcatttccaccatcttcaaaaccttctaacagtttctccttacatccctcaatcactttttttttgcctttcacggactgtctcagatcttcttagcctcatatattattgcatcaaaacacttttcatacacacagtaattacataatttttttttatgtagttacatatttagtaagcaattgtgttttataaattatatattttcatatgttgattgctaaaacccgagcaaatagattatcctcctctcgaaatgcaacttaactagtccctatacttagaccaaattcgcgatcaataattaatatacggtgggccggcccaaccagatataatgtctaaagcaaaaataaatttttggcctattaaaagaaatttgaaattttttgcaagaaatggatgcttgaagactcaaaac

SEQ ID NO: 60787 - DNA, 1523 bp, Arabidopsis thaliana landsberg
ctctgcaattgccatattgtgtagaacctgctttgatcaattacaaacacaattcataagccattgctttcaaacctagaaaaataaaaatatctcaacattcattggaaagtagctctaaatctaagcatgacttgttatagttctaaatccaatcactgaaaaatgaaggctttgctcaataaaccctagctctacttcgaaactacttgagcagaaacaaaatcaataactttgggtaagtcagatctaaacttagtaaaaatctatatcaagtcaaacttaacttctttattcatagtatcgatctaaacatgtaagaatcaaacaaaaacttgtagaaaggcaaaatcaaaactattgaatccaaaaaactgaaccttgggatcgttatgtttcatctgatcaagctgaatcaaaacgtcgatacactcttcgaattttccagattggaaataggaaagagcggttttagcgagtgtagaggttacagagagaacagctgcgtcgtcggagagtgacgacgcatctctaacggcgtcggatgataacgaatctcgagaatccataaccgaattgttgtttacccagattttggggttttgctgaattggaatgtttttgcaagaattgaaatacacacaaaatcaaaaccctagcgaagttaatttcagagagaggcgagagagaagaagatacacttttcagagaatatccacgcgcaggaaatgagaaaggaggagtaaggtatgtattgggccaagttgggccgagttgggccgtactttatctgtctcagttaatgcaggttttgagaatggtatccaaagtatatatagctcacattgtattagtaggttaataaaagaagttgacttgagaaatctaggataataagtagataaaacagataagtcaagatgaaaaatatacaattaaagtaaaatacacttttcagagaatatataatattttcacatatttttgatgaaaagtaaaatatcatattttctgttcattttgttttgttttagtgttataccgaaaataattgtggaaccaattccattaggttgtaaacatttttacaaaactgtaaaactaagttttatggatgttttatgttataataactcatatgtgatatcacgtacgtaacaatatatttctctaatataaattaatttttaaaatgtatatcgacttatctttcgttaaattttaaaacaaacaaagctaagactaaattttgaataattaatctttttatatagccacctcatattttaaacagtagcctaaataaaaatatttttctatttcaaatccaaattttctatgtttaaatttatggttggtttgattaaaatttaacatagtatttacatttaattaaaacaaactttattaagtttttttaaaataataatatatataaggtaaactcatttaaaaaagatcaaaaaatcaatttagaaaggttttatgtatatatgtgtttgtatgtagggaaatatgaatgg

SEQ ID NO: 60788 - DNA, 1438 bp, Arabidopsis thaliana landsberg
aatgacgagtattcaatgataaacgataagattacgggaaaaataattaaacggataaaaatggccctatccgttgtgcattacagttcttggttaagaaatactattaaactgtctctcaaatctcaatatataaatgaatacattctatacgtacaaagataaatttatctctatgttcatgtgtcaaagtggtagtgaatctagtgacgttattgattaatcaagattacttttatctttctgtgcaaaatttcaagattactctaaagtcgatatatgctactatgacgtagttttgggacaattacgtatagaatcataaaaacaataagcagaataataatccatttaagtacattgtgaatttgtgataatggaattatttgacaatacttttccaaaataaaaactaatttaattactgtattaattattttagtaaaacaatattttcattacaatgtttgttgtgaatccaaaaaagtattgtttccaaagaactcaaatgacatcaatatgtctataataacctcgtgtagctgtatgttagaatctagccgaattgttttattgttgtcggtgtacgcaacaaacgaaccacacatactttgaaacgtggcacaatataagtgggtcaccaatgtagctgacaactataccatctatctgatccgatcgctcttataacataagcgtatgggataccattttctcggacaaagctgaaatccctaaagaaaaaacacttctccaaacttttcatctccgatatctctttaactaacatgtaagtataattaaacaggaggtttcagagtttaggtttcttgccttgttattctctttatttatttctttaataatttatcaatgatttgtatcgtaaaccctaatagtttactacttttttcttggcaggtcgaataatcaagctttcatggaattgggatggacaaacgacgtcggatcacttgctgtgaaagatcagggcatgatgtcagaaagagcaagaagtgatgaagatcgtctaatcaacggtctaaaatggggctacggctactttgatcatgatcaaactgataattatcttcagattgttccagagattcataaagaagtagaaaatgcgaaggaggatttattggttgttgtccctgatgaacattctgaacctcatgatcatcatcatattaaagatttttcagagagatcagatcatcgattttatctgagaagctcacatgagatccccaaaaaacgtcgtatccaggtcttaagtagtgatgtaagtccatacatagatatattttcatgttaccatatgtattataatgtttccctgtttttaattttttctttctataaatagaattaattaatttaggatgaatcggaggagtttacaagagaagttccttcagtgactcgataaggt

SEQ ID NO: 60789 - DNA, 129 bp, Arabidopsis thaliana landsberg
ctaactcagcggtagagtgtcaccttgacgaggtggaagcctcctaggccaggcaggtgcacacctaagggcagtgtatgtgagctcgactaccctgacaaagaccgtgactgcgatggaaggataaag

SEQ ID NO: 60790 - DNA, 398 bp, Arabidopsis thaliana landsberg
  unsure (1)..(398): unsure at all n locations
ggctgcggagagacgactgacatagggttgattttggggcaaccatcttctcatcttctctttgctattttgttttcacttttcactacccatttctttctctttgttcttcccactggaggattctatcaaagagtattaccatcacacagaggacgaaaccaaagactatgaaccatgtacaacagtcttcaacccaagaatcaccgagcattgtgatcttaggggcgagggagtggaaaaaagtagttgcttgtggtttggtagaggggattttatcaggtgtgtgctttgagtaggatggaacagagggagctagggggtttataggcgagcaatatgcgaggtggtgcttgnggtgtggagtgctggtgatggagcaggtgccacacggcagc

SEQ ID NO: 60791 - DNA, 436 bp, Arabidopsis thaliana landsberg
ttttggacctttaggtatatgtgtatgcagtttatatggtatgtgtttaaatgttatagatgattttgttaggtaatttcattatgatttaagtgcaaccgaacaccatgttaattgcgcatcgtagattggtcaagttgttatcctatttgaaggcttatcgaccttccatttggaactctttattctccgattgccgcgtgtttagtttcgattcgatggtttttttacagagattgtatggacaagtttcatcttatcggtaacagttttactgaaaaaagtgtttgtaaacattttaaaaggctttttggattcgcctctgtagtatcgaaaaacaagtttcgttaaatcattttcacctaagagcctagaagttgttttcagagaagtaatctatgtttcgttatcgactgaattttctcttgttattttg

SEQ ID NO: 60792 - DNA, 1330 bp, Arabidopsis thaliana landsberg
atctatgtttcgtttatcgactgtatttttctcttgtttattttgaaggatgagaagcttcaacacatccttggacacttccagaaagactttgagggcggtgtttcagctgagaatcttggtatgttgatgttgtggcagaaactcttcttcttggttggtccacaaagtgtgaaactagtcctttgaatttgattacaggggcgaaatatggtggctatggctctttcttgccaacttatcaacgttctcctgtttggtctcacccgaagacaccagcaaaacctcagagttctacagggactagatctccaaacaacttactaggggaggtatatttttctcattgtctacacttttctctttgtcaatgctgtaatgtttaatctcttaccttttttcttctttcagtcccagagtggcaatgcagcttcgtctagtgttcctaaaaaggcaaaatctggtcttgcttcctctggaaaccccaaaaaatcagtgaaatctaagaaacctagttccagtgccagaatggaatctgcaactaagaaaccttgtgtcttcagtaagcagaattctctgaagcttcggataaagatggtaccagatggtttatctaccgaaaagaatgctgctgcatatacagtggccttggacttgatgtgtcaccttctttgtccttagataacaatagtctttcaggtagtgaagggatgaatgaggagcctcagggttattctccaacggagtctcccaccagtattcttaatgtgagattttcctttgttttgtttcacaatactgaaacagtttcctttgttttaagatgcttatcgtgttgatatattcttatatgcaggtaatgacttcacttcctgtggatcattgtcagttcctatctcctctctctgaggatctgattcgattcattgaaagggaaaaatccgaaaagggatataagtatacatctccatccaggcttttcactgcgagttcttctgctatggcatacggtttggaacctcagaagtctggagagaaaccatcagtagagaagaaaaaaaagatggtggagaggagcagcttttctgctgagacaaatgtccgcagtaagaagggcctgtttgattcaactgatgccattaccaaggagtcaatggaaacaaacacattatatcctacatttgcggagaaagaaacagccagtagtaaattatttgatgcatccaaagaaaactaccatggcactgttaggggccgaaaaggtgggtgatgtccacagaaggttgggggtctaactcgtcataaagatcttggggcgcattatgagaat

SEQ ID NO: 60793 - DNA, 621 bp, Arabidopsis thaliana landsberg
  unsure (1)..(621): unsure at all n locations
tcagttaaaaatgataagtactatatttttcaatattatcatttttatctatctttgttctactattatcgtttagtagttgtaaattttcaaatttaaaataaatgtatcaaatcgatatttttggtaagtaattatagtccacagatggggtatttttgtactagttattattattgaagaagaagaataagaagattaaatacttatgattcgttttggttttgtatagacggacaaagcttctttgctagcggaagtgatccaacacatgaaggagctaaaacgacaaacatcacagatcaccgacacgtatcaagtcccaacagagtgcgatgatctgaccgtagattcgtcttacaacgacgaggaaggaaacttggtgataagagcatccttttgctgccaagacaggactgacctcatgcatgacgtcatcaatgccttaaagtctcttcgtcttcgaactctcatagctgagatcgcaaccgtaggtggtagagtcaagaacatcttgttcttgagccgagaatacgatgatgaagaagatcatgannnnnnnnnnnnnnnnnnnnnnnnnnnnnnnnnnggaggattatgatgaagagaggatgatgaata

SEQ ID NO: 60794 - DNA, 126 bp, Arabidopsis thaliana landsberg
aacacatgcttcccacatataaattatttcgggattggatttcacttgactgtctacggtttttttgcggtgctcggggcagaagttgtgccttaagaatcgccacgccattaagtcttctgtttc

SEQ ID NO: 60795 - DNA, 105 bp, Arabidopsis thaliana landsberg
aggtgccagtccggggaacccctttttggttaggacttgttgtctgacgagggatggcatcggatatgggactaggaacgaccgaccgcccgtccgccggcattt

SEQ ID NO: 60796 - DNA, 1182 bp, Arabidopsis thaliana landsberg
ctctgttcctgcagattgtatcttatccgttgtttttgtggaaactctttttgttaggattagtaattaataagaaactaggtcatttcatcaagtaaattagtatcttgagtagattttgacattttgtacctccctccagtgttcttatagaaagaacatgtgtgtggtttttatattgtcttgtcattgatttgatgcatttcgaatcttgtcatgcttttgaattccacctgaatcctttaatgcatcgttcacaccatatggttcttagaagtttgacactcccactctcaagtgtcatctagtaagaatcaaatcgtcgcattgtactcatatctaactcgattccttatattcccaggtacttgagattgaagtatataaacaggcaagcaatggccaagatcgtcgttccttgcctaaagctctaaaaaagtgcagtcaagagataagtccgcaaacgtatgtgtctcgtgaggcattattatcctcccattccgttgcctggacatctcttctaagattctcatcagaaagttcttgtgggaatatgttaagattctctcttttggcaattggttcaaagtccgggagcgtttccatatggaaagttcatgcacctgaatgctatcacattgaacgcagcaatgtatctcccatggtggaacttactgctatagttcaggcccatagctcatgggtttcaacaatgagttggggaatttttggctgtgattcttcgaatccgcaagtggtgttggttactgggagttgtgatggtaggtaagttagtgttatattacaagaaaaaatggtatttgtaaaaccataacaaaaaatgtcgtcagtgattggaatcttttgcatatacttctcaatggaatttttttttatcacacttttcagtccatttcttttcatactgcagtgtgaaaatttggatgagcaacaaagaagacttgcaaaaatctgtggaggtctataaatcttcattctttctattaaaagaggtaaatttttttatttcttctctatttattctactttttctaaatattctgtatacgaacagattgagtatagcttctgtgatatgtgagttgattaagatcatcctgaattttgattgcgatcctttttgtaatttttctgttagtgaagtttgatttatattgcgtt

SEQ ID NO: 60797 - DNA, 433 bp, Arabidopsis thaliana landsberg
ttactttacatagtatagattttatcgatttatattcaattttgttatataatctttttaataatatcacatttaaagcatgatgatacgcgatataattttttggataaaagtaaagacgcgatatgattattatgtgttcaacataatgtacataagataaaatttatttaaatctattaatatttttttataaaatcaatttgaatgtgtatgtgacattgggacatcatctagtttattttgaaatatatgtaattaggtagtatgaaactcttttagacaataaaaggtagtatgaaactctttctgactttggtttttaaacaacccatatatgtctcttgtaaatttactttcaaggttggtttgaactcttatttcagtgcaactggttggtttttggttgggtagatttttgtttatttaaatg

SEQ ID NO: 60798 - DNA, 799 bp, Arabidopsis thaliana landsberg
taaccctgtcaatcttccccaaaatatccaccacccttgcgtctttccaaggaaatctaggctgaacaaagctccattaaccgcttaggatcttcaagtggcgtgttcgagaagatgacaaagtttccagcagagttgttgcaaaatcactatttttggtacgttaatgaggagagggctgatctaagtagttttgttgatgaagtgttctcctcaacttatggatttgaatgttttttttgtttctacatggtcctgatttaaacaagacaaagtgttctcttttttttttttggtttgccactgttaatccattgttcttacattttggaatagaaaatctttggcttacattttggaatagaaaatctttggcttctggtacccttcgttgaaggctgagatggaatttagatgctttgtgaaatctaacgagcttgttgggatttgccagcgtgaggtaactacattttaccctgttcttctcaatgagaaggatttgctcaaggggttggtagaagagttctttgatgataagattaggtttgaatttgaatcagagagttacacttttgatgtttaagtgacgaaagagagaagggttaagctaatagatttcaatacttggtgtggttctactttgccattgatgtatacatggaaagaacttgagaagattcatggagaatgtgatgaattggaattgaggattgttgagagccgtctcagtgtgcttcctggtttgaaaacagctgttccttatgattatcttgacgtgagtgctggtagtggttgggct

SEQ ID NO: 60799 - DNA, 483 bp, Arabidopsis thaliana landsberg
  unsure (1)..(483): unsure at all n locations
gacattttcgtcatatctatgggttatatgtatgtaattgatattaattaatcaataagggtcctnnnnnnnnnnnnnnnnnnnnnnnnnnnnnnnnnnnnnnnnnnnnnnnnnnnnnnnntagggccctttcttttttgttttagaaactgttttcttgtttatattaaccgttcattttatttgatctgacggtgatgaatgtatcgttacaaatatgtgttggatcgatgacgtgtcattagatttcacaaaactctgaataattttcacaacaaattcttacactagggaatgcgaaaatgattttttgcaagaaatattataagccaattaagtgtatgaatcttatatataaagctaagaactttaaaacgctcacattgagtccatatttgtcattcgattcttatacctctaaactntaaattgctcacatttagtccttattgtttttcaatctcaaaaacatagttcaatcaa

SEQ ID NO: 60800 - DNA, 110 bp, Arabidopsis thaliana landsberg
acgccctcgccgatctgcgacccgctgaacacgtcgaagagccgcactgacactaacagctcgccggccccctcgcgcagcgcctggggcaccgttgcgacagtcacgcc

SEQ ID NO: 60801 - DNA, 764 bp, Arabidopsis thaliana landsberg
tattattttaaatcctctgattaatcttccgaagaagaaagattcgatggacatgcttttgtcgtcggcaactttaaagctggcataacttaaaatttaaaacagtaaaagtgacaattatatttggaaagagtgtgtctttttgctgaagagaatgattatgtttgggaattgtgatgatgtgttctattcaaatgctgtggctgcatgtgttctgtatgtatcatgcatgttgttacgccaacttttccatctatgtataagttcaatcacttttcataaatcatacatacaaattatattacagctccaaaagttcaattatactctaaacaaaagagatgtaatccttaattattgccagaagtcgaatttattagtattttggtttcagctgtaacagtctttataagttactctaatatttttctaaattgttttcgattttgttttgtgtatgagacctctcatcatgcattttcagattgcagtacataatctaatgcatgtgtgcatctgtgaattttctcaagtaagtgggcttttaactttgtaaacataacgggctaatgggcctaactagattgaaagatgtattgaactaagcctagtatgcagaggagactttgcaccttgcttggagaagaggattagcaaactctacaagacaattatttttctttgattatagagttttttcaatcatataatgcttattccgctgaaagttctcgtttctcaacttaccaccacaatctgaatag

SEQ ID NO: 60802 - DNA, 279 bp, Arabidopsis thaliana landsberg
caaatacatatgctcataagaggccatgggagaattacaactcatactcaatcatacatatgacatcaataaatattaacatgcacaacactcaccaatcttcttctatcttcacaaatcaaatatcttggatttataaaagacgatgaatctctaactcattatccactaaaaaatattcaaaacataaactattttaatccgcttgtaaatctatcatatatccttcttcatacacccataaactatgcctatcagacatcaaaacacttaccatac

SEQ ID NO: 60803 - DNA, 218 bp, Arabidopsis thaliana landsberg
tctaaaagctactattgtgggtgactttcgagattgcagacctgcatttatttaacttgcatgattgagttgaaaaaaaaaattacttagatgatttttttggcacaaaatccaatattttaactaattggaccttaaataataataagtgaaagccgtttcttttctctaaaaagcctcaaaacgacttccctctaatactcaccatacctacctat

SEQ ID NO: 60804 - DNA, 299 bp, Arabidopsis thaliana landsberg
caagcgattggatatttgagataatttaatttgtaggttatagattaaatatttcctgttatacatatatagaacgtgagagttatggagaggaaaaactaacttgaatcgggcggagactaatacctaatatgctttaagagacaatggcgtgttcgtataataggtagtgagtctatggtcggaatgggacacttgctgtggaatcacatgaatatttcagctttgtatggaggagagtgttcataaatattagctctactttttaactatgagaggggagtatatacaattcaatg

SEQ ID NO: 60805 - DNA, 539 bp, Arabidopsis thaliana landsberg
  unsure (1)..(539): unsure at all n locations
gctagaaagactggagtgggaacaggcaagaaatgagaatgtaaaggaaacacccctttcttcagactttggtataaaacacggtttcgttaatcaatggggttagcagcaggagttgggtaggggagagggaacaccggtggggcagaggaaaaaggacggaggaaaaaagtatttggagacttcctgcaaatgaaatccaaattttctaatgttttgtctggtaccttgattatctattcttttagggaaccagagctgaggtctactgcaccagacttattaaaggtatatttgtaccaattctgaatcgtagcacgtctatgttgattgtgcctggtaattttgacttattggaactttttttgcagcatccttttgtcactggataattggatgacctgcagccactcaatcatgctgcatgcaaggtttgatatagcatgtctgatgttgcttcctgctctctttctagactcccactcacttttgtaacttaataaactcatctnaacatgatacagaacctctttatgaga

SEQ ID NO: 60806 - DNA, 183 bp, Arabidopsis thaliana landsberg
ggaaacaggacggtgctacccccccccatttaatttcccgccccccggccccccagcaccccggaagagcaggcaccccgcagaaagcatcagaccagaatccagtacctgccactgcagccataaccggcgtcacagcagcaccgcaccttcccaagacacaaaaaccgcccccgacaaaaa

SEQ ID NO: 60807 - DNA, 1668 bp, Arabidopsis thaliana landsberg
agacatagaaggatgtagtcttcactcccacatcatcacattcttgatatctcacatttctgacaacatcatccaaagccttatttttcaaaacaaccctctaaaagagtaagatcctgtaaaccttaccaaccgaaacttcttctcctattcttcttcttggacactgtcacaactcttttcccagacatggtcgcaactcttttcccaatagaagcttcatactcttctctccttctaagcatacctctagtcttcactcccacaaccctcgaaaccaaactcttatcatcatcatcatcatcatcatcatcaacatcaccaactcttgatttctcacatgccttatcagatttctgacaaaccaaatctcttaaactaccaacaacatcgtccaaaatcttatctttcaaacaaccctcaagagaataaagatcctgatacctattcacaggaatatcatcaaacgaaatatcaacattcttcttcttcttctcttcttcttcttcattgtaatcttcccaatcataaggaaaccctaaacgaaaacgattacaaacctcaatcgaaataccattctctagacaacgagatcgattgatgaaaccattgatagaaattgtaatcccatcaattgcttcaagagttgtactttcatgtcgctttgagattgttcctgatgaaaacagtcttactccagatgcaccatttgattcgaatcctttaatacacaaatctttgcctttctttgttagccaccaatcggataatgtgacggattttagggttttgattggagtgatgacagctaagggaaacggtgttgggaaagttccgtcggttcccggcgaggaattgggttttggtaaagtcttggagtaagtgctcggtgaggtattgggttccggtaacggcgtgaagcgacatgctgagagagactggaatttggacttcgccctcgtcgtcgtcatcacaacttcttcgatagtgggactgagaaaattcgtaaatggttggcaattgtttcccggttaagcttgatttttttaggtttcaaatggaaccgaatcagagtatgaaaatttcctggtttggtttaggagaatatttataataaaatgattacctgttgaaagatttgtaaggccgtagcccaggcccaattcgggttgaaaaaaagagtagattatatgggctgtccaaaaaaagcctggaccatagtgaaaatagtaacacaaaaacctgtaaatagaatgggcctaacgatgggcccatttcatataatatggtcggtggagcgatacgccacgacggtccaattatagatcacgtggaaagtattgcggataagagtcaaaaattccgtttggtgaaaatcgtaaatttgcgggaccactcaaaattgaaaatatccattcatcatcatttccatttttcctctttaatccaaaaaaaaaaaaaactcggaggtgatcgtttgtctctgggttaatgaagctgccacgaattggcgtattttagattgatacgtcaaagctcctcctcgcgcacgttagctaaaggaatgtcttgtactctttttgttgttgttgttgattttttgaacaaagaaagaaactaatcaaaaagacgcagaggaagaagaagctccccgtttctatctctctt

SEQ ID NO: 60808 - DNA, 1465 bp, Arabidopsis thaliana landsberg
attcttttaactaacgctccaattttcgatgtaaattggctgacttcaattctatgccttactcttgtactctatgtttctttatctattaaaatccaactctgcttttgaacccaaaaaacaaaacaaaaaccaactctgctgaatcatgaaacacgtccttgatctttatttttattttttcccaatatatgctcttaagaactagttattgcttttgaacccaaaaaaagaattctgagttttaggatatcaaatgatcttacaactttctatatcaagattcttgaacactagatatgcggatttcaaatatactcccaaaaatcaaaatatgcggacctataatccaaatttggatccattcaaaaaacaactaaacaaaattttaagtgtataaaaaaaatgcaaatccaagtcacaagataactggagaaagagatatttcttttgagttgttgctaaattgagaaagtgagtgataatacacgaatcaaactcatgacttacatatgagagtcacggcacaacaaagaaaaaagatgaagctatcttaaagatacaaagtgtaacattggcagaaaaaaaaacaaaaaaacaaagtaacaaacaaacaagctatttaaaagcctaataaaaagcccattaaaggcccatccataaggtacagctagtttagacatgtgaccgtttaatcagttagtgagtagagatagataaaaagagtgaacatcaacatgtggctctctttcttcctcctccgccgagatttttctccgtctctcgttctccgcaatggcggcggtcgctacctccttctgtttctctccccatcgatcgccgtcacgttttggaaaccctaattcatccattcgaagaacaatcgtctgtaaatcatctcctcgcgatgaatctccagccgtctccacttcttctcagcgaccggaaaagcagcagaatcctctgacttcacagaataaaccggatcatgatcacaaaccggatcctgggttcgtaccttagcctaataatgcttcttctgtattcaactttgaatggtttctaatgtatttgatttttttgggtttaggattggtaaaattggaatggagataatgtcaattgcattacctgctgcattagctttagctgctgatcctataacatctcttgtcgacactgccttcgttggccatattggtaaatacttactttttgcttggtttcaacaatttcacatttttcgaaagttcacatttttaacattcatatgtgtaatgtgacaggttctgcggaattagctgcagtaggagtgtcagtttctgtattcaatttggtgtcgaagctcttcaatgttcctttactaaatgtcacaacatcgtttgttgcggaggagcaagcaattgctgctaaggatgataatgattctatagaaacaagtattttactttccttaaagcttata

SEQ ID NO: 60809 - DNA, 409 bp, Arabidopsis thaliana landsberg
tcgtatcgccgtctccgagcatgaagcaggcgtccgtcccgagttggaaaacagagtgtcctgaatgactgccgtgacaagtctcccctacgatccgaacccgaaaaagcccggcataaaactgcctgccggttcctgcgacgcgcactgccacgtcttcgggccggcagcgaagtttcccttcgcgtccgagcgcacctacacgccggtcgacgcgccgaaagagaagctgtttgcgctccaccgcctgcttggcatcgaccgatcggtgctcgttcaggcgagctgccacggcaccgacaattcggcgatgctcgacgcgatcgcatcgtccggtggcaagtatcgcggtatagcgatggtccggcgcgacatcggttaagcggagctcgaaaagcttgcatgaggg

SEQ ID NO: 60810 - DNA, 256 bp, Arabidopsis thaliana landsberg
  unsure (1)..(256): unsure at all n locations
atgacgttgggggagaaggggagtttaccgattttgacaactcttgaaannnnnnnnnnnnnnnnnnnnnnnnnnnnnnnnnnnnnnnnnnnnnnnnnnnnnnnnnnnnnnnnnnnnnnnnnnnnnnnnnnnnnnnnnnnnnnnnnnnnnnnnnnnnnnnnnnnnnnnnnnnnnnnnnnnnnnnnnnnnnnnnnnnnnnnnnnnaggatttgtagaacgatggcgcgaacgacttgttgcggcgacacgtgaagat

SEQ ID NO: 60811 - DNA, 1684 bp, Arabidopsis thaliana landsberg
atgtggaatgcaatgtttggtgttgtatttattataggagacttaagtccaaagcggtgcgccgtgacgtggacattttctcagtcgtttattttgaattcatccaagtattatatgatatagccatgtgatgaaacgatcttagccactagccatggaaaagtcgtgcttaattgacgtgtttcaccaaattttgtttttccacgtcagcatccatatagattatcattatctgtaataatcccgttgtaaccgagagaaaagaagagtatcatcaattaaggtctccttttaattctcatcgcttgttgtaaataaatgaaacgtacgatgtttgttattttatatagagaaaagttattatccaaaagaatataggtgaataaatgaagaataaagttaaatgtatttgcccgtaagaaacaacaagcgatcatgagagtcacgagtgtgggactcttcttaaggcttaactcttaagccatgcccatgcatgcccccatgacaaagatatcgtaacgaataccaacttttgccagtgatacgttactcttacttgcgtatagggtaattgtcacgggctggacaagttgcgtttgagcccaatccacttttttttaacacaatctgctttgcgacagctttctttcgtcttttattttatttctgaagatcttgattttggtcaattaaccaagaaaaattacaggaaatcgaatcggatgtttcaaattagtttgcctatggtttaacgtaatatatatgcaacttcattagcaaactcaaataagcggtccaaaatttacacacactaattttaaaaaaaaatatcaactcgaatggcgttacttgatcttgatgtttacatatgaaaaaatgaaaacgaaatcatttgcatagactgcctaaattcatatactaactaaaatagcctaacataacaattgaatagccatacattagctaactaagaaaaccttacttaatgtcataatttcactaatcataacaattaaaaagacgttcaaataaaaattcaaataaaaagacgtcgattagttatttgtagatagtttcaattagtacactctttgtgtttctattgttaatttccttggttaacgtaatttgtacatgcattattttgctttaaatatgctttatatacatatttgtacaatggcatattttgcaccaggcttggcgcttcttgctctacttgaaaaaattgaaacccatcttgtttaggttgggggcttctattcttaatgatctttttgaagcatctacataattttgcatgttcattttgtttgtttgggacatcattttttgtatttctacatatcaaaccttgaacaatcaaaatacatcaaaatacccgaaagaacaagaaaatgaaagaacaacaaaaaacggaaactatacgaaaaactcataagacttcatttgttcgttctcaaacaaacaatacgctatatcaaatagagaaattcgaacactctaacgtacatattcttaagggtggaatttggaaacatataatacattcgtacagcctctacactctcttctctgctatcatcaccaatttgtaacaaacctgagcacttaaaacgtagagtatcatcattaagaaacctcaaaggacccttactagtcatctcaataacctgaagcccca

SEQ ID NO: 60812 - DNA, 479 bp, Arabidopsis thaliana landsberg
ttagagtttatcaaatgagaattgattatctctctttttgtttttgtttttgttttttcccttttaatggacaaaaaccattgatgaaaatgttttacgtgcctccaaattgatggtttttattggcccatttcgaaacgaatcccatgtaggactgacaataaactctactttgatcacttaacttctgatttgtaaactgctcatagatttattttctcctaaaatgatgagtctagctagtaatagaaaaaacaaacataaatgtacatgaacatgaacatgattaaaaaaaagtcgatagattaaaaaaattggatggataatatatatcataacacaaagcatcaaatatatagttgaaagatcctatgaagtttttagttttgaactacgttcatattaataaatctgatcttatcgtcaatatactgaattcaaaatcatgtttcagttaattgaaaatttattcatgcata

SEQ ID NO: 60813 - DNA, 397 bp, Arabidopsis thaliana landsberg
  unsure (1)..(397): unsure at all n locations
tgcttttgatttcgaagccttgaaagctctcaaagttttgggtttgaaggtgcacattgtcgacgannnnnnnnnnnnnnnnnnnnnnnnnnnnnnnnnnnnnnnnnnnnnnnnnnnnnnnnnnnnnnnnnnnnnnnnnnnnnnnnnnnnnnnnnnnnnnnnnnnnnnnnnnnnnnnnnnnnnnncaacctgttcgctacatcgtcttagagtacatgtgcggactagttatcgattcatagccacgctatggatgcttctaaggactaannnnnnnnnnnnnnnnncgggacataaggataatgtgtgtatgacgctcctgacggagctgaactcattatgcacgactcgtactagaaatgccaggaattagagtttcagagaagcgtcgtagcac

SEQ ID NO: 60814 - DNA, 786 bp, Arabidopsis thaliana landsberg
atgtttaggtctgaaaaggaatatagctaagttcactaagctagtggggcttattatgatcacaccttggacggagctcttccccaaaccaaacatttcccgtttgtcctcctgaactcttgcctttgtctatcacagtcatagtttatgtaaatgcacagaattcctgcaacgagaatgtatattgccaactgcaaccaaagacggatatagtgaagtcttaggtacggagataggcatatatgtcccgatgatcgtagcatcagtggtgttttcatgaacagctttcttctactactagaaaaactgatatctggcaactacaatcatgagcataatatgcaacgagcatttgatcaacaatctacactttactctctcccgtctgttttgtaatggaagataccaagtaattcaataacaagagttaagtgcaattcctagaaattgggattttcacatttagctcaaccttacttgttttttttcgtataaaaaagtggtatcctaaaagtttctcattggattaacacacaaagacgatttctctcttctagacaaattcaaaattatgcacctgagttccgagttcgacggggtggttcacaaggtacatgcctggagaagtgtagacagaaggcacccacactagacaaccccagcatatatagaatccagctgaagaatcataaattataaagcattgaaaagtaagcttaagttcatgtgttaaagccagtaacaataatctgaataatatgctgctgccttagccatatagcagaa

SEQ ID NO: 60815 - DNA, 1789 bp, Arabidopsis thaliana landsberg
  unsure (1)..(1789): unsure at all n locations
cgactcgatctttatctgaaagagctcctcttatagctgaccacggaacctccgctttaatcagcacaggggtaggaccagactgtttcacaagatgatcatgttagcaagaagagaaaactagtaatgatatgccaacacataccgagtgacgaaaacttaccccttgccatgtacttttggcttcacgagggtcgtcccttaaccactctttaccagaggttggaatctgagaacgnnnnnnnnnnnnnnnnnnnnnnnnnnnnnnnnnnnnnnnctgagtatgatttgttatctgataagaccaaaaccaagaatgaaagtttaaaagacagattccaaaacaggaggattacacacacacacagacacacacttactttactctcggctgcatgattcccccaactctgctcttcgccaaaaagctcaactgcgatttccttacagcgtctaagaatttcatcagagacttgaacagactgcgatcaagaaaacacaaaggtgaatcatttggttcacaaagtcaaaaacagaatcagaaaattaagttaaatacctctctgtgctgaagtatctcttctcgggaaaacctcacacgttcaccagaattttctctctacaaaaacataaaatgtcaagagcttaggattcaattacataacataaagtatcaatctttgtccatattcaaattcaacaaccctaaaaattcaaactttgtacaaaattcgattcaaaagcacggaaacgaatccaatcctcgtttaaactcgaattgcgaaaccaaattgaagagaaacagaggatttttcaatgtatttaccttgacgggaaaaggggtttcttcggagccgccattggtaagatcaaatgaggaagaggagctaaagcgagggacgaaaagcctgcttttgccgccgccaccgccgggtctcaaactcaaaaccgatggttcaccttgttgttgcattactcgattctcttgttttttcgcgattagaaggattcaataaaaaaaagttttgcagatagatagaggtatatagtgtatatatatgtgtctgtattgacggtggagaagataaaatcacttcgattcccttttttttttttggctgaagctgtgttctgtggtttgccctaatttcctttttttcttctcacgtgtaaatgttattgttaattacgaaaatattctgtatatcaaaataattttatttattgaaaaagaattgatggaaaaatcttacgaaataaagacttaatattgtttttaatgcatcattatcaaaatacaagtctactttttcagaattaattaccaaagtatcctctgtctataatctccaacacaaaataattaatttttgggaaaaataattgatggaaaatcttatgaaatgaagacataattattttgtatttattgcatcactataagaataaaaatctttgttgcatcattaaaagtgttgttggcatggctcttgcatgagttaagttagttaattcaaagattacctctatctataagttatttatttttgtttcctaaaattatgaatttttaagtaaatttgacaaatatacatatgtataataataaatatagttggtttattagattataatttcttaaaaaataaaaaaataactttatatgcatagattcctttgcaaattataactttattttactccctttagaattaggaacatgatattcctcaaatttctcccatgttcaatgtgattatgctggttttagtttagatgttaaaataaa

SEQ ID NO: 60816 - DNA, 542 bp, Arabidopsis thaliana landsberg
  unsure (1)..(542): unsure at all n locations
gctagattcactctcttgtttgcgtggatagaaactatgtaaaaaacaaaaatagctagcgacgagtaaatagattggcaagatatattactatttttattcttctctcagctttagataagagtatcctttgtcatggcatctaggacaactctagctctctagctagctagaaaatactatcatttgtcaacatacaactggatcagatatataggatggtattgaagtggagtttcggcgttcaactcccatacgcagcgaaaaatcgcatgcgagtttcatctagggaaatcccgcgcatggcataaatgagctgagggcaacactcgaactctaaggtcatacttaatttagtaggtagtcttttgagtgatctttaagggtagtaagtgaaaaaatacagagacgagtttttcattaaaaaaaaccgtccattcacgactnttcatatacattgnctcttatctgtatttatgattcacgaccaagattatatcatgtaatatcttaatcgtctcttatatttgaaaaaccaaact

SEQ ID NO: 60817 - DNA, 420 bp, Arabidopsis thaliana landsberg
aacgccgttacctcaggcggcctaatcggatcagactatatattttcgccgaacagtttaacacttgccttattaacggggttgagacaagtccgtgcgttatggccattatggccacagtgtgagcacgttttcgccaccgtcaccgtctccttcaccatctctctctcgccaccaatgttttcggtatcacaagaattagaatcacaagatctcgctaattgtatttataccttaaactctcttgtgcaatgatatatatatatatatatatatatatatatgcggatatgcgtgagctgttatttgtgaatgtccttggcgcttttacatttttttattttccttaagagataaagcgtttccttaattatcttgatttatttggaagtttttacccacgtcattataaggaaaaat

SEQ ID NO: 60818 - DNA, 232 bp, Arabidopsis thaliana landsberg
  unsure (1)..(232): unsure at all n locations
tgtggtttcatggaggcgtcgaacacaatccaaaagttgatagatggaaaagctcgaggcagataaatcgnttaacgcagacgttagagttgtatggacgatagtattgaggggcgtcttacagaattgactgattaggttgtttgctttaacatccactttttgctgcggtgtgtggtctctgaccttactacaccagagttcgtatagaagtagggtataatttgtgagt

SEQ ID NO: 60819 - DNA, 1673 bp, Arabidopsis thaliana landsberg
aatgattaaaataaataacgtttcgttttcattaaatggggaaataataatcgaaaaaaagaaagaaagaaagaagaagaagttagggctgaggttgatcagagcgtcactgatctcgtgatagtgagacttttggacagatacgccggatgggacccacttgctttgcttttggccggatagcttttttacttaaagaaaaaaattgcaaccaccatctatccctcgatgctcaattctaactcctttgtttatttatttattgtgatgctatagtttttttcttcttctttccattaaataagtcagattttattttctcttaattaatacagtaagttttaaattatgttttagttataagatatgaattaaacacatagcattattttctttaatacgagcaaattctccgaaatttgtaaaatacatagaatttttctatcaaaaataaaagtaagagtgtagatttgtatttgatgggatttttattctaactgtgatatctatatgacaaaatctctatcattctaacttttttctttttcttgatatcattctaacttaatcattagactacaatcaatttgtttagaatatatttgtgttgcgctcataacgattcttttcaatatatattgtttgattaaagcttttaacaaagtacagtttgctttctaaattatttttaacacgtatccagttttttaaaaatatataaaaatatattcttcacacctatcattttttttataaataaaatattttaacatttaaagatatattaagatatttctaatagtataatttatttttaatacttatcatgtttcttaaatggtttgaacgcttcgtttcattagtttatccaacctacctaagttataatattacactttagtaaaataaaaaaaaactggttataaacttatgctttgctcgtattaaagaatttcagtacttgtatatcgtttttttaattattattatgatttatgacctcgcgattcgtgatggttagtagtagactagtcgtagtggacaactactgtaagaaaaaaaactaaaaatagatagacacacacgctaaattaaataaatcgtaaatcacgattacacatttacgtttgtacttgaaaatgttatcgctttacgtgtggtgatggtgagacaacagtgtttgtgtttggacgggatagatgtcaaactactcaaacgtgcgactctaaattacacaaactctcattcattgcccatcctccatcgatatcttcataatattttaacaatgttatttataacttcaataatacacattcggtttcatttacaattaatccttgcgttattattacttctaagctatagtatcttgtacttccttcctctgctattatttaaacggaaagaatccagctaattccgatctacctgctcctagtagcaatctatctataaacaaacaaaactaaagtataaattatcacgaacatcttaacaataatagtcaatgcaagtggttcttgtgtatacaaagaattaataggaactactatccacatccttacgtgtacatgtttcacaaccaatcatgcactaaaataaccctttatgaaaaagttaaaaataaagaattatattatcaaagaataatgataatgttcagcaacatg

SEQ ID NO: 60820 - DNA, 528 bp, Arabidopsis thaliana landsberg
  unsure (1)..(528): unsure at all n locations
tgaaaagttgtgtttattgttctgcaaattttggtgccagaagtggaatttgtaaatataagcctatttggttatggtttggattagacggagagtgtttttctccttggttcatggagttagtttttgactcattatttctttcttcaaatttagatgcttttaaaaagacaatgtgcgatctccgggtgagtgtggaaggaaaaaataaaatatatctcaaacatactatttatagaaaatcccaaccgattacaaagcagctgatcggtgtgtatttacaagtaatgtgtgattttttatttattttttttttttgaaaaatcgtgaattaaaaggaatcccaacgtgtgaggtgtgactctaaagtctgaataaagttgacgatccataattttcttatgtttgccgtcgattgtgagaattgagaagcatatgtggtttctcttctaagagttaaaaataccgtgaaataaaagctatattaattcatatgttntatcatatatcttcgaatatcagcattag

SEQ ID NO: 60821 - DNA, 441 bp, Arabidopsis thaliana landsberg
tcttgaaagcttctagatgcttgtggaaagaacgttctctccccaactcctccaactctctccccaatcccttgaaagtacctgaattcaaaaaacaatccatcaataaaagtttccataaaagatcaacaagagaaactaaagataagatcacagaacctgaagtctttgtggtcagtagcagaggctaagacattgaactgagaagtagaattagtattttgatgaagtgacaaagcggaagcatgatgaagagtttgtcgttgttgtttgggtgaagtagaaggataaggataatcaagagaatggctgttgaaataaccctctagtgttactactacttccaccaagcccaaacctattactgttactgtaggcatccattgaagaagaagaagcagaataagtagtagaagaggaattagaggaagaagaagaaga

SEQ ID NO: 60822 - DNA, 472 bp, Arabidopsis thaliana landsberg
caatccgcgtgtctcaggacatccaaaaaaatcatttatatcattgacaaaaaaaacatatcgcgaatattaaattatcacaaataagtgataccaatgaattagttgttaaccatagtgatttaaaagactgatattttaattgatgaatcctaggaatgaaaagttgataattgtatgatctaatctccaatttctttcctctttaaagaggtaaaattgccacatggaacatttaacaccattctgaatttctgattccaggaacgttgtcgtatcatatctactcgtgtaagtcttagatcgatttagaacttagaagaacaacacttcttgttttatcctaattaatactataatatatgcatgtaaaatcttgttttttctatatcgggtcaatgtgaattgatatattagtttgcgagtgtgtcggcttccgtaacttagaggaaggggtttttacttttctttt

SEQ ID NO: 60823 - DNA, 1646 bp, Arabidopsis thaliana landsberg
cttaaggaatcctttctgtaaattgatgcgaatcttgcaaagattttatttgttttatcgaattgaatctcctgtctgtctatcaagcttcttagtagcagcgccaaagatgtaagtattgtcttgatctattgcaggctgtgaatggagaagtgccaaaggaggagaaagaagaggaagatggggaattcataaaagttgagaaggaagcttttgatgccaaggatgatgcggagaaagcagatcatgttcctgttgaagagcaaaaggaagttattgaaagaagctcgagtggttcacagagagaactacatgaatcacaagaaaaggcaaaagaactagagctcgaattggaaagagttgcaggggaactaaaacggtatgaatctgaaaatacccatttgaaggatgagcttttgtctgcgaaagagaagttagaagaaacggaaaagaagcatggagatcttgaagttgtccaaaagaagcagcaagagaaaattgttgaaggggaagagagacacagctcacagttaaagtccttggaagatgctttgcagtcacatgatgcgaaagataaggaactaactgaagttaaggaagcttttgatgcgttgggcatagaactcgagagctcacgaaagaagttgatagagttggaggaggggctaaaacgttcagctgaagaggctcagaaatttgaagagctgcataagcaaagtgcttctcatgctgactctgagtcgcagaaggctttggaattttcggagctgcttaaatcgacaaaagagagtgccaaggaaatggaggaaaaaatggcgtccctgcaacaagaaatcaaggagctcaatgagaagatgtctgaaaacgaaaaggttgaagctgccttaaagagtagtgcgggagaattagctgcagtgcaagaggaattggcactttcaaaatctcgtttgttagagacggaacaaaaagtgtcttccacagaagccctcattgatgaactgactcaggaacttgagcagaagaaagcttccgaatctcggttcaaggaagagttatccgttctccaagatttggatgctcagaccaaaggtcttcaggctaaactttctgaacaggaaggtattaattcaaagcttgcggaagaactcaaggagaaggaacttctggaatccttatcaaaagaccaagaagagaagctgagaactgcaaatgagaagttggctgaagttttgaaagaaaaagaagcgcttgaagcaaatgtagcagaggtcacaagtaatgtagcaacagtaacagaggtctgcaatgaactagaagagaaactgaagacctcagatgagaatttctccaaaacagatgctcttctttctcaagctttgtcaaacaactctgagcttgaacagaaactgaaatcgctggaggagcttcattctgaagcgggatctgcagcagcagctgctacccagaagaaccttgagctagaggatgttgttcggtcctctagtcaagcagcagaagaagccaaatcacagataaaagagctggagacaaagttcactgcagctgaacaaaagaacgcggagcttgagcagcaactgattttattgcagctgacaagtagtgatgcacaacgcgagttgaaggac

SEQ ID NO: 60824 - DNA, 1377 bp, Arabidopsis thaliana landsberg
ggtattccctttttatgtatgccacaatgtgactattcttagcctggttaagaattctgtttttcttaaaaacaacataaatggaggcatataaccaattcatccaaaaatgaataaaagaatttgtaacatttgagaataaaaaaggttaattaatggttagaaacatagatcatataggtacgttgtggctaatcttttcttttttcgtcacgttgtggctaatcttaagatcataaaatgttaaataccaaaagaggtaacgtcacgagtctctgagccacaaataagtacagcttaaattgggcaaatcttctagaagcagaattgcatatgtgtgtctggttaaaattcgtgtatagcttaaggagatgatacgtggaagagtcagagacatgagataatagtaaagagtaatactaaaaatcagtaactaacaccaaaatggtccaacaatcacagagaacagagaatgacagtagcaacaaaagtcgtttgtgtttacatgatgaaacttgtcttcttcaaaacgtacacatttcctatataggttccactcaaacctattatcattctatttcagcgctattaatctttatttagtgaactcgagtgttcgttatgtatatgtgaaaaaacttcgaagtgtcctcataataaagtaacagtcccgatttttgtgtaaaaaataacaaaatataacagaaaatgtgaaacacgactaggcatttcttgtcatgagtttggacccgtcaatgtacctaacattattgtttctagtagatttctctaaaagcacatgtgattttcaccttctcacaccaaccagacgcttcttgcttttctcagtttctgatcattcttatgtttaattaggctaagatatcaaccaatttctttaaccacaacataatctttacaaaaaggagtacttgctgatcaaaatcatttgaccaccattacttagtttttgacatttgaaatggaatcagaagcaatgaaacaaaatacacaatgtcaacggggatataagaatatataaattctacagcagaaacatattcaggaaagctcgctggaaacacgatctgggatcaccaatgatccatcttccagagatcttactgcattgtggccaaagatgaaaatagtacggccgttgcaattttgcacttgacgaagttaagtagttttggaatatgagttcagaagttaagtagatgaacaaacagaagtagtaatatgagttcagagcttccactaaagcgctttcggtggggttgacaatacttctattttatctttgaaatgaaagaagatctaaacatgtctttaaggcaaataaacaacaacaattacagttagaaaaaatgaaac

SEQ ID NO: 60825 - DNA, 380 bp, Arabidopsis thaliana landsberg
gatctcctattttacgttatatattcacaagtcttctttttttctccttttgtattatgttctggcttttgtttgcatcaaccttaccttgtgcaatttgttcttttgtctttaattaggtaaaacgagaactttggttataactatccatcagtttaccgctaacggtcaaaactttgtcaatgacagaatgtgatatagtcattcgttgttaacgaatatatgagaagttgttagaaggaattgaaatctttctatttacataaactttcgtattcagtataacttgaacgagaaaagttatttacaagcatgttttttcttttatttataattatttattctttctagcgctttcattacaaaacccacttacttgg

SEQ ID NO: 60826 - DNA, 1847 bp, Arabidopsis thaliana landsberg
  unsure (1)..(1847): unsure at all n locations
atcgaaaaaagtcatacatagacttcttcccgaaggttaaaacagaaatgaaatacttacacagttgtcagtgttaaatgtgaaattagcagaaagataagaaaatggaacacggtcaaatgctgcaactgcaccagcttccntgtttttcagcattgcctcatatgccaaagatgtagggagatctggagacagataagctatcttcctagagaccatgcaacttcccacaaaaacgggagcatcaagcgggccttgacagttgaatacagctgtgacagaaccagctagctgcagtccaagatgatagaatgaattgggactagatgaaggagtagataacaattataaaaaaaatgaaatgaaaatacatcaagccttaataaatggtgaagtttaacggaacatgaataaggcaatataaatgataccgggaaaaacaagggcttcatcttgaaagttttcatcaaagcattaatttccacatagggaacctgaaacaaaataggaactatcaacaacaaatcaggcacttaaatcaggaaattcatccaatttagcgcccacaaaatcatttcgttttgtctttgactggtatgtctagataactgccatctagatcagcggttcacataagaagatgttacctgacacatcagatgaaactccccctcatctggatgtataccgaaatctccagaagcctccaaaggaacctttccaaaccaaccattagcgttatgcaggaaaatgcgctggccgcggaaagaaaggctggctgagacatcctgcaaagataatatgaaggaaaaggtagcctgagtcatcaaaaaaaaacatgagctgacatcctgtgtttgtagctaaagataacgacacgagaagtattacatctgaacatctacatggaaagccttaaaacctctatagaaagacatatattatagatcttctaacgcaaaggaaactattataaagacataaggcagcgtttcaggagatatttaaacccaagacttacagaaaacgaagaaggtgcatcatttatatggaagcctagtcctgttacgtcaagttggccatgtaggtttggaaaactttctcctctagacatacatagatgaacctgcaatgcaatagacgacagtgagaaaaaaaaatccaagggcaagccatgtttatttcagaaatttgctcagacccctctacttgtaaaagagaagaaagaactcccaaactctacttcaaagatctgtcacaatctatcatacatatagattccaacaacaaagtgttctctagccaacgtgctgagactggattgactaactaattgggcatatttaacagcacataggaatataataaattacagtagaaaaaaaatggaaaggttgaaaacataaaccgtagcttgttaacggtcattgaaaataataaactttaattcactaagaagacaaatagtggacattagagaagcacctcaccagtagctcttcccttagaccactcgattggaatctctagaattctttcaaaaatctgcagatatgcagaaatgagataagtcaaccatgcaactgatgacaaacataagtcatctattccacctgacaccttaccgggacaaagaagttggcaacatttaaatttgcatgccagttctgctcgacggtatcaacaaaaacatcaacagacaaaagcccaccatcttcagatgttacatctgatctccacatattacagtttccaccaagttgcacgtacacacgaccataatgattctgaaacttaacatgtccatggacgttcctcatttctctacaaatagggtggtttaccaa

SEQ ID NO: 60827 - DNA, 785 bp, Arabidopsis thaliana landsberg
ggaaaagaagaaagtttcagaatcagacactgtcaaaaccttttgtaactgtgcctaaggataagcaaggaaaatactttcttcattcatagtactgcgccttaagcacaagatgataattacaagtattagctgaaaagaaagagatatatttacacacctcctgcaggttgaggaataatactaacatcttccatgattcccatggctagcacagtgtctacatccctcttcccttgaagcatgctgtagacctaaattgaccaaaagccagattagacaagatgtgtatgtagaggccctacttagacgctcatgcataaagactttaaggccaaattttacgaagaaacatacatgataccataaagagtgattaaccttaattaaaaataagatctccaaaggatttcatacacagatgatgcactcagaagtgttatttagcataaaaatacagctcagatagtttatgatgttttagtcagcgacttatctttacatctaagctgagaaatgcccaaaaaatacctgtcccttctttgttgtaagttgccgtagtattgtctcagggctagtcttccctttagttggttccccactaaatatagaaggcaccattatcaatgaaatcgtaatctaatagttgaaataaaaggaagctaccagtgccatccagaattgcctacaatttaaaccaatataaactacattcataagggagggattggcaccagcttacgtcttacgatcaaggaatcggatggatatgttgttaacctctg

SEQ ID NO: 60828 - DNA, 704 bp, Arabidopsis thaliana landsberg
cagcaccattccactgtggcctgaatggacgactgtattcaacacctgctgtatgccgaccaattgtgagactactattgtctggttgattgccgtgaacaagattccccggtgttcttgaattctaactcaagatgaagttcgttagtttattagtcatctcagcaatctcattgagataaccagtaaaggtgttacctgaaccataatagatctggacgtcctcttgtcatctccttcaatccatggatcagtgtagtttatacgaaatatagagtcaatttgacccctctctaaggaaacattaagcttctggtttcttccaaacagattgcggtgggaataagcgaagctgcataaaatgattacttcaactacatcagtaatgtaatacacacagcctaggccagaaataaaaaataatcattacaaataaaatatacattacttttaccttccaattaatcctgatagggggccacttgtgatcctacaaaagaattggacaaaagttgtcatcaagctacaaaagaaaaaaattgaatcgctgtaagtagcaaacaaactaaaacttacccactagatatcccaccaccagcagagaagcctccactgtgacgctcgacacagttcatgatcaaatcaaccttcccactatctaacaggaataaaaaacatggaaagaagaaagtttcagaatcaga

SEQ ID NO: 60829 - DNA, 491 bp, Arabidopsis thaliana landsberg
gggcagctgtggcaacagttcgaccacaacgtgcagagcaccggcgtgtcgcgcgcaaaatggggcctgatcgtcgcggtgtcgcgcaatccgggcgcgacgcagcgcgcgatcgccgcgatgctgcaggtcaccgaggtcaccgccgggcgcatgatcgaccggctctgcgaggacggcctgctcgaacgccgcgagaagcctgaggaccgccgcggttactgcgtctatctgacgccggccgccaaaccgctgctcgaccgcatcggcgcggcggaggcgatctacgaggcgcaggccttcgtcggtatgaccgacgccgacctcgagcggctcgagcagctgctcgtcatcattgatcacaacatcggcacgacggcgccaagggaggacgaagagtccctgcaggcaacttgacatttccgtcggggaatactaacgtagggtatcgtttcacgccttagtgaagcattttcccctgtctctggaga

SEQ ID NO: 60830 - DNA, 533 bp, Arabidopsis thaliana landsberg
aggtccctgtatccttgctgcatggtggctggagctagtggtgctaaatcctgcagcaaatatggtggcggaagtaccgtcggtcccccatgcagataaatttcaccaataaacagcgtcctgcatacttgtgaatagtacaggtttcagtttgtggtagcgatgggggctaaaaagatacagcgataatatggcttgatttggttaattgctgcgatcacgagctcatgagacttgcaggaactaaaacgtgcagcgtaaatgtaacattgttattagcaatggcccctcgcgattgtctagttgcatgacaatgtactgctttattcccgatgaagagcgtattaccgatcgcactcgggtttgaaaacgtgcatggcaacgtggatagaaagattgactttctgtcggcatgttaggagctgggaggagccgattcctttcagaggtaactgagcgatacgcccttctacctagctgggtaaagtttgctctgcaggataaaacacaatttctgaggaggattgattact

SEQ ID NO: 60831 - DNA, 495 bp, Arabidopsis thaliana landsberg
  unsure (1)..(495): unsure at all n locations
tattctattataagctaggtacctgcctaaattcagatatagaagaatgtggtcttacacaatttcaggttttttgctcatctcatatgttaaattaaacagttaaagccttaggactcgctcatcttgacatcgaatatatataggaggttaccttctctcacttctccttgtgtcatctctgcatccacaactatcatttaaccagttttacttacatgattagtttcttttatagaggagtatataaccaaagggtataacgaatatatgagttactacttttgtatttctcgtaacagaaattcagtatcttttgtaatatatatagcaacacattaatatttttttatgaaacgagtcaatcaaaatttaaataatcactaaaaccaatttatttattttttttaaaattaattcaaataaatagtttaaactcatagaanaaatatataaaatcaaaagacttcaaactaggtggtagagcaaaaaatt

SEQ ID NO: 60832 - DNA, 588 bp, Arabidopsis thaliana landsberg
caaggcctgcgtgaatcgcaacccattgcctactggtcgctccccgatgtcgccgagtacggcacagccaatccgttcgttggttcggatgccgatgctgtggatgcgctagagcaccacttaggcatagccgttcgccggcaattgatggcggatgtgcctctaggcgccttgctttcgggtggtatcgactcatcattagtcgttgcgatgatgcaggccagtagcggtcgatcagttcgcacttttaccattggctttgaagaaaaggcgtacgatgaagccgcacatgcgcgcgccgtagccgcacacctgggtaccgaccataccgaactgcgtttgtcgtcgaaagatgccttggctttagttccgcaactgccatcgatgtttgacgaaccgtttgctgactcatcgcaactgcctactcatttggtgatgaaattggcgcgccgacatgtgaccgtggcgttatctggcgacggaggcgacgaaatgtttggtgggtataaccgttattccctcggcaccaccctatggcgaaggtttggatggatgccctcgccactacgcttctggctatttcgtgct

SEQ ID NO: 60833 - DNA, 338 bp, Arabidopsis thaliana landsberg
gtttagcttggacctctacctcatggattgcttgggcaatctggttagctcaataatcagaagatcttcatatacaggatctttacaccgatggaaaccttggcccacaccattagcatggctcgagaatggcaaacgcgactgaccagaagaaaatcccgacccgaataaagcgacgacatgatgcttgacttctcactactgcttcacagatggggcttggacagactactcaaaaactgctggcttgagatggaactgacatagactctttcgatccctaaaggcgagccacatccttttaacactgagccatacgaactagatatttgaccata

SEQ ID NO: 60834 - DNA, 1178 bp, Arabidopsis thaliana landsberg
ttgaaacaaaacttgtaattctcaggcatctttggactttgtttcgttcttactgaatctagcgtcacttgaagggacatgggacgaatcactggaacgggttgctcagtgctacaaggaagctggacttaacgacatcgccaagtttgttctgtacagagattgagaagtctcttttaaaggccacaatttgttcttttgagacctgagatgacattatatcaaatgatcttatgcatttagtgtctacgttgaagatttacattaaccctgctaaagattcattgggtcaagattactgattgtatcctttctgagactaaaagtggaataaagcagaatgatcatcttatagagtaatactctacgtggagattatatatatactgccaaaaaaatctagaaaatgacagtttagtttgcatagtttgggtctttgggaccatataaagaaacaggattaaggtattagattatagtctagatgacagatgccaccatcttcttagttggcaaatggattagggaccttcttgctcttacctttcttatttctccccaacagctttctccagaggctcttaactccgccggtctttttgtgaggaacaatggcaaagcagtttgagtcggagcctttgcttttgtctgagagaagaatctgttctagagcctcaatggtttcattgtaaacagagctgtttcctccctttccgtttttatctgctgcttgcggtttctgatccttggattccccggtgttgtgatcttctgccttcatctgatccaaaagagatgatctctggctggtcaatctcttctctggtttagtagtctcatgtgaaggttgtgcatcaggtaggttattcgatttgtctgtaacgtcggacatgagtgtttctgaaagtaaagctgtttcctttgagttagtcaatgccttgagctgctttcccaggtttagaatcgtctcttgacactcggccaacttttctgaagcagcagcgatttccaattcctgaatcatcaaacacataaatcttggacaaaaacaactctcaatgtaatggtatcgattttcttctgcttgtaacttacggttcccatgctttgtttttcctccagcttgagctcgatcataaaaagcactgcaacaagaaaaccattgaatacatcagagg

SEQ ID NO: 60835 - DNA, 1144 bp, Arabidopsis thaliana landsberg
acgtacatgcaaccatttcaatattgattactttgatacgaaaatcgaccaaagtaagaatctttacctagagaggatcatgaagggttgcagctgtagatcttcacctatctccaatggcctctacgcttcaatcttgtcatcaagattctacgtgagttttatcatccaaatcactctactttcatatttaaacctcttaaatcgttttgaaaatgaatttttttcatatagagttaatgatcgttcttcaaccataagatctaaggaaatcaatgcattttatagtgggagattaagtgagtacgatcttgtagagatccaggtacattttataccttttttttttttcttttttttttcgtttttcgcttttcgtaatcaattataatattgatgagtgaaaattcaatacatgaagatgagagcaataatagagatggcgagcaaggatcgtgaagtaacagcgttagagttagtgccggtgagactggaatcaccgttaggatgttcggtgaagagatctgtgaaaaggttcttggagaagagaaagaagagaagcaaatcttttacacttacacctaattacacctctagtacttcctcatcctcctcctctcttcataatttctaatcataattttattatgttttccttctagttatcaatcaaaacaaaaaaatctttgtttctttcttttttcttttttccaatatgggtttctatagctctcatttatctcttgtaatttttcccgatactcgacgatgaatttcgagtttttttttttgatctgttttaaatcaagacattatagtaccattggagtctgtataaaattcagatcatttggatcgttatttttttcctaattcatgtatgaagtgtcacacttctcctacaatgaattatgaggttgtccgtttattccaagttagctctatgtactttgacgtaagctaatgcaacttgtaaaatgttgggaactcttctattactttttttcctttacaaaataagaaaatgcacgcatttaactcgctggatccaccaaagaatagaatgaacaaagtatatcactagctttagtgaattctagtagtttacgagtcactcatcatcggcctttggtcattaccatta

SEQ ID NO: 60836 - DNA, 215 bp, Arabidopsis thaliana landsberg
ccaacctacaggggctgggatgcactttagcttgatctttacgctgcatggacttttggcattgtgtacacctgaacttatcatcaagatttaggggatgggatggccagtcacattagatcacaaagtgcttgcattccagaaccaccatcgcttcttgagcgaatgcatgcactgtgattgaatcctccagtatgctattcttaggcgactaa

SEQ ID NO: 60837 - DNA, 949 bp, Arabidopsis thaliana landsberg
tctgctgcatttgctacatattgcataccatgttgaacttacctaacgtagccttccccaactgtcctgatattagctcactgtttcgaaaataaacccatccatcatttatgcacattgtttcatcgaaaccatgctctcccttcttgaagttcttctctttcacattaagagttacgtagactctaatacttgcatttggacgcagcaaaacactaaagatctgtttaccagtccaaagctctattggctgcatcaaaaatatagaatctggataagaaattcaatagaaaggaaagaaagtgctaaaaatggcagaagaattcccagtgtccccaacttatttgcccacgcagattaaaatatcaataactaacagaatttgaagtttgaactcattgactaaagaaaataatgtacaatgtcatacaacccaactattatcgctcaatttcagaatcaatgacgccagattaccagaagaaatagggcagcaaaaagctaatgagaaattaacacacgcacagaaaaatatatataagatagttgacaccaacagaacaagctgttgctatttaacactctgaagtcagttgtgatgaactacagaggtaaaaatctcataccttaaggattgtgggtgttggcaaatctatggaatccatcccatctcccatgtaagaacatataagtgaaaaggctgcacggtcataaaatgtgtcctttctcgttatcaaaaaagaagatgtcaaaaagtcctgcgttgatgctactaaaatttctccattttttggggtgcataaattgttttgtacctgagataccaaccaagggagaagtcaattatcacccagagggaaaaattaacacccaaataattagtattaacagttaaacagaccaagaaccaacagcttatattacaaacacagcttaaatgaaacaattt

SEQ ID NO: 60838 - DNA, 302 bp, Arabidopsis thaliana landsberg
cgcaagcttggggtccgttgatattcttcatttcgatgcgaatataaatgagatgaccatcaaagagataacatgtcgatgagacgacatactattagatgtttccgagccatgtgaatgagcacatgagcacacggactttaatgactgaatacaccaagatgtcatcggaggaactttccgggggtcagacattgagaaagggtactatttagtatactgatcctgacgcgacagatttatgcagtgacgaataccaataagaattcttgtttcctcgactgaacatgctatgattcttg

SEQ ID NO: 60839 - DNA, 1497 bp, Arabidopsis thaliana landsberg
atctctttctttgcatgtaaatttcattaaataacaacacgataattctgtttatattacatatacattcgaatcaaatactaaattcttatctgtgagaataaagaatctatgtttccatattattcattgtccattaatttcgttttttgcttaggatagtattagtacaataattgttctgaataatgtatatttttatttttaaaaaaggataatataaaaattagatagattgtgtcaaatatttttttatccaaaattcttaggatcggacctaaccggatgaaatttgattaaatcaaaacacgaatagaagccgagtcaaatcaaaccattctcacaccccaaacaccgtgaaggcgtgaaccaacctaaagtttgattaactccgacccaaatccgaaaacactctgagagcaagccctcctaaccgtctctagcttcgcccctttgtgtaactcggtttaaattcaccaagccgatcgtaaacaaaccttgttaaccgaaaccaatcatagaaagagtatctaaaatatgccatgcatgcatattagctttattaccttttttattttattattttggttataatctttcgaccggagaattctaaggcaaagaaactatccacttcccttataactttatttaaattctgtttttgaggatatatatatgagatatatgcatatataaagtcaacttttctttaagaaaagaatgtcgggtcgtgaagatgaagaagaagatcttggaactgccatgcaaaaaattcccatccctgtcaacgtattcgataaagaacccatggatttggatacggttttcggttttgctgatggagtaagagagatcatagaagattccaatttactagtgagtttctttcaactctccaaaacatgttttggttttgaataaaaataaaactcatcagtgttctttttaccatgtagcttgaggattctcgagagtttgatacaaacgattcaaaaccgtctcgaaatttctcaaatctgccaaccgcgacaagaggtcgtcttcatgcaccaaaacgatctagaaacaagcgaggaagacaaaaaagactgtctttcaagagtccatcagatctctttgattttaaatttggcattaccgacaagagttgttcacattgcgggacgagaaagactccgttatggagagtaggaccgagaggagcgggaacgctatgtaacgcgtgcgggatgcgatacaggacaggtcggctacttcccgagtaccgccctgcttcaagtccggatttcaaacctaacgttcactccaactttcatcgaaaggttatggaaatcagaagggagaggaagtcatctcctccgaatagcgcctctgaatagcttcggtttctcggagtcgtatgataaaacatgatattttatgtaaatttttttgttttttttttgcgatacatctaaatttattatatattgcaaattatgagaactgttatat

SEQ ID NO: 60840 - DNA, 467 bp, Arabidopsis thaliana landsberg
  unsure (1)..(467): unsure at all n locations
nnnnnnnnnnnnnnnnnnnnnnnnnnnnnnnnnnnnnnnnnnnnnnnnnnnnnnnnnnnnnnnnnnnnnnnnnnnnnnnnnnnnnnnnnnnnnnnnnnnnnnnnnnnnnnnnnnnnnnnnnnnnnnnnnnnnnnnnnnnnnnnnnnnnnnnnnnnnnnnnnnnnnnnnnnnnnnnnnnnnnnnnnnnnnnnnnnnnnnnnnnnnnnnnnnnnnnnnnnnnnnnnnnnnnnnnnnnnnnnnnnnnnnnnnnnnnnnnnnnnnnnnnnnnnnnnnnnnnnnnnnnnnnnnnnnnnnnnnnnnnnnnnnnnnnnnnnnnnnnnnnnnnnnnnnnnnnnnnnnnnnnnnnngtcccgcccaaggaccaaggatttttggaaaccttttgtggtaaaaccccaaaatttttcctttttaaaaggggggggggggggggggggtttttttttatcaaaaaaaaaaaagggggg

SEQ ID NO: 60841 - DNA, 241 bp, Arabidopsis thaliana landsberg
gaattcccaaagtgatacattctctaatagccgcatattctttttgctgatcgaggatgattacaatatcaggcagtcccgtcatatatttaatcccgcctagatatgtttccaagcgagataattgtctttccaacacatctgcatacctattcggaagaccgatgaatcgctctgtcttttgttcagctcataagatcctaaacttatgaagacttttttacggtagaggaccaaattt

SEQ ID NO: 60842 - DNA, 1108 bp, Arabidopsis thaliana landsberg
agggaaacttcttataaactccaatatagcactccacatcatctttataatccctcgcaacaagaaaaagttttcgtcggattgctctctcattacctataagtcacaaaaaatattggtcgtcagtttatattttcaagtgtgaatatatagatagatagatagatgtaaacctttgcttgatagttctggtcgtagtagatgcaagtgccaaagtgtttgaacatcaaatccttatcatcgtacggcaatcttggaacaatgtcgttattataaacaaatctataatactttatattatatttttctaatttcttctccataaattcaccaaacttggaatctccaaccctaggctgtccataagtatacaccccttgaatcctctccaacaactcggtctcgtggtgaatcacaagcacagccgtgaacaatatcgcgagggctcctcctaagctatgaccggtcagaacaaacttggtgtttttgttttgagcgatcagagttttcaaagagtctcttattgagtagtaagctaaaggggattttcgatcagggtttgagagaggttctttaggccaactacaattgttttgaagccctagagctttcatgaaaccaccatggatattcccaatgtttgggagctcaaaccatgtaatgtcgaaatctgaacaccaatcttcggaattaaacagttctgtgcctctaaatgcaaccaccaccgtcgtttcttgaccgttggatcttgttgttgtttcgtcagtagacattataaaggcttgtgttgtttccttttcttggtactctgttttcaaccacaaaaaaaactttataaaaatatgattaaattgtaaataagattaaattactaagatttgttttattatataatcataccgttccaatagtcaacgagacctaaatacttcatattccagtgattctcgacgacatgtttaatacgggctgcgttttcgtaggcaatttttgaagccataatggacaatgcagcatagtatttctctccatcttcacaattcaacgtcatgtgtaaacttaccctcgtgtctaaatgtacgataaatgactgataattctccgatgt

SEQ ID NO: 60843 - DNA, 628 bp, Arabidopsis thaliana landsberg
tacgatgaccaacagcttttttttcttctatttcttatataaaaaagaaattaatactgtctagcagcatgtgcttatgctttccattatagtttactaggcacgatttctgcaataatttagactaataaagcatatattatacaccaaagtatcatcctagttcttccattaaactatagcattgtccttgaaaaaataataaaaatacattattagttttttttcttttgaaaagttgtagaaccaatttctttaatttaattcataatttaatccgtagaacatatattcattttactattcttaaattttgatttttgtatcggtataaaaaattaaaataatttgttgcacactaactacatatccattttatgagaataaacttagtaataaattatgttgataactttgttgcattcattaaaagccctaactacatatatatcaatttcgtttactttactcaaattatactattacttacataaaattttgtaactacatttcgattctaaattttcgctttaaatgataatcaaatttatttaactaaaagacgatttagattaataattaacagaaataatagattattgattaaaaaaaatgaacaaaaaaaaac

SEQ ID NO: 60844 - DNA, 878 bp, Arabidopsis thaliana landsberg
aaccaccttttatggaattttgtaattttaagaccaaacaagtgaagtttttttttttttgtcgataagaacaaaagtcacattctataaatatacgacaagagacgacctttgagactcgagaagctctctccaaaaacaaacgaaaagaagcgacttttgcctgttttggtctctccccttctccggagagatctgctctctctatctatctctcaatctgtaagaagaagattcccacttcagtaaaagccctaactttacttgggaaagttcttcatctatcatccttcaatcgtcatcatccatggctgatcaacaaaccctagattcctctactcctcctcctactcaatccgatgatctatctcactcccactctacttcctctactacttcagcttcttcttcctcagatccatcactcttgaggtctctctccttaagtcgactcaacgccggagctcctgagttcgttcctggtcgaactactcctccgctgcctcaacctccgaggatgattatcccgcctcctccgccgcacggtatgcttcatatgtatcaccaccagcctcctttcaatactccagttcttggtcctgttccaatccagccacacttggttcctgttcaaaatcaccaccctcatcatcgctttcatcagcatcatcatcacaatcgtcatcagaatcagcaatatgtcccggtgaggaatcacggagagtatcagcagcgtggtggtgtcggtggtgagcaggaaccggatttggtttcaaagaagaatgatcggagagatcatagtaagagagaatctaagaacgatcaagtgactgaaactggagcttctgtttctattgattcaaaaactggttggctga

SEQ ID NO: 60845 - DNA, 577 bp, Arabidopsis thaliana landsberg
tgtaaaagaatagtacctggattatacagaaggatatgcaattcttatagcaataatagtctacctgttttacacaaaaggatgcagcgctagtttgcatagactacagagtagtagagtacccaacagttcttgttttttttttcgtgcatcggaatttttacgaatggctggtttcctgcgagttgttcacttcagatattccgattgtggccatcaattcagtttggccagcctttgttggggattaacgaaaccaggattttgtccgagcaccagggtcgtgccctagcaatttcacatcatacaacacaaatagtccaacatgtacacaaatagtgctgagattctcgactccaatataaagtggtctatatatatatatatatatatatatagtgttttgaagcctgggatatttttaactacaggaagcctcgaccacccgctcggttgaccaggcgactatctggtccaccactataatgtttcgcttagttataacaagtttcgctcatgtacattgtataaaccaacgctctactagccttcgcgcgatggtgagctagggtttagt

SEQ ID NO: 60846 - DNA, 425 bp, Arabidopsis thaliana landsberg
  unsure (1)..(425): unsure at all n locations
gaagaaaataaaactagctgatgttgttgaagattacatactatatgtgtattaagtttttgattagataaacccagatattatttaaaaaattttaaactcaaatttctccttgttattattttaaaaacatcatttactcttatttacatgcagatggaagaattctagtcaagcttaactgtcacaaaaaacctagccgagttctaatataagggtgatcaatacaagggtcaagatttattgtgcgaggggaaatatcgtatatggtgatctaaggacaatctccaatccccatgatgattatgggacatgctcatttttttctatttggtattgtacaactaattaccgttacagtgatgattatggaggcggtgtgaaagatgattcatttcaccattatagaagncttaggtattata

SEQ ID NO: 60847 - DNA, 414 bp, Arabidopsis thaliana landsberg
tcggccgtctggagtacagcgtttgaagcagagacgaggatctctcggtgtgcgaatttgacgaagacattctcatgatttgagctcgtcgcggccgtggttgagcactgttatcacagattcgaaccggtagggttgatttgcggtgtcgttgggtgggatcttagatcctttagtgtgagtgtatgaaacgaatacgccgttgcatagatccgaatctgacggtggtgacggtgacggattagtagtgatggcgtcggattgtgatgaccctagaggaactggcttcaacatgaagagagagtccaggcctcacacagacaggtgtcattaagcatgaatccatggtagcatattatgttgctcttagtcaaacaaagaggttctttgaatttgaattttgtttgggaattg

SEQ ID NO: 60848 - DNA, 113 bp, Arabidopsis thaliana landsberg
cctagtggccgcgacccggggatcgtatgcagaacctagtgtgcgcgccttgctgggcgttttgtatgcgcacaatctgtgtgagaccgactggggagactccacatgccagt

SEQ ID NO: 60849 - DNA, 1658 bp, Arabidopsis thaliana landsberg
  unsure (1)..(1658): unsure at all n locations
ggttaatgcatttggactgtttaataaaagaaaaagagcatcataatctgaatatgtaacaaattaaactagaagtttaaaggaaaaaagataacaagtgaagtggatttagagttagtgcgaagaagggtggggaatcgggtggacagagaacttcatgttgtggttgcagtcgttgtggnnnnnnnnnnnnnnnnnnnnnnnnnnnnnnntacggagaagcaacttgaagcctcttgatgatgaacctcctcgtgcaaccagcttcttgcctctggccacattgcatctcttgaagctcttcatgtctgggagcaagtagacgtcgttcttcttcttgtcatggtggtgcttcgtcttggattgtgtttggtcattgttgttgtacgtgaaaacaagaacatcgttgacgtagaatggggcatgctttgcagtccattctgtgtaaccgtatccgtttttccatacagtaaccgcaatctttcttcccagcgatggagccgtgtgattgtgtgtagaaccaatgatgcttgagtggtttgagcccgagctgtgaccgttgtgggtaggaccagcaatgcttgagtggtttgagccagagccgtgattcttgtgtgtagaaccaactatgcttgagtggtttgagccagagctgtgattgttatgtgtagagccagtgctgcttgagtggttcgagccagagctgtgaccgttgtgtgtagaaccagtgccgcttgaatggttcgagccagagctgtgaccgttgtgtgtagagccagtgccgcttgaatggtttgagccagagctgcttccccaacccagtttgtatctgttccgtccgagctccatccccaaccccagcttgaaccacccgagttggagtctgaaccaccagaacccgagccaaaagaaccgccagagctccatccccaatccccgtttgaaccagactggccggaaccccaactccagctccacgcgtcagcactcccagagaagaggaacacagtaaccatgaggaatacaagtagcttgcgtgccgctgagagacccatcacttcttcttctttgatatatatattgatactttctcttctttatcttctcttcttttggtttttgttattgtgagctctttagagtttaaggttctctatatatagagactagggtggattagagagtcggttcccaatttggattggagatctgaattttcatcatgtcgtctcaaatcaatagtgaaaaggatttccctttttaatttcgtttttaacaaaattaagagtggtaatgtgtaatgtgttccacttcaattttcttttgatattttaagaaccttttggttatatgacttatgaaagatttcttatgtttaagtttgcttgataaaagaaaaacactacttggttgcataaaacttcttaaacactagtatttgataaaagcattacttcatgcattagagagatttcaagtcctaagacaaaaaaaaaaagaaaagagaggaatattttaactgcaatgggaaagcaaatgagcacataaccgacataagatatcctccaaaggcttataaactacttggttgcataaaaacttcttaaaccctaaatttacttaatatgtatctgatctttcatggcctttagtagctc

SEQ ID NO: 60850 - DNA, 1235 bp, Arabidopsis thaliana landsberg
  unsure (1)..(1235): unsure at all n locations
tcttgcaacttcctctgttctgtttcataacatcttcttctgatctttgcaatggcagtgtctgggttcgagggtttcgagaaaagactcgaacttcggttcttcgacgatgacaaaccaatcaccaaaaaccctatgggactccgtctaatagacttcgaatctttagaccaagtcttaaacgaagtgcagtgcacagtggtctccgccgtagcgaatcgtagcttcgacgcttacgttctctcagagtcaagcctctttgtatacccaaccaaaatcatcatcaaaacatgtggaaccacgcaactcctcaaatcaatccgaccgttgatccatctcgcacgtaacctcggcctcacgttacgcgcgtgtcgctactcgcgtggcagcttcatcttccctaaagctcagcctttcccttacacaagcttcaaagacgaagtcatcgtcgtcgaagaaagcctcccaaaatctctctgttaccgcaaagcctctgttatgacgccttctaataacccatcacgtgcttggcacgtgttcaccgcaagcgctgacgtggaatccgacgaacatgtcgtcgtagtcgaagtatgtatgacggagctggaccgagtcaacgctcgaagcttctttaaacggaaaggtgacgagaaaaacaacagcgattccgccgggaaagagatgacgcggctcagtggtatcgataacataaacgcaaacgcttatatatgcgatttcgcgtttgatccttgcggttactcgatgaacggcgtcgacggtgaccgttactcaactatccacgtaacgcctgaagacggttttagctacgcgagcttcgagtgtggtttgtctctctacgacaacggtcacgaagatatctctgaggtgttaagccgggccattgatgttttccggccaagtgacgtctcgatcgccaccacttacggcggcgaagattacaaccacgaggtgactaagcgcgtggagcgtgtgttagctaagaagcttgatcttaagtgtcggagccgtcttatgnnnnnnnnnnnnnnnnnnnaaccgtcgtttatcagtccttcacgcctcgtcggaaataggcttcgcggnaggagtataaaaggagaaaatgttttaattaggtttcaattagcttaaaggagaaaaaagaaacaggtaatgacgtggagggaaatgattggttgacttgggtttaaggaggatattaagtgggacatatg

SEQ ID NO: 60851 - DNA, 1174 bp, Arabidopsis thaliana landsberg
tgtttgagaatagtgatataaacgccacttgatcttgcccgcttgtatccacaacatgtactacctacatgtgtacaaccatatatcgaaacgctgagtcccataatgtttgaataacttaaaagtagcaacccaacagaaataaaataaaataaatccactggaacgagaatcaaaggggcatacatttactgctcttgcagtatcctcagtaaatgcaggaagaacaccagaagatacaagagcaagagagagggcagtgataatgcataatgctgtgacaatcgacttttttgcacctggagaccacaagtttggcaggaattattatgcttaatcaacctaaagtttgtaattattgtgataggttccataacaaagttttggagtagagcattaccggagagatgaatataggccagcaggtataccatggacagacttatgaaagtagcaatagcaacagcgatcaatgcactgcctagccattctggagttactcctgggttactacacacaaaaataccaaaaacaacagctacaatataaggtttgttgaatgctaaataagaaagagattcacagaactattaattcccatagcagcaaccgcattctgactttttttctttagtcgccatgtttacttggacagctgcgagctaaaaactaattaccgctccatggatttatttcaaccctgctccaacatagtatgcacattttatttcactttctaagtttaggcaagaatttagcctgtttatgataggaacagaaagcagaactgtctttatttttcaaaggaagaacatggagaaccaatttaggtgaattgatcagttattgtttgttttagagttcctaatatctcccaaattcctaaggctcccaagtcccaatgatcaaaaagactcctacctatttatattattatttattgtttatccatatgtatcaagcatctcacaatatagtgcctatcagtttacctgtcaaatcgaatgagcatgccgatcattgtgcctgtcaactggataaaactgccagatgaaaccaaaattggtacagccaggctgataagcagagttgcaagtttgaggggctttggcagtcggattggagataaagttgccttgagcaatccatttggacaaccattaagtttgattaa

SEQ ID NO: 60852 - DNA, 629 bp, Arabidopsis thaliana landsberg
tcgccaatatgatgcatgcaggtatgtgttcatttaacgattgttttttgaatcataccgttcaatcattaccatttgggggtgtgaaacgatctggttttggtgcctctaatggtaaagaaggtttacgtggattttcattagcacgtgctgtagtatgtgatcgtttcccaatgcgtatatgggcaccatcatttttattataccctgttcatccacgaactgatcgtattgtacaagctgcattacatatggtctatggtccatcatggttgggtagtgctaaagctttaattaaaatgatgaaacttgtattagctcctcgtcctaaacctgttgatggacctgcacctaaatcatcagaaactaagaaggctgaataagccaccaccgcccttaatgattaattgattgatttgtgattggtttgttgtgttttttttttatcgaaataacattgtttggtacctttcgcgctcggagccccttttatcagagagacttaatttactacggtagtgatacattgagaggagacatcatgacaaaagatcggacaacaataatcagaaggaacgaacaatcaataatcaacaatagaagacatacaaatttgaagggaggatgag

SEQ ID NO: 60853 - DNA, 485 bp, Arabidopsis thaliana landsberg
ggcaagtccgttttttctattatgctggccaaagaattggcataaagagtggatttggaatggattttgcaggtaggagggaggttgcagataaattgcagaaagaaagagaaaggaagagatcagagtcattatccttacaaagtcattgaaatcactcctcctcctaaatctctcggcattcgttgccttcctcatgtgagtctcaaatctttctcaatgctcaactacacttcataaggatttcaatacagattccaggtgagagtgagacgcttttttgatttgcacaaccttcagtgtggagagaacgtgatgatcgaagggcaaacgtacacaatctccggggtacctaatcggtataagttccggaagggcaaatacgagccgagtgagaggcggctcgatgttctctctgccgctagatacgttttaaacctttacttcgacaatttgttccaaaactcttgaacttttttagtttt

SEQ ID NO: 60854 - DNA, 959 bp, Arabidopsis thaliana landsberg
atgatccctcagcttgcaagctatggtcattgagccacgagataatatcggacaagacacggagaatcatgttttctgtttcgccttcgagcagagaatgataagcattttcatacaaaactatcttcttgtctggacttttggctttctcgtacaactctctgctcactgaaggatctgtcactgtatcagcttctccatgtagaatcaatatcggcaaagatacctgcaaagatgaaaccaaagaatgttattattctgattctgctttgattcttccaagttttctcatacgttttacctcctgcaattgtttttcaatgtcctgagttgttcgaagcatttctactgcagtccgtagccgtggtttgccgctgtaacaaatcatgttgtatggtgtctgcatatattaaacaggtggcttaagtaaggaaatcgtaagaagaaaaggcgatacgttcctcaaaatctgctttgtttgtttttaccatatccctcttcctgatatctctaaaccctgcttctgctaaatccttttgtggaaccaacttgtgttttggtagaacattagctagaccgatcaaaatctgtttcaatacaggtggtggaaccaaatcatctgcaatctagaacgaatagatatctcatgttaatgttatgattagtaatcccagagattaataacaaggaaaaacaagtctttactttgcacattggtgctaacaagactgcgccggcccacgcatttggttgtttgagatgtattttgagtgacacagctccacccattgactgtccaaagagaaagctcggtagagaactaaactcaggattcgctgcaaccaaagtgattcagaatctatcggtacctaaaacatgaaccttaagttaccctttcgtgtcactcgatgtgatttaaagcttttaccctttaatgtggagtaatgctcaataacatc

SEQ ID NO: 60855 - DNA, 1948 bp, Arabidopsis thaliana landsberg
tcttctttcttgtcatcatctcatagaatttgaatgaaacaaacaaaaaccaatcacttgaggaagcaagagaggatcgtgtagtggtgcaaataattccatctttgagcaactactttcataaactaaaccaaacaaaaatacattaagcttaacgtttaatccattagttttatattttctgagtctacagtgccgttggtttgtttattcattcatatctctctcatgtaaatttggcgctcacaaactggaaaatcaaaatccctatcagaacaacaccaagctggattccgatttggagcatcacgttcttcagaaacggccaggctttctccgaccatttcctcttcctttccgtgctcactgtcgtagctccttcttccagtgtttcatcatcatcattatcctttgtctcatctacttcttctatagttttagactcctctcttatttctgaaccaacttcggttatctcccccggtctcttgtcgaataatcctttgaactgttttctagccttgctctccgcttcctgtgagctcaaaagaaaacaactcagagatcttatattaagtaacaaaattggcaaaacaagcccaaaccataagtagccttaatgaactcgattcgggtggacatttggttgagatagttttcaaacactgacctgttccttctgcttcagtttcaatagagcagcggtcgcatcagcttctgatgatttatccactttgatcatctaaaacacagacacataagtcagtgagtaagcagatttctgaatctattcactagataatgatatgcaggtttagcataatataccatattgaagtcatttctagcgtcatcatactctccacctgcaatgtaagccattccgcggcggtatagacctttcacatgaccaggctttgcttctaggacctatttggaaattggtgcacaaaaggtctcagaaatcccaacctcttattccagaatcaagccttcttaagagaattgtttattgaatgctaccttattgcatgtctctatagacttcctccactctcccattttaagcaagcaagccgcaacattcagatgtaacatattcttcaaatatcagcagagcaaggatacgagagctagttagtacttaatacttctaatattatcaaatctagacgtatctgcaactacaaacgtaatgagaagatggaactcacccttgtgtcaccaaatatttttccttcatcttcatcttgtggggttaacatgattaaattcccggagcacctggttttggattcaccgctcagacacaatgaaacaaatgctaatactggaattggttatcacatgacttctattaccttttcgtactttgcttttgcgagctcaaattttccttctttgaaaagcctattaccctgaagttcatagtataaccaaaaggagagaagaaccataaattaatagatatggtgtgacctgattgcagaaaagattagctaatagcaaattctgaagtgataaaatttaggactataggtcaaattataaatggtagcagaatattttatccataccgtgcttctgattttatatgcctcgtccatgatgctctgaaagttcaagccagtccagtcctgagacagaatctctagacttataagaaacggaagcttgtttacaatttccatggtaagtatcaacactagaccaacttactcttggcgtttcgaaaccaaggagttcaatctcccactgaacatgtgcaccttcagacacgccaggtggtctatcagaaaagaaaacatgaaatgcgtttatttctccgacaacagtttatacactatcgtgttagtgttatttacacagttaacagtataacctcggaaatttgtcaaatgcaaaatcaggggggcatgtaacaagagcaatctccccagggagcatc

SEQ ID NO: 60856 - DNA, 113 bp, Arabidopsis thaliana landsberg
ccacaaacccttgcttgggctgagagatgtatccaacggaggtgaccttctggatggatgcacggaacggatttgtccttttgggatgctgccaggaagcatggtgatgcttc

SEQ ID NO: 60857 - DNA, 1039 bp, Arabidopsis thaliana landsberg
ggatctcactgacatgatttgcccagcctgtcaggtttgcctatggtcaaatatcattttctcgattttgccccaaacggtcaaggcatatatccccaatcttcaaagggtatttatgtacttttcgctattaaccgtgtggctatatgaagccgattcctcataacaactacaaaaaaggaaagcttcttcccgccggcaaattcttacgtttctccggcggttagaaaaatgacaccacagatcaaaactcatctcttgccgaagcaagaaccttcttcgtctgagaaccatggatcatcaacctccggcatcgttttcaacgtgtcgacgagtataatcggagccggaataatgtcgatgccggcggcgtttaaagttcttggaatagttccagcgtttttgattatcacgatcatagcttggctttccacaatttccgttggatttctgatgaaatcaactctcgccggagaatcaactacttacgccggagttatgaaagagtcgtttggtaaaacaggatccatcgctgtacagattgctacgatggttgctacttttggttgtatgattatattttcgattattataggtaaagtaatttgatctaatcatctaagtgtagaggtctcagctactatttgagcttaagaacagattggctgagtttggatttgtatgtgtttactctctcaggagatgtgctttctggtaatgaaaatggtggtcctgaacatattggagttttgcaagaatggtttggttcttactggtggaacacgagaatcttcgctttgttatttgtctacggctttgtcttgcttccattggtcctgcgtagacgagtcggtaagtttctctctataatcttgtgttctcaaaattatggatatctatgagattgttgatgattttctttttgttaatggttatgtagaaagactggcaattagttccgctgtatcgattcttcttgcggttctatttggtgtcataagctcggtgctggcgattttcgcgctggtgaatgggcaaa

SEQ ID NO: 60858 - DNA, 360 bp, Arabidopsis thaliana landsberg
catcaacttgcgtgttgtaacggcccagattagagagttagatttttctttctctgccactcgtcaaattcgggcgctactttgcctatttttcttttctccccgctatgccctgatctctttcaaagtcctagcaagaattagctcgacatctcgtgtaagtaaaaccctagagttaaatcttttggttgttacaccatgccggtccatgcatctattttgttcgttgagtgaatttgtgaaagcatgcatttgaaaatagattaaaatgggaaagaaacatttttgttctttggtgttcctttcccccctctccttgcggcccagtcaggcgcgcagcccattctccctgctcctttt

SEQ ID NO: 60859 - DNA, 385 bp, Arabidopsis thaliana landsberg
tctgataagccctttaccggtattgagattgtttatgtgtgtgtgtagctgccacaaacagaggaataaagctcggtggtttgttgatatttgcagttaaaaaaactgctagtacatgcagctacatgccgctctacacagtgccaatatcaaggttgtcgtaagagtaagatgctcttcagacattgtatagactgtacgactggagattgccccatttgtaagggattgtggagtcttctcaaactccatgcccgcaactgtagagattccaagtgcactgtccccaaatgcaggtacatagagtttttttcacatgcttttacacttgattaaacaactttgtcatatatggatagatagctaactctttggtgttgcttct

SEQ ID NO: 60860 - DNA, 623 bp, Arabidopsis thaliana landsberg
  unsure (1)..(623): unsure at all n locations
ccctaaaaccccattacaccgagagcaacaacttttcttcctcggcttaaccttttgaaaccctagaacagtagacccacaaacttttcttgcaaaacgtatgcaagatttggccttataattgggattaaaagttgaaccaaaagaagaaagaggcaaaagggtatcggaatcaatcatcgaatagcgagaaacaagagatgaaatggggcctgagttgatagagaccatggttggagcatttcgtcgaacactttgtgtgcgctcctattcacgcggccttcatcaagaagaagaagaggtaataccaagcaacgaacaaaaaccctttgggaaaaagtgatccactagctagtacgtgatttgattaagccagccagtaatctaaagaagccatgtgaccgcacaaaaaccaaagctttatgtttcaatccgattccgaaaatgaaagaagtatgctttattcggacgttaatcgaattcttaagatcatcattgttgctgttaagtttctttttagattctcatttttatgtttctctagcctttttatcaatttgacttgttaacatcattatttttactcgcggtaaaatgggagcaanaatcgtgttttatattat

SEQ ID NO: 60861 - DNA, 568 bp, Arabidopsis thaliana landsberg
tattgcctagtcttattcatctgggtttaaaccgagaaggtggtgggtgctgcattttgagttctagctttcatagttgcagcagaacattttaaacctttattttctatacatactattgctaggtagaccatacaaccaaggtttctaggtttatcaccctctgccagtgacccttctttggaaatttggactttcattatactaaaagtttttttttggttattgtatatgaaccttaagagcatatgttttatgtttacctgtttaggccttgatgctattttccataaacagaaacccatcatgctcttaattaggtaggtttggtctgatggagacttgagaactgccattaggtggatgaacatgattataatatgactaggacgcctaactggactacataattcagtatctatttttttcggtgaccaatagtcaacctgatgaattatctcacttattagagtaggcgattgtaattcatagagttccacaaatattttggcttccaacttagttaactgtcagttgggggtaatctgatcattcttggtctgctatg

SEQ ID NO: 60862 - DNA, 425 bp, Arabidopsis thaliana landsberg
taacgagttaacggcgatggttttcgctaaggtactgtctccgtttcctttgttttttcgttttggttctttggagttaagaactatagaaattgaagcaatagtgtagtgtgtgtgtgtgagctttgtgcctttgtctaatcctaagactgatcaatgatatatgtccgttcaattatttttctagtaatgagatgatttcaagactcaagatacattgaagatggagaagtagcagcatacaccaagaataattggacatggcccaattgaacaagatcattcccatcctttaccatgtcttgcgatcctagcttgtgtttatgctgagtatagatttgtgatcttcattcaacactagaactttgtcttcattacatgttgacttgactaatatactacacaatcgtttagatgcatgaatg

SEQ ID NO: 60863 - DNA, 531 bp, Arabidopsis thaliana landsberg
cttcgattttttcagatccgctttgaaccaaaaaagaaatagaatctcttacacaataatacagcacgtttctaatagtattaaaaacattaaagaatatctatgagtttttaaagtcaacaatatatttagtagagaaaacaatgcacatttgttttgtgtttttttttgtaagacaatgcacattaaagcaattatgcatctgcttaaataataagaagttttagttttctatattttttagtttgggtttcgatcagaaatctacgctgggtgtgtcaaaaaaaaaaaaaaaggattatgcatactcatcaaaagatgatctaaattgtttcataattcattccatagtttggacagttatgatacgtctaatctatagcagatataaaataaatatacgagatgaatatgtacaaattaataatcaaaatgcaattctgttgaactaataacgaacagtttgatgtgatccttaaaagaaaagttttagacagagagaattaatatttagagagctgatttcaaaga

SEQ ID NO: 60864 - DNA, 1027 bp, Arabidopsis thaliana landsberg
tgcttaatactcaccaatggaaaactaatcgagaatgtttgaaaacattccataagataaataaatcgaatcaagctacctgtacaagttgatcttcgtttaatgcagataagctcactaagatgggtaaccttccaacaaactcaggaatgagaccatacgcaacaagatcttcactttgtaactacaaccatgaaccatttaccaataattataagtgcttcttttattagacaatgaacaagttgcatcaattgagagtaaaatatacacgaaagactagcatacaatttagtgagctatatgagaacaaattccttacagattccaacaaggaggatgttacagcagcactacttaacccagaagtactcatgtttgtacgaacggaagcaccaaaaccaatagaggcatcatgctgcctggtcaagagaaatataatcatgccattcaagccctatcgaacacagagaaaaggataggatggaagatttttgctgaatctacaagacttgagaaacttacctttcagaaacagttttctccagatcgataaatgcaccaccacaaataaaaaggatgtcttttgtatccatctgcaatttttattttccaccaagaggttcagctttttcatgaaccgagtattgtggctaactgtgccacaaaagggcattctgacatgcacaaaagaaagcttgaaacaggagatttttcacgcatttacctgaatgctatctcctcgaggatctctccgtaatcctttctcgggaatcgggacactgaccacctgcaaattagtaattaacagaagctggacattgtaatattttggatcacctagaatggcaaatgctatgatgagatttccagactatattgcttcctcataatgtttgctgattagatatattatcaaggcatagaggattccttaatcttttcttgttagccagtctattttggcagttggagttaaaaattaaaaggatttccaaggtagaaaaaaagcctttacaggtttcct

SEQ ID NO: 60865 - DNA, 1805 bp, Arabidopsis thaliana landsberg
aaaaacaaaaaataaatacaagcaagttaagaaaaaaaaagagggtggcgaacttgattatgttctaatgaaaatcaaaatgtacttgccaaaaacaaaaatatacttacgcaaagaaaataatattattgataagggtcacccactcaccacttggcacttgcttgcgcaacaatctcgctatggatgttcgtcgaaaattccggtggttttgtttagcaagtggaagaattcgataacaactttattattattatttctttgtttttttgcttactaacttacatcactataattctgaatacatcatgaaatgaatatgctgatctattggcttacgttagcattgatgagtcaccaagaagaaaagtttatggtggtggtcacttttttgagtgtgacaaattaagaaatagaggtcacccctcttgacttgttgttgtgacttgacagctttgttgtatatggccaagtgaaacagattttcaaattagtcttttggattattgttatttggaatatcattactttgtctttatctacttgtattatttatttatttatttatttcagtctataaatatttatgataatctttattaaaaaatctaagtctaatatttatgaatcagacttaattttttttttatagttttgtacaaaaaaatctccacaaaatactgtctttgagagaaaatgagcatttttttacttgcatatatattctactattcgtttgcttgatttctctttcaacaatttaaattcttcttaaatgattctacaatattaacatttcttttaatattattaattaaaaatgcttatgattcgcattggaatctaggaatttcaaaattctgtgaacactccatcaatgaactctgtgaacactccatcaatgaactgaaaatcacaccttgttaggaagacaatatgccaattaaggtactcgtaatctctgaatttgcattacatgtctgatggagtgtatatactttgaaaatgaagtgaaatagtttcaaaattttcaaattagtttgaaagtatatatcaaataataaagttactctactatttaattttcttatacttactattcgattgtaggaactgtgagatgagaggatttcaaatgacaccgctacaaaagattcaataagcaaactctaaattaattcttcaaaatcatcaaaatctttgtcaggccgacgatatatgctcattccatcgatatatgtcccccatatacgaacgtgtatgttctaagtcgtcaatatgacgctagtatctatacctagacgttgcttatatggtttgagaataatgtcaggtctttttgacctcaaacaatataacatttttttgtccaattgccaaaagataacagcatttccaagctgagtgcaaaaataaatcataaaaataaataacattaataaaatcaatcagttagcaagtaaaaacttatgataataccataaacttcttctctaggccatcactagttattaaatgttcttgcttggctttgagaagtgatgtgatctttttgaaaaaatttatcgtctctttgcgttcctgcaatagttatgagacaaatcttagaaaaaggataaagttagaaaaatgatgcaaacaaaataaggagttagcaaataaaagtttataataatactttaaatttcttctctataccaatcttaattatttttttttttgcgcacctttgaaaagagatctgatatatttaaaagaatgcacattatctcttagcattcatgcaacaacttttttttccccat

SEQ ID NO: 60866 - DNA, 435 bp, Arabidopsis thaliana landsberg
ggatggtcatactctcagcctttccctttttttactggttttgtttttctctgtgtggaaaattgatatgttgtgaatcaggactcgaagccaaacctaaagcaatttgtttcacatcactgcgagtttggctccgctccaagggtttctagaaatgtggttggctccaaccgattattaactgtagttgtcagctggttggctagggctgttataaacgatctgcaaagccgtttgttgctgctaagttagacctgttaatcgtagtctactgaggaacctctggacctgcaacgctatgttgcaacaaacaagaaacttcatatgtaggagaattcctagactatgaggcacatatcttggccttttgttgtcctagactattatgtccttttgattgaagaccgactttcgctcttgtctgtaccttccttt

SEQ ID NO: 60867 - DNA, 1587 bp, Arabidopsis thaliana landsberg
  unsure (1)..(1587): unsure at all n locations
aatgttctcttgttccctggaatcaatcattgttgttacttagcttgccataatcaaaaagattctaaccagaaagcaaacagggttctccttcccccacaaccaccagtcgctttctttctgtattccttctcttccttctactcatcttccctacggatgtatattagcaaggctaacaatctctacttaatcatttccaagccctacaatctttgattaggccctactgtcaaaaacttatagtgacatctagatagccattattgacaagcatatagtggtaatagaaaattatttgtgtttgacatttctgctgtacaagatgatgcaaacgtagactgacttgaacagagaaaacttacttgaacctctcataaagcaacttccaaaaaggtgattttgaacctttgatatttgcagcaatctttaatgcttccgtagaggatgattcggtcttaccaagttgctcagaaacacgtgaaaggtaatagtatgctatatcgaaagctggtgcttgcttaataacttttactaaaataggtaaagcctggaagaaagtaaatccacataaatcaggatcagtccttaaatatacaaaagatatatacatacacactatttaggaaaaagcattatgtcatatacgtaatactcaaacaatattgtggtagagattagagaaggataagtttattttttcaggaaattatgaagtctgttacttagcctcggttttctctctataagcatgataccaacagaaaataaccacttgacctggattacctcaatgtcacggccatgtgcatgaagaaaaagagcctccctaaacctctttagaatgtcaggtgcaacttctttctttgacccaggtcttctaccctttttcttatactgcatcagtatagaacgtataacttaaaaagaagtggtaggatatgcaatagttattgcagtaagagacggattcaagagacaatgtaatacgtgtgacatgaaaatagtagctatcctagaaaaacacacctttctggatttccgtcggcgaccagaagacataaattccatgaatccctccacgcccgaggtgctattcgagatgttactaggattactgtcacatttacaaacaaataaccagctcaaaaggatgtagagtaatgcaagggaagtatttgaccgacaaatccatctaaaagttacttgaatgggatataataagaactgcacagcctaagaatcattgattttcacataatcaaatataaactggctaattcttattgtcactgtattatgaaacattgtacaaaaggatagagagaaactaaccgttgagaatcagcaagtgctttgcgtttcctctcagccagagcttcatactcaggtcgttcaaacgtgtttgggacacttccagcttcaaagtcatcttcttcttctgactcatctccctcatcatcatcatcactatcatcatcatcatcatctaccagaccttcttcatcactgtttaaagtcttatcatcataattagtatcaccaccaagtacttgcttgtcacattccatatngcttggaccttct

SEQ ID NO: 60868 - DNA, 1057 bp, Arabidopsis thaliana landsberg
actgctttaggccttgtttgggcgtttgtaattctaacggtttcctacgacccaaaatcaagatcttacacagatgatctcgggtcgaaactgatcaaaacacaagaattttggtttacgctggtgatcacaatcgctatcttgctcccttggttaaccgtgagacgtgttcctgttgacgtctcatctctctcgggccacgcatcgttgataaaattcagaggaggcctgaaatcagggatcttgggtcggatcagtccatcgccgttatcggaatggcatgcttttggaataatctccgatgggaagacatcgcacatgatgttggctggtgctgtcggcgactttacaaagtctttagtctcaaaacctccaacgcatttatgggtccgtacggttcacttcgctggcttaccctatctcgttaacttgtatgacaaggtaaataaaattctctaaatcttagggttttactagtaacagattttagcagtttgttggatgtttgtcgtttttgacatcatgagtattactaaactatttttttttccactacaggtattacttgtggccacgggttcggggatttgcgtatttttatcgtttcttatgcaaccgagtaaggctgaggtatatttgatatgggtggctaaaggattagatgataatttcgggtcggaggttgtgaacaggattaaagattatcctcatcaagacaggatcatagttcacgatactgcgattctaggacgacctaatgtgtcgaaaatgagtgtggaagcttccaagaagtttggagctcaagtcgtgattgttacaagcaatcctgaaggaagtcgtgatgttggtaatgcttggaaagcttctggtggtcctgcttttggtcctatttgggattcttaaattgcttttttggctgtttgtttaccaatgatgtaaaaattaattttgatatttctcgtaattaatgtaatcttatcaagagttggtatgacttaacaagatatgaccttttcatgcatatgtgattattagttttggtaagcttacccccaaa

SEQ ID NO: 60869 - DNA, 455 bp, Arabidopsis thaliana landsberg
tcaatgaaaccagggttcagttcactatcgttgatgaatcttgaagttcaagacaccacatgtcttcttgtaacccactgaagttattaccggaagaacaatattgttgttgatttggttcttgaatgtgattcagagggtaattgtaaggaatcgaattgttgttgtttagatcacaagaactcgaaaaactcgagagatcctctggttcttgcatgtggatatgcggttcttgatgatgatgttgatgagcacggtcacggaacatagccaattgctgaagaacaatctccaattcgtttcttgtgtattcgatctggtattgaagcttttttatgatgccatagcatccatcaacgggatcattggcacgagcatcggactgaaacatgaattgatgcatagctgcgtcttttttggaggggtaagggatttaatgatcttggtgatgttgc

SEQ ID NO: 60870 - DNA, 638 bp, Arabidopsis thaliana landsberg
gtcacattttttagaaaagcaacgtcattgaaatttatgaagagtagaatagagagatacacattagcataatctttgtaatagtttaagtgacatttacatttgatgtaaaacagatttatttaatatatggaactttgattcagagtttcttttgaaatttgagttatatatatagagagagactattaatcagcatacaaacaatatataatttttaacagaaacaattaaagataaaaactatatacacgtcggtttacaaatgactcaaaagaataagatttacacgacagaacttaaccgatgttaagattactaaaaccgacgcaaacgtttcgacgtataagtaagcgtcatttcctaaagttaagttaattatattaacgtcatgcaatgttacgacggtttttaaaccgacgctattatgttaaagtcagtttgaaaatgacgttaaagtcaataatgaccgacgtcaaataccgtttctcttgtagcgatcattaattggaaagtgttgatcatataacaacatatacttggatattttttttctaaaaagttagtgtcaaaccaacatggatcataatttggaaagtgttgacttaagatgttacctttttttttgtgcaaaagat

SEQ ID NO: 60871 - DNA, 659 bp, Arabidopsis thaliana landsberg
  unsure (1)..(659): unsure at all n locations
aattgttggttctcttgcttttggtggacgcttcattaatattgaatcgtatcctaagcatgaaaacatatccaacacataattccgaggttttccaaagcagacgcttcattacgtttgacttacgtacactaactggtgataaccagcgaagcggtgtggatcctgcttgcataccaaaatcaaaatgtgatgatagagtgatggaaataggtaatactccagattatcacagtagtaagttcattgatttgttggcacatctttaaacttgtaagctttttataattactttattttgtaggtatatggaggagaccgcgtactctttacagacctaaaaagttcgaccacgagattcatgacgaagaagaattatgaagttgttggtgctattttcttaaattttttggcgattggttttggtgttaattatcatcattttaatgtattagtttgtttttatttgcggaatatcatatgattaattagatggcccgaaacgtgtggtacgtaagaagtagaagatatgaaagctaggtggagtcttgtgctattgacaagttctcgacccttgtaagttgtgctcctccttcataattgccgagagactaacacacaaactgctatttgggagatanaaacgaaagaggaaccac

SEQ ID NO: 60872 - DNA, 253 bp, Arabidopsis thaliana landsberg
  unsure (1)..(253): unsure at all n locations
ttttttacatcgnccaccatatcaccttcgctcatgttaaattttaaattacatttccccccactcccattacctttacttcatcactctaccaccaaaccttataccaccatctccattactctactacatactctaattgccaatctcataatcatcttcattcaacacttaactatacactctatcactattaataaaataatactccatcttatcactctaccactcactctaccacttatatctatta

SEQ ID NO: 60873 - DNA, 478 bp, Arabidopsis thaliana landsberg
gccagcctatcttggggtgaaaccgttcgctgatttcgccgatcttgagctggtccagacgcacctggatttatgcacaaagacgccgggcggctggaagcccagagcgccgccgctgttcttggagcccggatcgccggaatattttttcgccagttcggcaaagtccgcgcctttcttgagctgttcgaacaggtcgcggtcgagggcgcgggtctgctcttcgttgcgcagctcgttgggggtcagcaggatgtgccgcgcgtgggtttccgaaacctgttcgcggctgctgccgccacgttcatccagcattttgaggatgggaaagcctgtgcccgccttgatcacgtcgctgacctgacccttgccgagtttggatgcgggattggcaaacagggtgggcagatccgttgcctttctccagactagaacaccaacctgaagagcctgttgggcattggagttggcgatggtc

SEQ ID NO: 60874 - DNA, 1416 bp, Arabidopsis thaliana landsberg
agtaataaattctttccgtttcacaaaaagttgaaaaatattttaaacagccagatccattaggttctatctcacttagaagagtagatgcctagaacgaatgatacaatgagtaccatcaaacgatgaataccataaaagaataaatggagctatataaaatctgatgacagaaaaaacgagtactatcaaaacagagcacaatgaatgctataaaattattgggtacaatctctagcaaatttcaacgtgagacttttctgttatttatttctttatatacatatatattaaacgattcaattataaaccgtaaacaacaattaccaatcaagattcttaattaaaagaaaaaaaaataattttaaattattaatttacaatcacaaccacagagccccaacttccttaagaattggaactaactcaccggagatatgagtagccataaccctatctaaccctccaaacaacctccctcctacataaaccgccggtaacttcaccgtacctccgccgccttgaactccaatattctccaactcactcaaaacttcatcttccctctcctcatcaatctcaaggaccgccggattcactccaagtccaagaagcagcctcctcaccacatgacacatgcaacatcctctccgtccaatcacaatcaccgcgttctcctccaccaccatccgaactctctcgccgtttccctgcgttttaagcgatagcggccgcagagattccccgacggttgtcgtcatgttataatttcttgcacaagaaatcgttccttgcattttcaagtatgtttttaaagatagataccaattaggaaaggaaggttttgttatatatacatgaagaaagagagatcagagaggaaagtctagcgtcaacgatggttacgtaaggatgtgcgtcacaggaagctatgggtgatggtgctgtttacgtcactggattggagtggacttagtcataggaccgtgtcgttatatcgtatcacatgtttcacgctgactttttgtatcccactttattcttttaataaatctgcacgttttaattttggttcctttctacgtacgtgttgttacataatattttactgctttttcatatctttttttttggggtcaaattaacagaatagtttattactataatttttgttgttttcgattgatggtttgtaactttttatacttcgaaatattcgcttatgtgaccacatagtggatgcttctttggatctcgaccatcaaaacggaattaccggactatatataacaatttttgttaatctaatactaaaattgtagaaacaaaattttatttttgaattactaactaaatacatactatagagtaaccagagactagaggagacctaaatctaaacttttctaatatttt

SEQ ID NO: 60875 - DNA, 577 bp, Arabidopsis thaliana landsberg
gttgcctgctgaaattgcacctgcaacgctcaggcgcatgcaagtattggcgggtgctgtctggctgtttgcctttgtttgcctgctgacgcatctgccggtgccgaaatatcgctggcatgacgaactggctatccggcagcagctggagcagctcaacctggtcgatcagcaagcccagcatcactggcagcagattgtgctggaaggcagggcaggaagtgccagttttgatgagttggctgcgcaaatggatgcacaggtggtagcgccttatgcgcaaacttttgaggccctgtctgccttgccggatgaccctcagcttccttctgcaggcttgatggggcaggccagggtgtatgccttgaagcgcagcgaggcgggcaaggcggcggcagaaaagttgcggaatatgccatttatgccacatcagtccccggagtaaatacaggcccggtcatcacgactcgccggaatttcgggtgttcagactcctcgggtcttgttgctggccagacgaatcagtatatcggcctcggcgctaccatcgatttcctgcataagctggtgcgctttc

SEQ ID NO: 60876 - DNA, 465 bp, Arabidopsis thaliana landsberg
tagccggcgctatgatgtactatgcgagaaagtacttaccgggtttaggacggtggcagagtggaacattttacagtagcaaaagcagaagaagagtagtgagttttagtttggcaaaagcttcttcaccatcctctatgcctcctcttgatcagattgctttgcttgagaccattttaagtcttttacctgaaaagagaggaagatctttttgtaagttcttgttaggtctccttcgtgttgctttcattttaggagttgatgggaactgtgtaaagaagttggagaaaagaataggaatgcagttggagctagcaacgctcgataatcttctgattttgaactattctgattcagagacgttgtacaatgtatattgtggagaacgaatagtcccacattttgtatcattattgccaggataatccctacagttacctgagttctctgcaacatctttggatc

SEQ ID NO: 60877 - DNA, 1359 bp, Arabidopsis thaliana landsberg
tcatattcagattttttttattaaccgaatctgagaatttcgagtcaaaaaaaacaaatgcagatagatttcacaaatcaatcaatcaaaaccataaaatctatcgatcctcctcgtctttgatcgccaagaaaatctcagaagaatctccgatgaaaaaatgaaagaaattgagaatccgaaaggatttgtttgaaatggagagtgagctattattaatgtttgtggtgtttaggcttttagtcttcttcttcactgtttgaggttaaaaagtcatagaaacgatttttgggtatctgttacagttacgttggctagtgtatagatgccgacgaccaccatggatcatatttatacatacaatttacctatgtggataaataaacgattaagcattatttagtttctttgtgttacttctttaaaaaagatgataatattacacgtacaattgttcttgtttattcatttgtgtttgttgatatctagaactcaatcttgaataatattatcttatctttatgttttgactaatcattaactttcgtataaagataatatcaataccactagataattatcacaccagcattcttactagcactttatatctactactacttttggataatgcaaatacattttataaaaaaaataaaggctgtgtgatttggttaaccagttactaatcttataaaattatgtagatcctatggtaaattattggaaattttcataaattagacaaatttattaccaaatctcatacaacactatttaaaacattgataaaatataaaaaaaactttgaatattgactattgaccaataaactttattatttgactattaaatttgtgcaataaattaaatttaactttttacccacatcaaaacataacagtaaaagagaatgtggatttagacctttataagtcccatgaaaaaaggcccattttataggtatccaaaacaggcccaattttctggaaaaaaaaacagaagaaacgatgccacgcgtttcacacctgtccctgtctctttctctcgcttttaatttttccttaacgacaaaggaaagaaagcatggagattgaaaacggaagccatttctagcaaaacaattctctcttttgtcttgaagataagtttcacaaaaaggtctgcttcgcctcttctacgacgttgcagaaactaagaagagatgggtcttctctccaacaggtttcgtcttcccctctttgattttctgagaactctttagttattctacttaacgatcatctcaagaaacttttgtatctttttgaacagaatcgatagatcgagtttgaaacctggagatcatatctactcctg

SEQ ID NO: 60878 - DNA, 552 bp, Arabidopsis thaliana landsberg
ctaaaacccttagatttgaaacacttaaatttgttgttgaagtatgtcatcagtccagtccacctgaaaaatatatttgtaagaagttgcctacaataaactaatttataaatgatatcaaaatctcgatttatttaaattcgattttataattgagattattcgatacatagcttcatatagctttttttttttttttttcatacatagcttcatatagcttagtattgttattggatgcgtttggtgattgaactgtacatgaacgaacttattcactttgtgtcccatccaccaaatattccttagacccacttctcctgctcccattccagcagcaaaacttagacaaatataactcattaactataacaatccaactgcataataatttatttcagtcgattaatgttttctgacttattaaagaactttcgagtcaaattactacgctaagattgtaagacaacaaatgcatgtaagtcataaatattttgtagagatacaacttatacaactaacatcttgaaaatttctgtgtcatcaattttt

SEQ ID NO: 60879 - DNA, 371 bp, Arabidopsis thaliana landsberg
  unsure (1)..(371): unsure at all n locations
gtttgttctagagctatccatactctttatcttttctccaatgcacatnacaacaacaacgacaacagttatatttaaaccatgaatccacacaataccccattttaaatgatgataaatttcttaattaaaggttataaaaaataaaaattaaccccatattcatgacaatgccaaagcttattctcctccacatcaaaactctcaaataacctttccaacacaatatacttcatccctgtcacgtttaaacactaaacatcaaaaaaatacatctcttcaaaaaatatacacatgcatacttcaagttcaaaatttacttcttcttgtcaaaaaatgtgtgagaaaatacacatatatatacatatcca

SEQ ID NO: 60880 - DNA, 500 bp, Arabidopsis thaliana landsberg
taagtgagtgctcaattggatactgctatgggaagaagcggaagatgaatcggaacagcaggaagccgctacctagaacggcgcatactcttgaccgctaaccctcaatcaaacgttgatagttgtgctttccctactcgacttttgggtacataacctaatcaatcccttcctttcggtttccctggactatcgatctagagacggcacctttagaccagacctggagacatcacaaaaagagttctgaggatgactggctggatagcgagcacctgaccttgggttgacttgcctagaacctgaccaggcaccggcactgaattctacttgaaataccaggctcttctcttagataggaatcatatacttttaagccataggaatcatatacgaagaacacatatggcctagactcatgagccaataatctaatcaatagttcggtacgcgcgctcaagacgaacatcaccacgctgggccccttccccacttccctc

SEQ ID NO: 60881 - DNA, 306 bp, Arabidopsis thaliana landsberg
ctctgacgatttcatataacaggggtctccctgtagagcatgcgggtatgccattcatccagcacagtccaagtgagagagatcaacgaggcataggcggcatccatcccctccaacttcgacagcttggatccatatgcttgcagtattgaccggcgacacactgctctggacgccaacagcaacagatcccggacgacagctgagcgagcagttcacgtacttgctattgctagctattggcaaactggagcacgacagctagcattatctcaaggcatgccgaccgacagtctactaactggg

SEQ ID NO: 60882 - DNA, 408 bp, Arabidopsis thaliana landsberg
ggatcatggtactccttcttgccgagttgcgtttgcaaatgcagagaaatcatgctttccaacttattgatttgcagcttcccgcattttagaagcattcagtttataagcacagtggtaagccctatgacgctggaacgggtccatgaaagtgtcgttgattatctggtagcgataaaccttgctagaggcagaataccgagcatgtaactctggaaccgatgaactcagctctgtgacacggatatctttaggaagaagaccgttcatagctgcgtgaaagctatccaaactagtatagttgaaaggagtgacaaaatgagctacctgaagaataacggatgatttagtttgtgttgagaagttgagaaagagagagttgtgacttttgtcaaacctgtcccccag

SEQ ID NO: 60883 - DNA, 1181 bp, Arabidopsis thaliana landsberg
cgaaggtggtggtggaacctatatcgtttgatagtggctgtaagttggcaatggtggtggggccgaagaagaagaaggtcatgcaaactgcttgtgaagagtgtaaaactgttttggcctcactggttaaagaaggcaggggtggaggagcctgatgtggagaggcaggaggtagagaagaaggcgtttccttcgggctagaatctggtgatgaacaaattggagctcgactcctcatatccggtgaagaaacagatgctctcaaatatttagtcttagcatcctttggaatcacgccatcaggtgatgtagctcttttaccatccttgagagaagtggtaattgaggcaggagcactgttaattcttgtcgggggataagccacatgcatagaatctttatatgagcccttatttaaggaatccatcgagagactgcgttaggcttagccattcttacattaggaccctgagtttcttgctgcttagacttcggtttaagggaatctccagcagcagccggttttgcatttgctccgacctgtttccttagtgtagcttgtggtttttcagatatgggtttgttgagactagtatttgttttctgactcatagattccaaatcgttactttcttcatcacctttgctttgagtctgtactgtgctagaatcattttcctttgcttccactgttcttctctttcgctgctcatcaccatcatctattcctatatccttcactgagtcgatattagaatctgccttcccatccgatctatactgtacatcatccacagtgatatctttgactggatccgtgctagtctctgcatgcatatcatgtttatggtttgaatcatctgatgcacaatctagaaacgcattgggttccacatcccccttccacacctctttaccctcagaatcatctgaagcagtattaacaaccacaaaactatccgagtctctcttatggtcaggtccatcaatcacatcgctaaagatctcctccacctcaaaaaattcttcaggtgaagtcatatcaaaatcgttctcatcatctgataatgtagacgttgtaataggaggcaccacggcatcagcgccagagaaaagtacctgatacatatatgagtatgcattcaaacttaaaagccttattcagcatatgatcagagaaa

SEQ ID NO: 60884 - DNA, 576 bp, Arabidopsis thaliana landsberg
cgacgcacgtccagggcaattggctgcaacctgccgctgcgcaaccccactccaagcgaggcatgttgctgctgttatctcgcacctgtggtctgtagcatgcaacagtactcctcccccagcgtctgcagcacccgttccagtcgagaggctgtagtacaccagcagccccaccagtctgcattccctgcatgccagcagcagaagcagcttgacaccatgaaatataacatgtgccctatgcaccgtgcggcatcacgaaagcacagcacgtgcggaagcagacgcatcaacaccaccacaaccaatacggcgatcctgatatgccggccgttccgacccccggctgagcatatccgctgcagcacaaggatgtacatcaccgcaggagaaggatgcaacggttctggctgcgttgtaatgttcgacgcgaacctcgagtagcggaaggcactcccaggccgcaccagccgttttaggacatcctggcaggcagccaccgtctgctcccggtatacttcatcctgcacatatatttagcagcgcatattagaggccgctcgaaataccccaaat

SEQ ID NO: 60885 - DNA, 170 bp, Arabidopsis thaliana landsberg
tatatttgtttggggtttttgtgaatattttttatttatttttatttttatatatttttttttttttttttatttgatttatattttttttttttattttattttaaatattttttattttattaatttattttttttattttttattttttatttatatttttttattt

SEQ ID NO: 60886 - DNA, 1348 bp, Arabidopsis thaliana landsberg
tgactgtatctgagagtaacttgcgttaataaaatgaataccatgttttagtggacattgcgtctcgatttgtaatctatatgttagtaaggaaatagcaatgcttaaccgcgttaacactaataactggaacaatattaagacagagccagtcaatttgtgtggccgactactggaccgactactattgcaactttatttttgttttgtatagtatttcgttgcgtgtatctacaatatatatcacccatgacccatgtctatatttattgtatttaaacgaatggttggtccagtgtattaatactgattgattatgacattttaattgaaaatatcccaaatatcaactctactgtagtccgtagagagacctgaatctctaatttactgttttttaaccatgccatcaaccaatccaataagaaaaacaggaacaaaatacaagtgaaaacgaagtagcaattgcataatttgggactccagaagtttttttattaatcctatagaatcaaatttttttcggaatcaaattttaactttaactattgtatcattacgctaactatgagaacatcttatattattatatgatttttcaactgttaaatttaaaagttgatcattttgttagtatatgtttcaaaaaatttaattttcaaaattatgtcgtagtatatgaaaaagcaacgagtgttttatatgataaagtagaaactaatgattttgaactaatttaatgaatctttaaaatctatgccggctcctaagtagccgagctgaaaacccatggcattgtcatgattcacgtcctggaccaaagtctcatgagtaaaccggtgtctaactctaaccattgtaagctattttgcatttaattacaaagtttaaaaaaatcccccgaaattcctgaaataactcaagatatctccaacacttcctctagggttatcctgtcgtcttatttaaaacccggagttggggtgagaagccatctctctccctctctatctctctcttacaaaattccatttcacggggaaaataataatacgacttttgaaatctctcgctaatatttcccaagaaaacctgatgaattaaaagttcatattttcttggtgttggttggtattagatgactatttcttggtattagtcaattctctgtttccatcttatatggatagtctagacacagagcaaagatccttctttggagaaaaagaagatgagagacgagagaggatcgtttcttcacgtattggtcgtagatagatcttaatcgataaccatctaggccttgatctaaccattcaatataaactttatttcctttttcttttcg

SEQ ID NO: 60887 - DNA, 1417 bp, Arabidopsis thaliana landsberg
aacccattgtgttagtcggttccttagaggtaatgtcatctatgtatgccgttattatttcttaatctatagcggaagagagctaaaaatggttctttgattccggacaaaacttcttggctagttttctattgggttggagtattactacctctgcaggcgtcattgcttacccttttgacacacttaggaggagaatgatgcttacatcaggacaacctgttaaataccggaacaccattcatgccttaagagagatattgaagtcggaagggttctatgcgctatatagaggagttactgcgaacatgcttcttggagtagcaggagcaggagtgcttgcgggatatgatcagcttcaccagattgcttataagcattgggttcagtagttttgaaccaaacccgaaacgatgacaatgaaagctgagctcaaaaagagaaggttagtaaacaccaagaagtctcacttgctttccaatgtattgtgttagttaacagaatctcggaatcattaaccgattgaaccagcagaagatagggaaaattgttcatagttcttgtgcagtaacattgttatatcaataatccaggaaaggcctatttgatttttgtgtactggagcaagtttgtttcatgtataaaagatgaaataggtgaaaaaatttaaaagccttatgaatgatacaaacacaaaagaggaaaacttgcgttgttgtcaagcgagaagccagaagtttttgtggcgtttggtggtgattaagtaaccgccgagcttgcggttcttgggtttaaccgcgattgtcatgcaagaggcgttttcgaggcagtatttgagaacaccttcgtgtccacggcgtctcttccacgcccatctcttcaatagcctccagaccggaggtttcttctcttgtccaaccactaaaaggctcacttgttgtttctttgattcttcaactatcttctgccctttgtctttgtctttcccctccaacctccttatctccacttctatctgacattcataaaagaaatccacacgtcgccagaatttgatcagaacagtaatagtgtagctttcattatatgtataaacaatcgaataccaagtgtgactcaccccgggtcgtttcgtttggcacagtttctttaaagtatggaccaattcatcggttttcacctcgcgttttcggttcttccttttacctaaaactcaatccgaaaaacctcattagccaaaccaaacaaaccttaaacaagaaaattgacaaagaggagagaaagagaagaactttttctaaacggttttgcaaagtataacagaaaaagagtgtcttgtggttgtaaagaaagcgtaatagcccattctaaagctccggtagaagcaagcgcttatcaaccaccaccaatactctga

SEQ ID NO: 60888 - DNA, 1600 bp, Arabidopsis thaliana landsberg
aatgtagattttgatttgtgaaataaatggagcaagacaaaactgtacgaaaattgaaaacatgtcatagtctccataaaagggtatctatatatccgtatatatatgaaattgaataataccttggatccgagtcatatcaaattaatatcgtgcatgcatgaataattaaactttagttacattactatgtccgctaaatcaaaatcactgacaaatatcttgtttattttgtacagtgtaataagtttgtccgggttggttaaaatcgaaaattgaattgggattcttaaaatctattttgttttaagatcagtttggtgtttgacaaaaaagaagaagatcagtttggaatgtgtcacataagaacatgtaattaaaagtaattttcatcattatataagcattgcattaagaaaaacatagttttttctaattgctgatgtttcattaatttgggctagaaacaaagcataaaggagaagagacccgttactaaaaagacatggtcaggtaaataatatctgacagccaactcattaacttcaaacctaacgactacctggtttgtcttggctccatcttcttaaattttcgtttattttctaaaacatttgaatggattatcaaaaaagaaaatgtcaagcaatatttatatttatgtacaaatatttcaaaaacttttgaaagggaaagttcaaatgaagggtggctcctcaagatgcaatttgattttgatgagacaaaatgaggcacgtctagtatgacatcaactatttattgccttagatctatcccttgtcttttgttttcttgaaaacaaattcgtttgctccctgtatcaatataaagattaacttacaaaagaggtgatatatatagatatatatatatatacacacattatatcccatcttattaataatgcttactaatattgctaaattcatattctattttgggttggttttataagaaattgaattcttatgccatctcatcaggtgtttatgaaatatgttagggatccagttgaactgaactaacattactaaattgaattaattaaattgtatgtatggctcgggaaagaagaaggaacggattttctttcataattgtggaatcgaattttgttcttctttttgggcttaaatgttggttagattacaccatgacataaacaaaggccaaagtatatgctttaagtgaaaatctgtatttttaaatcgactggcgataacatgtctgaaattggtctatcaatcataaaaagtctctaaatatgtatctttttattttttgaataatgaatgatctataatgtgaatgtacaacacatcattcaattgattgtctcacgattgaggcgctaaaataaatgtgaactcactaatttcaaatgtttcttttttgtttgcatttttgtatatatatatacttggaaaccgggattggtcggaccatattcgcaacccgaacatatacgtaaattaaattcaaagaacgtacatgtccgtgtttatgtgtattacaatgtttgtgtgtacaaaaaacaattttaccgtacttgtgattatttcaatatttttacccccat

SEQ ID NO: 60889 - DNA, 112 bp, Arabidopsis thaliana landsberg
aagagatcagactggaccaacaagaaacaaaagagaacgcccggggagaaagaagtgagagacagctcctctgctaacaacgacagacaagcaaacggcgggggagacacca

SEQ ID NO: 60890 - DNA, 704 bp, Arabidopsis thaliana landsberg
aattggacgaatatagtaagacacactaaatctaagcgtaaacaaacaaacaaccaacgccatatagaccaaattataggagattcagaatctatatcttctatcttacaaaaatagaagtgggagtggcaaataaccttggtggctcgtgtgtaaacaaatgacgcattagcttcgaccatcaagatagaggacaagaggttaacggattgccacatatccaccgcatcggtaaaaaccttccggcgtcggcctatgacgtgtcctaacaacccaaccaaaatccctacagagactgccttgaagtacaccggatacatcttgctctgcaccacaccgaattgctgctccccaagaaccgaagccaacacgtagcccgacacaaacgtcacccacacgcacatcccatacgccgccgcgatcccgacaattcccaccacactcccgatcttcgtcagccccagcgccgtcgcaaccaccgttcctatcccccgcaccgcgatctgtaccttctccaaaactttttggaccctatgagccttctttgtggccctctcgtttacctttcccctagcttcacgggctttccaggagaccttctttttcacttcaagtgcctcacgtgcgaccgtcatttcaggcgtttcgtcggaaagatcactagccgttcgatctttgactctccctaacacagtccccagctt

SEQ ID NO: 60891 - DNA, 907 bp, Arabidopsis thaliana landsberg
attcaaaaagaacttatgcgctgcattttgttacatcgtctgtaatgtagttggtgtaaggcacgggtcagttctcaataatcgtccaatgatgttaaaaaacaataattgtaatcaccaatacaataatgccgctaaagttgcagagaagccttaatgttcatatcaaataaaacatttgtcgtttggaaaaacacaattaacaggcgcatatatataggaaatattctgaaaaagaaaagacagagatatgtttgtgttagtgtacgtatatatgtgagtgttgttgtggggaatctgcaaaggaagatacaaggtggctgctttatttttttctgccttttgttttgttgtcgaagtgcctcaaagccacatgtaatcccacatgcctcctacgtccttcttttttgtttctttgattacatatctcatctatttttatcgcatattttaacattgagattcacattcaaaatttatgatcaaagtgatcagtagatgcatatgtttaattgttgttaacttacatgtagtatatgcatatatatagttgaattcgtaaaactacatgaaatcaagacaaagtattagccattttttttgtttattagttttagctttttttaatcaaaaagtgatatcttaattttgttagcttttctaaaaaaaaacttcaaaagaaaactaattttgttcaacatttcttattataaacaaacaaactataaattgtttgaatttgggtttagaaccaaaaactaaaattaatttatatgactacatccgtttaaactaatagaaaaactcaaatcagaaaaggtgatatgtggtgatttatactctcttttagaaaggagattgaagctatcttgcatgcaatttctttcactttctgtgtcaacttttg

SEQ ID NO: 60892 - DNA, 1175 bp, Arabidopsis thaliana landsberg
catacatagccaaagtaaatgtagtttaagtgaatatcctattcacattgcctgaaattttcaaaacaaaaagatatagacaaaagatcaatgcatatgtgatatgtcgactagctagatatacaaatatcaaaatttactaagttaaagatgcatgattgtatatggatgtcgtaaaatgttaaaaccaaaacgtgcgtttgttccctctcaaacgaaagtttgtgacttcgagaaatatattttttttcagtaaaagacaaaatagtgaagaagatgcaatgcatgggttgattcatatacatactaaaacgtttctagtttttggagaatttgctaaaaccataagcaatgatttccctataaataatatctaaaacacaataactttctttgaattactaatcacagcctatattttgtttttctaaacacaatcacaatgtcttatcatgataaacatatataaacgaagaagggaagaagatgagtggatattatagaaagaaaacgtacgtttgtgtaatttatattaagcgatcagtgaaagacgtatgtgactgatgagacctaacatagacccaaaatccatgcaaccttgtctttcgtcccaatgcatttgtacgctttctcatagacattttcttatttgattatatcattgattaaagtataattatagagaatgaaaaaaaaaaatcaactatgccaccatgtgatataatttatttatttttcttgattattgcatgtgagaatattggttggtacgaaaccctcacaaagatcgatccaaattggggaaatatttttagtgtttatataaacataattaacgcaatctctttattttgccactatgaaactgagcattattatacaaaaagtcacattttattttgcactcggactcggttcttatattatataataggttatcttagttttgaaaaaatatggccatgaaggttattaagaattgcctttgcccatttatgataccaatatataattggtttttcttttgtgtgttttagtaccaagatgtaattgtttgctaaagtctatgagaataccataccaaaataattcgaggatatcaaaaataaacaagagtgatactattgataatgtggtgtcgcgtttgagctatccttacctttaaaacttgaaag

SEQ ID NO: 60893 - DNA, 458 bp, Arabidopsis thaliana landsberg
  unsure (1)..(458): unsure at all n locations
tgggatatcgatatcgcggccggacgggctcggncctgcccatgtgttttgggcacncgttgcccagggncggcgagatttacgaagcgaaatgcgcggcctgccatggccggttcggcgagtcggtgggacgctggccggttctggccggcggacaggacacgctgcaaaacgaccgcccggaaaagaccatcggttgctattggccgttcctgtcgacggtgtacgattatgtccgccgggccatgccctttggcgacgcccgctcgctgcctgacgacgatgtgtacgccctgaccggctatctcctatatcttaacgacaattgtcaccgacgagaatttcgtgctgtcggacgagaatttcaccgcgggcaaaatgcccaacgcggccaattttatcgacgacgaccgtgcccaggagggccactaccacaccggngcagcgccctggatgac

SEQ ID NO: 60894 - DNA, 470 bp, Arabidopsis thaliana landsberg
  unsure (1)..(470): unsure at all n locations
nnnnnnnnnnnnnnnnnnnnnnnnnnnnnnnnnnnnnnnnnnnnnnnnnnnnnnnnnnnnnnnnnnnnnnnnnnnnnnnnnnnnnnnnnnnnnnnnnnnnnnnnnnnnnnnnnnnnnnnnnnnnnnnnnnnnnnnnnnnnnnnnnnnnnnnnnnnnnnnnnnnnnnnnnnnnnnnnnnnnnnnnnnnnnnnnnnnnnnnnnnnnnnnnnnnnnnnnnnnnnnnnnnnnnnnnnnnnnnnnnnnnnnnnnnnnnnnnnnnnnnnnnnnnnnnnnnnnnnnnnnnnnnnnnnnnnnnnnnnnnnnnnnnnnnnnnnnnnnnnnnnnnnnnnnnnnnnnnnnnnatttggcactcantnttctctctctnttttcttctctttcccaaattttccccgggnaaagggccaaatttttttttttccnaaaaaggtgtttttttttttttttgggggggaaaaaaaaaaaaaaaa

SEQ ID NO: 60895 - DNA, 1163 bp, Arabidopsis thaliana landsberg
  unsure (1)..(1163): unsure at all n locations
ggattagaaaatgagaaagaagactttgcgtgactgattcgaatgcaattgcgataaaataaaagttctatcagttgttacctgttcgagggtcaaaaacatgattacgttccatgagccaaggcgtccaaagttggggatgaaacccttgtaaaatgccataggaccctgtagaagaaaccgtaaagattttgtaacattttctgggttatatatagaacaatggaggtatcagaagcagagttgcttacgtcgctcttcagannnnnnnnnnnnnnnnnnnnnnngcccttgtaagcaccagaatctcccatcattcttgacttaacctgccacacaacaagattcaattagagaatcaggaaacgtagtgaacaaactcaaggttcaatgtcatgtgtaaatactttaccacgtcaacaggagaaccgatgcaaacagcaaagaatcctgcccccagtccagatagaatatgtgtgacaacgttgtcagtgaaccctggaatcttcaagatagtctgaacacaaaaaaaaaggaatgttggttgcttcaaatatcaggatcttttagttagaaagagagacagagaataaattagtttcatacctctttcacttgatcgtaactcgctaattcagcagcattgataatagcgtttcttgctacgttaggtccaagaccagtccaaagagctcggactccttcctgtcaaagccacattaataagataggaagcagagttgaagcaaattatgcacaatctcaacttccaagtcgggccaactacctgtctcacaattgttgaatacgcattcagcgctccagagtaccgtcttggcgcacctgcagctaattttccttccgcctgaagcctaactttcacaagatcagtgggatttgctaccatgatacccagtgcacctgagagtgtgacaacaacaacaacccaactaagtgataaagaggaaatatatattacgtgttttttctaagctggtctatcgttatgctcacctgttgtcaaaccagcaagaattttcttgctcaatggaacatcacctacaaagtcttttccaacatacaagtttttcacctgaggagaataaattggttaaggctttaagtagtaactaggaaaacactgagtttaagcacttttctgg

SEQ ID NO: 60896 - DNA, 689 bp, Arabidopsis thaliana landsberg
gaggagtcagaaggaggaatatgaacattgcttaggtgctgtgttgattatagtgtatgactatacaagaaattgtacagagctaacaccttttcttacatcgataattattcggtctataatactgtcaagagtgatggactctggtgttgttcaatagatagaaaataagtttgcttgtgacgttttttctattggtgtgtaacataaaataaataaataatttgtcaatatatatatcattccttttgtgcaacttttatcttttcccataacttttttttcccatgaacaatcataatcttttaattaaaatatttacaaatctatttaacactatgataaataacattaaaagataaaattcaaaatataacaaacaaaatggtttccgttgtttaattgttcttttgttcctgtaattggcttatgttttgataattttagtttgtgttttaatttcgagaatttttcggtttcaccagcttaatatccagagagtaccatgtgttctctggtaaaaatcgtgaatggggttcttttccttcgttgaaggatgaataaaggtcattgcaaaaaaaaaaaatggttccgcgtaattttttcactttttaagtaagaacctttccccttatttatttctcctttggcactatacatctttgtattttagatgtatgcaaaattaa

SEQ ID NO: 60897 - DNA, 553 bp, Arabidopsis thaliana landsberg
  unsure (1)..(553): unsure at all n locations
tggttacctagtcgttcggcgtctagggacttgatctagttgggcatctcaaaaagacgtcagggggctacacacaaatcttggtcgtaattgataaattcactaagtgaaccgaagtgtggccaatcgcgaagatcactttcgagtaggccatgaaattcgtcaccaacattgtccaccgcttcgaggtatcgaactcaattataacggacaacggtaggttcaccgagggcaggttcctacagtcctgtgataaatactgcatccgtatcaattgggccactgtggtccatcaccgagcaaacggacaagtcgagcgggctaacagaatgatcatgcaaggcctcaagacccgggtcttcacctgcctcaaacaactcagccagtagtggccgcaggcactaaccacagtcctttggagcttgaggacggccctgaaccgctcaacaggctacacgccttatttgtgttctatggagcanaggaagttctccccacagacatcgagtacggtgcctcgaaggtatagtgtatagaagcgaacaaaatgagt

SEQ ID NO: 60898 - DNA, 771 bp, Arabidopsis thaliana landsberg
ggaaaaagaagcagagaaaggagaagaaagagaactatccgagatttgtgtttgaagattacatgaaactctactctgctgtcaagtttcaggccaaggaaccaaggtttgaagccatgaaagctatggagacaactgtggccaacaatgttggaccattggccactgcgtgaatgatatgtaactggttaataaatatatatatatagtctttatataatgtcttagaaacttgattattcactatacgaataattttgttcatgttgttgtatgtttaagtggtgaatgtgttttatatatgggaattaatgttttctgttcgtagagttcaatacgaataaactgcagacaaataaggcaatcaaatataataaaaaaacaagtaaggcaatcaaatacaagaactgtgtttattgtagagaatattactattttcccatctacaaagctgataaatacacattgcacaagacaacaataaccagaaaaatgctcacatacgtggagaggtaataaaaaggaacgaacggtcacaattgtgtgatttaacaccatccttgcctttttgaccagttccaactcgagtcctttttctttccaatcactatggaaaaagtggtgtggctaacaaagcgacataattttgtttgtttaatctataaagtgtttttgtttttgtaaacttctgtttttttttttcatttcatgtctagaagaacatcacttaattaccaaagaacaatttagtgcattattctttttcctaaa

SEQ ID NO: 60899 - DNA, 336 bp, Arabidopsis thaliana landsberg
gtttcaatacaacagaaggtgaagaaattctattggatcatccttaactccttatattcgaaagtaagcatgaagttaaaacagtacggtaaatatatatttttggtgggttgatatacatgaaaatcaccagttcattaaggtccaaactggaatataaatatattaagttggtatacaattttcacaaatacgatttcgaattttcttgacttgtcaattactgactgtaaaaagaattgaaatggcgtgatatatctaatctccacacaataaatctttatcttttaatggtaattaatcagatagttagaagtagaataatcagtagaacac

SEQ ID NO: 60900 - DNA, 584 bp, Arabidopsis thaliana landsberg
tgtcatgtaactgtcgggagagcactcacgtgtttctgtctcttcacctgtaaatattctcgccacgtttgctctctttctttttttccccgagaaaacgcaaagacaaagacgtttttttaatttcgctatagcatgtggaggctatgggttcttatcttgtatcgtcgttctttgtcttcaatatctttaattcaatgataagcagatcatctctttcttcactcctacacatcgattcacgtcatccacccagaaaaattcatacttcaattaaaaattctgtaagtggaaaacacacagttggcaaaatgggcaaaagctaataattgatttatctccatttatggctaaaagcctaacactaggctctacacttttcaagtcttttcattttctgggtaattgttgttcaattttagagatttagggtttttgattgttcttctttttctgggttttatctaaattcgtggatatgagaatggcatgtgcgtgaatgtggcctactttgttttcttccttctaatttgggaacaaagtttgggtggcctatttattgggtacttgtaagtttcactctt

SEQ ID NO: 60901 - DNA, 1112 bp, Arabidopsis thaliana landsberg
ttaattgatcaaaagcaaaaaaccaatcacttttaataacgtaaaaagaaagaagaaccagtactttgactaatttttttatataagtggtcctttacacgtcataactgcgtcttctacgaaaagccctgtcaacatagcgaaaccttaatgacctttctttggttataccgacgttgaagcccacgtggcaatacttcacacgtgcacatgcgtgtgtatatatataacccacacatacataaacctctttgagagcaaatcaaagtgtaaaaagaagaggaaaaaaaagagaacgaagaagatagaaaaatggaatgcagaaaacacaaccaccaaggcaacagaggagtttgtccttgttgtttaagagataaactctctcgattacctaatactacgtcgtattacatcgttcacagatcttcttcttcttcatccaccaccgtttcgtcttctccgtcgtctccggcggtgaaggatcatcggagagctggttcgatgtcgatgtctttcgctgttagggaagctttaaatggtaatctgatcgaagctttaggtggaggattaatgaaaagcagatctatggctcatgttcccaaggattatattgttagggattcgacgaagaagaagacggagaaattgaaatctacgacggttaagaagaagactgggttttggactaagttgcttcatcttaaagggaaaggcggtggcgccgacgtcggcgggtttgttacttcacggcaacgagtttattaaatgaccgactttagtctttttttcctgaaacttttatttttgacgtgtacagttacagattaagaaagtaaaatggtgaaaataatgaaagtgatttctcattaatgaaaatggagattaatattggctagaaaggcaaaaaacactacaaattatttttgttaaagaacttgttacaagttgtgattgacaaaaaaaagaacttgttacaagttgaatattgaacaaagaagcaaaaaagctatgaagtttcctgggattgaccaaccaatcagtatttttgatcatatcttaaaagtatatttttcatggcttaacttacgtgttatatgagtgacttgtcatat

SEQ ID NO: 60902 - DNA, 618 bp, Arabidopsis thaliana landsberg
ttttactctctccgattttgtccagggggactcacaaaatcacacaatgatggtcaactaaaaaaaattactaaacaacttaaatgaaatgatgacaaaactattcccttttgttgcaaaataaaaaaaaaaaccttttaaatctgcaaagagatccttatatgatatggctgttgtcctggtattatttctccaatttaatttaggaatttcatgtttgacacttatttagggatcgtataatatacgttttttaattgatttgaaaccaaataacatgtactattgccttagtcctcttgcaattcgtttagaagatgttatgattgagacaaaaggatccacccgcaatactttgtccatatttttctctcaagattttgtccaaaagcaaaagagactcacaaatcacacacaatggtccactaaacagagtgcctttattgcatacaaaattcaatcaatttaataaaggaaactcaactgaaaacgatgacaataaaaaataaaaaatgtcccttttgtctttaaataaaataataacccttactgacgtaaagaaaattaaattaagataaccttgtaaaatactttttaccaaattaaaaaagaaaaaaa

SEQ ID NO: 60903 - DNA, 594 bp, Arabidopsis thaliana landsberg
tctggaatgtgccatccagaaccaatctggagaggcactacattacccgccgcatccagaagctggggcctctctacgagcatcgaacgactactcaccgccaccccacctcgagggacagcaacggaagcgcgcctattcatctatatcgcaagatttcgccgcggggtaccagtcacagcgacaatctgggcaatggcagtcgctcgagacctcacgccagcaaccccagccatcaggtccgtatggtcaggcaaacgctgcgccagactcttcgtatcgtcctctgtactcgccgaatggcttggcaccacagccgcaatggagaaatgcacctcccgagactgggcgagggtcgttcgaaggcgtagctccgttagacggaacgcatggagaccacaagctggaatgggatgactacattgctgatgagtaagtcaaccgttgaatttttcgattagcgccactgacatgaccttagctactacaagggcattcagcccacctttccattgctgccgacctcccatagcaatgtcgctgccagacttgcgaatgcgccgcccctcttgaaggacgcattcctggaggctc

SEQ ID NO: 60904 - DNA, 1190 bp, Arabidopsis thaliana landsberg
tagatggatatcgagacaggtaacttcaaactaccacatcgattagttattagattatttactcggaaataaagtatacagtatatctccaccgacattctcatagtctaactaatgcctaaattttcatgttattccttccttccacaaagagtctttttgaactcttaatttttgtataatgtgttttaaaggtaagacttatatttcacaaaaattaattagtatatcaaatagagtccatcctacaatcctacagtatagatatatgttatacaattagctagaaatgtatttaatgttttacaaaaaaaaaaatatagggaaattaggattttcttctatacaaattgttggttttccatgtgagaggattgtgagaagtgagctggacattgtacaaattgggaatatataaatacacccacccaatacgcatatactatgctatgtttgggtggaccattaactgatgattttaaaaagataaaaataagttaaagaaaagttttattttatttcttgaaaaagattgattaaattaggaggcaaaaggagctctatgaggaatgccttttcgtcgcctagaattagaggtatgagttggaggatgcgtgcctttgtgcgtttcttgttgtctttctttacgcaatctttcttcttcctcttccttattcttcctcattccttcaacctgacatttttattatgatcacatcatacatttccgttatgcaaatgtaccatatactttttttttgagcaaaatgtaccatatacatatatacaaacatctaacctcgtatatattttcttaagatacattatatgaggcaaacaacatgtattaagcgagtttgaatatagttgattcaatgaatttaccatacaagtaactaaacattatacggtgtatccttaaaccgattccttattttatatcggacaaataaatgcgaagatattagtaataatgatgaaaatatgataaaccaattttgttggtccagttgtaaagtgctcgttagatagattgacttataactatgcattcgtttttctatgatatgaagtttacaggtttttgctcatgatttatccatccagctacaaaaaggaattttgcattgagaaaaggtgtaggaaaacgaaccttgcaacccaaggaacagaagcgaaagggatcaaaa

SEQ ID NO: 60905 - DNA, 230 bp, Arabidopsis thaliana landsberg
tttttaattcagatcaaacaccattacactatgtgacttttatcattgtagatcaaattaactggttaaattattgacacatcaaattatacaatcaaaaactctgtgctttacttttgcagcccatacaataaatcattcatgccttgtcatccagtacttttaaacgaagccctctatcgagaattattcgtccataacaggagtacaactttgccaggactataaat

SEQ ID NO: 60906 - DNA, 502 bp, Arabidopsis thaliana landsberg
gtctttgttagggacgaaaatagtgcctaattatgtctcttgctgttgttaggaaatccgcccttactgctgttccaaaagattctagcaatcgacatttaaaagggcgcagaaatctaataatctcatctgaatctgaacaagaataaacaccattgaccccggttactacacaacatagatgttcaatcttccgatgtagccaaccatggtcatgatgagaagagatctttcatgaaactccagaatgtttttttaaatattattgctctataccgctttttccacacttccttctgttgtacgctccctgaaattataaacattactatccctctctaatcagactttaatccattgctgaataaacaattatctaattacttacacttattacattattgaaaacctttaaaacaaagatgttcacatttttcccgttgatttattttccatatttttctttacaaaccatttttacccaattcttctttcaaacatt

SEQ ID NO: 60907 - DNA, 1605 bp, Arabidopsis thaliana landsberg
ggattagtactagtatagtttttttttaaagaaggagataattatatttaatcatttggtcttttacgtgggtatcacattaaatccatacaacgtagtgcacgccggtacaccttttctaaaatatgataaatatctttaagaattactatagtctatataggctcaatcaaatgtgcgatcgcttgagtccttttgtttttaacgttactaaatagtactagtagtaaattcactcttacaaaaccgttaggtgaatttacctttattctaacaataactatagtttaaacaaatttcaatgatgaaaagcggtcgaggaagtttctaactgcaatttgcttctgaaaaaatcagagagaccaacacagaattcgttaattttttacacgcacgcttgaatgcgtgtcgacaagtaaacgaacacgtatacatcaaacttgccggattttttttgatttgtgatgagttcacatgtaaacgatagtgacctttttgttataccgaaatagatcatagaccaattctcaaaccaatctctaaaatggttaatggtagccaatatgtcacattcgtagatttcatatgttcaacttttaaacgctgttaacatataacgtattcatattttcaagttatcaacaacgcaatatacatgtttgattatttatatgtggctaatcgtgttacttcttttttttggttctaaattcaaatatgaagatttttagtggaaagaagatattggcccttgacaagttgtttatgatctattaaagttttgtttttccttttaattgaatttcctctatgtttatcacaaaataaagaaaatgaggagtaaaaacaaattcagcagaaaatagtgaaacaaatgattcatttccatatataaccacaaggaaaaagaaaatttccctattctaatagttttgttcctcctaattactctgattacatatatttaaactaaaactgaaaagtacacatatagtaaaccggtcaggtgattactgtctttttttcaagattttggaagtttacccattttaaagaaaattttgaatgctgttctattatagtattaacatctgtttagtgaagtcaaaacattggtcataacaatgtgatttttttttttcatttttagggctggtgggctttttgtgtccacttcccgatggttactgcaactttaattgaattttactattttaccctacccaatattaaagctttttatttatttctctgcttctctcttttgctctgtctctttatcctttttcttttgatgcttcattctctcttttctttttttcctctgtagcgtttctaggaatctctctccaacgtttaggtttcttctcagatttagaaagtttcttctctatctgaagaattttcatttcgatttcgcttcttccttcaccctaatccgtaatcgaatgccatttcgaagattgtgttgaagagtagagaggaagaagaagactaagaagctagggtttctctgatgagtagatgatgcgtgaaccgcttgttagcgaagaagaagaagaagaagctactgaagttttactagtggagaagacgaagttgtgt

SEQ ID NO: 60908 - DNA, 348 bp, Arabidopsis thaliana landsberg
agttagatccatgttgtttcatggcattttttatatatcctagtggatggatgcattatggagtgctatatatattttgaaaagagttcctagcaaaacagttctaaagactccttttaaactgtgaaagtgctagaaacttagattttataacccacatgaaaataaattggatttcagaatgatcagtggtcactttattagttaccctgagaaatccaaaggatatatattttactggtcaaaccatagtacgagaataatggaaaccaataatgtcagattctataagaatggtgaaattagtgggagtgataaagttcaagatgtgggcattcagaaaattag

SEQ ID NO: 60909 - DNA, 465 bp, Arabidopsis thaliana landsberg
tgctgaacaagtgcgtaaagagatacttaaagggatgtaaaatatgtgttcagtcgggttctcccaaccaaagcaaagccagaagatcaccccctgtggaaaatggctgaggaactgggagccacctgcgcaacggaagtggatgcatcagtgacacacgttgtggcaatggatgtgggaacagagaaggctcgttgggccgttagagagaagaagtatgtggttcatagaggatggatagatgcagctaattacctttggatgaaacagccagaagagaacttcggtttagagcagctcaagaagcaattgaccgaagaagagtgatttatgtaacaacaatgagaaagaagagatagcttttttttgttggatattaattatgaatctatgtctaaagtaaagttttgtaatggacattacattgtatctttgatatttaaacaaggcactaatttttggttg

SEQ ID NO: 60910 - DNA, 611 bp, Arabidopsis thaliana landsberg
  unsure (1)..(611): unsure at all n locations
gttctatttaatagagttaaacgtgaaagtctcattgtttatacacacaatgatatgttatggtatcgtttcaatggagtttactatgtatcatcatatatcttcgataacaagacgcataggtagtttgttcagtttgtggcaaattgttgagcgtcatttgtaaaactcgttgttacttattagaaagtctaaatttatgcacatcttatatggcaacattttattgttagtgtttaaatttctgtggggtaagattttgtgaaattttatttatgtttttacgatcctttttcttaacctcaagtgttatttagtcaccataattatcacagctataacagagatttactggattatcgttttactcgtaaaatttcataaactcaaacccacaattggttcaagacggatggcaaattcctcgacaatatttttgaaagttgttgatcagtattatactgtatatccaagtttttgatatagattttttttaatatggaccttgntatctatngttacttgnctagtcaatggtatgttaaattaaaagattaaaagttgaaggaaaaaaaaaacacatgacatatttgtagaatcctacanatttt

SEQ ID NO: 60911 - DNA, 349 bp, Arabidopsis thaliana landsberg
tttttttttgtttatggggcaattgtgagggtagtgttttattgcttaccctaatatcacaaactaagtccttttaatagtttagaaactatataatcaaatcgatatcatctgaaacagtcccaatatgaaaattaactttctttgtacaataatcaagacgtttacgaacttactaattgcaaacattcgcgattaacttacatcgttaggattcgcatcaaatgaagtaaagataccccaagattaatattattatcattatcatttaaaatacttaaattttcacgatgcaaatatatcgataacgttattaaataaagtaaccgcatgatatattctctttcga

SEQ ID NO: 60912 - DNA, 494 bp, Arabidopsis thaliana landsberg
  unsure (1)..(494): unsure at all n locations
ttcgtgctttgaggtgttgaagctgaaattgatgcctagctcattccgtcggcgcgtgctcttacgcgcctcgtgatcgtctgcgctttctctgttgtatctgttttgcgaaacctcgccggagcttacgaaggagagactataagtaatactcagccgtgtaaggttgatgaatgcgccgtgaatttcgcgtttctaggtccgtttctcttctcaggtaacggattgttgttctccaatagattcttgaaacctgtttggaactatttggaatctgataaatgtaaggacaacatttctttgactactcaagttgtcagagannnnnnnnnnnnnnnnnnnnnnnnnnnnnnnnnnnnnnnnnnnngtattggtcggagatcggtttcagctgttcttgcgatgaatcgacaagggatctctgatgttagtgtggcttatatgcacctgttttcgctttctagcataggaagtcacaagtgagctacatatga

SEQ ID NO: 60913 - DNA, 1816 bp, Arabidopsis thaliana landsberg
tgcaattcttttgaaggtcaagatcaaggagttggttacttccatggggggcgttttactttccagagcttcttctgatgtgaacttcgtcattgtgaaaaatgtcttggctgccaagtacaaggtctattgttcaaagattgcgatcaatattcttttaccttctgaaggttcacatctgtagattatataactagcttcttatcagtttcacctttgctttagtaacatatcaataccgctgttttccataatgcatctcagaaaattattccaactatgttagataaactaaaagtgtttatcagttcatttagctttaccccaattagatgaatttttctctgtcgatgccggtaaattaaagttagatagaatcatagaagtggctgttgatcttttgcacggtgcatgtgagaaattacattttcccagcagtacatagtgcctacattaaaagaagagaggccttttcgcgtaagtaaagatgtaaaatgcccctaatgaaggcctcaaaatataggttgtcgtcatccccctattgacgggttctgctttgttcatttttagatggtagctggatgatgtatataatacttaggctaatgcaggattgcaggtttacttctcagagtgaaaaacaccggtgttttctgaaattatttttagtcagcgtcgtgcctctactgacttatcattacatattatatcctagagcagagtgaactgatgaggttcatgaggaagctgttatgcctatttcattgggtctgataaatatatcttattttaacttgcagtgggccctgaataagaagccaatcgttactctgaattggttacatcggtgttggaatgagcaccgtgtggttcctcaggaaccatataagattcctcctttttctggattgacaatctgtgtcacaagaattccagcaggttagaaaaccggtatattcaacatatgcgaattaggttctttgttgacagttaatcagtgatttattatcagatgaacgcaagggaatggaaaaggtaatttcagaatatggagggagctactctgctgagctaacaaagaattgtacacatttgatcgctgatatatcctttgaaacaaaatttaaaaatgtgctattcctaggacatatgttgattttgtgtgcgcattcagttgtgctgataaattagcagtattcaaggcttaccaatcgggttctctgaagttacaagatatgtgaatataaccattacgtggttgatatatagatgccttaaattccaagttcctgtgcactaaagtttgaggttgcgttatttggactttaatgaaaaatgattccttgaccttgcatacgctgctgaaggtgacaaatacaaagttgctcgaaaatggggtcacattcaaattgtcacacggaaatggtttcagcagtccatcgataaaaagggtgacgttgggtgcttctgcattttatacattctcttactgatcagtgatcggtatattggctctctataagttaacagattcattcgatactgatatgtcaccttgttatgcgcagtttgtctcaatgaagagtcatatcctgttctcggttccatacccttgacaagaggagtgcgagatttgggggttcataatggtctagaaaagtttccttcggctgcaactgcgtccgcggcagattcatatgtttcttgtgctcagtctagagactcagatatagaagcttctgtttcacaaaatgtttttcccacttctatgaatcccagtaccgatgttaaagaaaccaagtgaaggcccaacggc

SEQ ID NO: 60914 - DNA, 456 bp, Arabidopsis thaliana landsberg
ggtcatcggattattctgatactaaggtaaagctggcataggattttattgttcaaacatttataacttttgagtaaacaaaggatagtggtggtgtcagcttggcggagcatgcctgacatgtgcatctcatcaattctcctttatgtttatatccgcacttggatctatattgtttatcttcacgcatggttttaactttactacaataatttttaaaaaaatatgtacaaaaataaataaataaaaagacaaaagtgaaaaagagatgtatgtgaagaatatggataaatagtgaagacaagacagttattgtcttgcccttgagacgtatctaatggctaattctagtatcttttacaaagataatgagtccgattatgagagctccaccgtcggaccagactcgagccgccgtacgagttggctgagcagctcttttacggctagccctag

SEQ ID NO: 60915 - DNA, 502 bp, Arabidopsis thaliana landsberg
cgcgtcggcccggccaccgcggaacgcctcggcggcatgccgcaaggcggcatagcgggtctgcgtttcctgcaggctggcacgcagcacaaactgacgcgaacgcgcggaagcggcggctgcatcggcttccgcgcgggcggcatccacttcggcacggccggtgttgagtaccggcaagggaatggaaacactcaagccgatcacctgatcggtgcgcggcccgctgcgcacctgtccgccggtcaggctgagcgtggggtcggggatgcgtgcccggcgggcgacttgcacgcctgcttcggcgctcgcttgttgggcacgggactgccgcagttcgggcagctcatcgaccggcaacggcgtaacactgcccgccgcaggcgacaggccaataggtagcggtggcagcgtggtcggctgatcgccgctgatgaccagcaatgccgcacgggccgccgcttcattgccggcgagagtagcttgctgcacctgcgcctcg

SEQ ID NO: 60916 - DNA, 278 bp, Arabidopsis thaliana landsberg
aaaggagtcagtcactgacgtcgctcccagaattttaggtcgctttcttttcgatttaggtaaaacggccaaggttctaaaaagctatggggggccatcataaaaccacacacgtatcactccgaaaatgacttcatcagccggaggcaccaagagattccgggtcgaacaaatggcgtctagagaaaaacgatgcgttcccgtccagtttgatgcgttctaactagctaagtaattgcccgacctttaggcgcttgcgcccaaaaacaatggaaagg

SEQ ID NO: 60917 - DNA, 351 bp, Arabidopsis thaliana landsberg
gacgatttgggcctgcatgattgtctagttcaagtccgatggcaatgtgtatgtgtgcaccatgggcatcaccaaagaaagcaagtacaccgttgaagatcaaaaggtgaaaatcaagaatggcgacgacgtcaccatttatgacttgcaagacgacggcaccatcaaaggcccgctgggcatgttgctcaagccgcaacccgagaagtaaatgctttagcccgccacatcgcatggcgggcgtttcgttaccttatttttttctggctgcggccagttgtgcctgcagcgcgtcaatgcgctggtgagttgtcttctgacccaatgtagcttctgaaaagccattcctgg

SEQ ID NO: 60918 - DNA, 302 bp, Arabidopsis thaliana landsberg
tatacaaattcacatagcccactgtagctgttaactttaaaaaaataaacccaccttccaatcttatacattaacaatatcacaacattatatttcacactttattaaaacattctttataatattcaattacttattataattaaaattacccctatcataactgactacaaacagactaaacttattaacccattccactaacatacaacgacattacctattattacgtacattatttaagctacccaatcatattataatcctattcaatatatatgacctattgattaatcccacta

SEQ ID NO: 60919 - DNA, 1324 bp, Arabidopsis thaliana landsberg
acgatgaaaacgatatctaacttacaaatcgaagcccaagtttgtttgttttttttgtcggtcgaagcccaatacataggcctaataaagttttacaagattgttcagttgttttttcaacacatgatttttccccctaacaaaagcaaaagcatgaacaaacaaattacaactacaaaaaaaatcgaagcccaatacataggcccaaaaaagtttttaaagattgttcaaacaaattatattacaattgtttatttcgacaaatgattccccccctgaacaaaagcaaaagcatgaacaatctccaaagacacacacacacacccgagtgtagaatgactagagaaagatccaagaacccaacataataaaagagtaacactaaaactacaaaagagcttcactttgcgaagatatcaatcgaatcggatttcaccgataacaatcgttttctctttaaagattgttaccacaacctcagtaccgtgtcccaactgctgcgaaaacagctactggaataagaaactgataggcaaaaccggagaccgagaaggttcttcttgcactgttcttgttaggtgctgcagctggtggaggaggcggtttctcaactaaaacagcgagcttcatacctccgtaacatccaccaccattaccactaatcagatagtaatgccttgtcacattgagatgaaccaagtcccttccagctccacgactccaatttgcgatcgggttattgggattgcagcttatgtagttcgtctcgttcacttctataacgttgtattggtttctctcatatacaaaatctgaccagacacaatgagaatgaaacactatataagtcaagaagattcatgatttgagatcttactgaagtacagaaccagaacctaatctatttccaattacaaaggatgctgtgaaagaagcatccttttttttaataagaaaacagagctagtgaagaaactagtggtcctttttcaaagttgtaaaatttgaaaccattcatttgccaactgatgtaaaacgtatattaagtccgaaagcctgtgataacaagtatcaataagagttagagagcgtacagagccaatcgtcgaggtagaaatgtttgtcctgagcccaaatggtatagttgatattaggattccagaacttgttatcacccaccgtccacctcttcgccgtcacattcgtcgccgccagcagaaaagccagcaccgccgctgcaaccaaaaccgcaactctcgccatcgatcagtactctataaaaaaaggatgagtcgtcgtttgtggggggggatgggtttatcga

SEQ ID NO: 60920 - DNA, 456 bp, Arabidopsis thaliana landsberg
ctcattcttgtggtgtttcacttgtagctgtcaacctccaaggcctatcgccggtagcaagtcaattgctccttcaaatagctgatggtgcacaacttcggtgtaatcaagagttggtgggagctctttggtcattgggaggttatgattttcgttctacattgagggtgctgcctcttcagacttatgatctgataattggtatggattgtctcgaactccatagtcctatgtgggtacactggtgtgagaaatggatgcgctactgttaaactgtggggtatccaatcttctaaagggcagtgtgcagtcattgagtgctgccaactttcagacctgctagcgaaggaccaatcggatgtgtctgtgttgccagaggagctacagtcacttgtatccaaatatcagtcagcgttgagctacctaaaggcttacccccaactagggattggtgac

SEQ ID NO: 60921 - DNA, 495 bp, Arabidopsis thaliana landsberg
tttatgcctcataagatgaagaaatcgtgtagggtcaaaacgtggtaacaaacagtcatgaggtttccatttccagtagagaaaatctaagtcaggcccggccattgtgatacaattgtggtgaccgccaatgagtgatccgcatgatttgtttgtgtagattggtcctactgaatctgggatccattttccggcgaaaagatcacacttctctacttcaatatctgattcaagaaacaacaaccacccaaaaaaaaaattaagtctcaatgtgagatcaactttgatacaaaattgttgaacactagtccaagatcaatttattagataccagtccttgaacattgcagctaattagcatcacttattaaatgatacaagtcaccacatgaattactttaaattagacgagcatgatccatgaattgtcatttgcttttttctattctctaaaccacaatctaataatatacgtaaacagagctttaaatcttg

SEQ ID NO: 60922 - DNA, 249 bp, Arabidopsis thaliana landsberg
agctcgcgagcgaccgttacctctgactgcccacgccccaaaccgaaaacctggattgccaactgcagtaaggaagttagcgaagctcgcggcgcggccggttgcgaatggggcgcatgaacggaatctctcctactagacccgctgtgctcggaccgtcgactgcgaatagatggatcagaccactcaaaggccggattgctgttctgcacgaaatcagggcaacacgcccgaaagaacaggagagct

SEQ ID NO: 60923 - DNA, 1226 bp, Arabidopsis thaliana landsberg
gaaacttttgtttttccaacttgacacatatctgttaaaacttacaaactgataaacctccttgaatttttttaattttttttctaactattgcctatgttttctgttttactattgacgtcaactataatcttgtatcttgtatcttactgccttttttttgttattaccatataaaatgtgagaaaagagacactgtaaaaagtaatagtacacgagattagcgacactcacggagtgtaatctttattttaaaaaatctttgacgtccacagaacacacgagattaacgcaatttcattacttccatttttaaagctttctattaatatattgaaagaaatcctctcttacaaagcgtcgtgaatgaaatcgcaagttttttaattacattaatgcatgatatatcatatagtataatctaatcatcctttcgtaatcagtgtgacttcacttaactagcgtacatgcctatctatagtgacagtaaacacggttaaaaaatttgttgtcttattaacatccccacactagctagttgtggatctgtaattttctggcttggcaaaattacattaaacattattttggcactaccattaatatatcgaaggaaaccaagacacgcacaggctccataatcaaaaattataaaactatatacaaattaatgatgatactacaccaaagtatatattcgaagcaaggctagctaattgaactgaaaacatagtcagtgtagtttatcaactttcaataaaaacatcatccatgatgtacatgtgtacgtgtatactagaagtcattctgcatgatgattttttttaatatacaaatgacacatgtccgagacatttgacagctacgttgatatgtattcgtttggttgacagagcttgagaatgcatttttttataagggaagatttaagtctatattcggtagaatttaactcatagacattactcctaagtttttgtttttatttttgaaaaagcattactcctaagtttcatgtaatatacaagacggaatgatggatcaaagttggttggccaaaaacaccgaagcaagcttgtcgatgccttttgtctcgactagtattattgttactagcttgagactaaatctgattggagtccacacaaaataaattaatattatttattaatggatctcgtttggaaatccaaagacacataattcatatgtatatatatatatct

SEQ ID NO: 60924 - DNA, 367 bp, Arabidopsis thaliana landsberg
cctctctttgggcgggtcttttcgctaacccttaccaatttccaaaactctatgtcgtgtaataataataaatcctagaagaggatttctttgattgttgcatcatgccgatccacacattttttcctttgcgtgtattcgcttggtcttcattggggtattcgtttattaattaagagagattttggagcttaaagaaaaaagggaaaatagaaaagcccccctctttcccttggccggcttcttggcgcagcccagtttccccccctctgtgtgcccttgccccattcgcagtccatccggcgcgcgttctatctgacgtggcctgcccagttcgcaccctcgtggtcttggccccctccctcgc

SEQ ID NO: 60925 - DNA, 1045 bp, Arabidopsis thaliana landsberg
cgtattgcatgcccatattatgctttctaatttgagatgaagccgacgatacgagacaaaatctacgaataagcaatatatacatatttataacaaatcttcataaaacgggatatgagaaaaaatctataaactttataagtatgcattacacatttcattggtgtaacctgaaaatgcaattcttagtcaaatttgataaaaataattaagagatacgatatacagataaattgttaatagttaatactgtcttttggaacctagctagctcctttccacaacgataaaagattccaaatcacattctatataattatgttgtcatatatgatatataaattatcataaggttgtgtcatattgtgggtattggatattactattcttcaatcgaatatgtaaaatctatgtcaaggaaatatcggaagggactcttggagtgacttgctatctaacataaaatctatatctcacccaccggtcgaatatttgtcttgattcaaaatttaatcttggacatacattaataatagcatatgcatggcctagattgcgatgtaaccatgctctacataataataatgataaaattttataaatcatttcaattacaaaatatacatttaaaatatatatagttgaatgatactttacctaatacgatattaagatgtattttctcttattgttcgaaggcatatccgaataaaattttggcatgcactgtcttttcctacggtgatttgccttgatccgttagaaccctcagccgaaataaacttatcaaaaaaacaaaaacaataattcgtatgcatgggctaaaacatacaatattgtatcataatggaatgcacaataccgcacataatccaagaactttggttctatccaatcgaatggagaggaactataactccgatcaaagtacagttgaaattaaatagaaactcatatagcttttgtctctatccaatattatcaaaaagttaatagaatcgaagtagtttgaccaagtcatctacatacaaagcttttgttagtt

SEQ ID NO: 60926 - DNA, 516 bp, Arabidopsis thaliana landsberg
  unsure (1)..(516): unsure at all n locations
cgatttattagatactcgatggccaagaggatacatggggtaccccttcgcttaactaaaccngaccgttgagaacagattggtgggatgggaatagatccaccgggacgtctatcaaccgttgattctggatctgagggctcagatcgcataccggttcagtattagggcttttannnnnnnnnnnnnnnnnnnnnnnnnnnnnnnnatcatgtacccattcatttaaaggtagatctaatcaggatcgttgaaacccgatctggcggtcagaaaagcttcataccccttcggttgtgtcattttgtaaaagacaccctgtgatattctcgaattaacccgcagtcgcacctaatagaaagagtatagcaaaccagtcctgctatttacaaaactcaccctatactctcgagattttattttcctagtccaaactctattaaaataaatcccagacattttttaggtataaaaataatatttatatatctagaaacttgtaaacatcatatctca

SEQ ID NO: 60927 - DNA, 460 bp, Arabidopsis thaliana landsberg
  unsure (1)..(460): unsure at all n locations
cgttcgctgcgacgctcctggttgtcgatcaagcggacgacagacgccgtcgtcgttgtgtgccgtaacctgagggccgatcgcggaagcgcagatcgcagaaggcagaagcagaacaggcgaacagccatgcagatcgcagaatggcggctaggaaaacctgttaacagaacgacagatgggaacacctgttaacagaacgatactttctttatttacaagaacaagcgagtagtctggtggtaacaccgattcgaagaaaggcgcaggtctctggtacgaagctccacgggcgcaagttttttttgccaaataaacaaataccgcttctagttgggtgggccggngcccgcgtcgccagggcggnggctgtggtcccaaaaaactgcgggtccatgtaggccaagggatcccacgccgtcaagcggtgtgtacacgtggggcgttttttactaaaact

SEQ ID NO: 60928 - DNA, 785 bp, Arabidopsis thaliana landsberg
aagcataacaattaatcaataagctactccctgattccctattgtgatcagtggccataaattttggagctgttatgcatatgaccatgttacacttcagataattcttagaggagatatgaaaactacgtgaaccaaagattataataggagcccacaaccaaaagttagatttataccagagtaatggagtgctcgggtagcacgagctttagggaagcccatcgcttcaagttcctcgagaatgttattgtcaacgtctggaacaaccatctctgcagagtgaccataagaaatagcgttaaagtcacattcagaaactcatgcaatacatatacattaacatggcaatgtaccttctgcagcctctccactaccactagcattatcatcaatctccatggcaaccttaggagcttccaagctgatgggtttgattgtctccaatgtcttatctacaaactcagtatgccctgttcttttcgtgtgcaaatcgctttccttcacattatataagaatgagacaaggaatcagaaataatcaaaatactagagcatagtttaattctagtctatgatcatagtagaaaacagttcactgatcttaaggcacctcagtaaagtagtcatgaaactcttaccaaattgcagaaaccaaagtacacaagcaatcaaagaaatgaactcaattcaaccagaaaaacaaacaaaaacgaatgaagcagccagcaagcccaaaaggattgagatctgaaaaaccatgattagggctatgcggagtaaag

SEQ ID NO: 60929 - DNA, 1589 bp, Arabidopsis thaliana landsberg
ataacaaaactgatcttttctccatcttgtaaaatacaaatctttgtattatattctaaaatatttactggtaaatcttcttcttgagttaaattactttataaatattgcatatattggtatacaaaataattgattaccaattcatctttatgtatgtatattctagtttttacctctcttttttttttctctcctgaaccagtaaactatagatgtggctgcgtaaaatgacttgattgctagacgtatttgctttcgtatggcgatataaaaacttgttgtcactttttcgtcaaatcatataaaattatgtctacttatgactatctttttttcgtaataaaaatatggtgcaagacggcgaaccctatcgtgtgtcctccttgcacatatacaattatatgcttgtaagaataaaaagaagttccattcatatacttactaaatattactagttgtctatccttcctgcacaaagcatataatacttacccaactttaagctcatcgattactaaaatctcgctgtctatctatactttggatgttcatgtaaacacgacgtcttccacccgacaaaaaagtgaaatcaataaaagaaaactttagattcgaaaaatgagagagatattgtggaggcgaagagaaacataggaaagaggttagtcgacagagagggaggggcgagggacccagagtggatgtaatatggatactttagctaccgtacttgaaaatctccgcaataaacatgaaattcgaataaagttaacaaaaattttacgaatcctacaccagaaacttgactgcgtctgcaacaactttctcgataataaagagacctaagagttgacatatagctcaccatccaacattgaaaattctaggatttctagacccacgggttcttcttcgctgattttgaactcaatccagagcttgttttctggcaacacagcaaaagctacattagtatatctcatctcaacacaacagtcatgacggtccctcttagcttcgaaactcattatttcacatttgtgtactgcccattgaagtcaaggttgaatggggtttaataatatgtaggaggattttcccaaaattgtcaggtgcttaccgatttcagtttctttgctttaccacgaatcctgttcctgggaggtttcagcttgtatagccgaaccatccaatggtgactcgtgaaaacctgatgacaaaaccagttacatttaccagaatcctagtggaatcaatgcaccctggtttgtagtaaataatttaaatctcacctcttcgaaatgtgtaagcttaaaatgcttcttcccaatctctgtccgcctcacccgatcataacctttaccatccgtctctacaaacctggagaaaaaatattaaaactcagccttgtaaacagagttcgaggttacagttacgagaaagtatcatacctgtagtaagagagcttgtacataaggctgttcaacattgttggagtggcctcagaatcaatccggtattgcccatctctcttttgcaaagcaaatattaggtaaccaggttcagattcaaagtcttcaaaatta

SEQ ID NO: 60930 - DNA, 2475 bp, Arabidopsis thaliana landsberg
gcctactcgttggactcgactccagccaaatgttcccatacttgtaaatgtatatacaagactcaatattttactttcaaattaatgaacgatttagcatgatcgggaaccaatatctaatcatcgattagatatatttaagtctagtaactaattagtatattttctacaaattgtttaattaaacatatagtatacagttggtaaaggggaaacacgcgtaatctatatgtatgtattaataatatataggtcttggtatgatcttcttagctatttatttactaagctttctagactttaacaatatttgaatgaaaaaaaaatataattaaccgtcgaaaaaaaagtcataaatctggacgcagaatactaatccacagatttcaacggtcaacattccaattcagttcacaaacctaaatcaaacgttccatttcataccttttttctctttcaagcttatacaacctttgaccatgtctcactttattaataagtacaaaaccaccttacattacatgcatatatataaataaaacacgttaaggaacatatatttatacaaatcccataaaccccatttcattcttcatcgaatagtcgaagtttttttgaactttcttaggaaaccaaaccaacaaaacgaaaaggaaaacgaaataatggtgttaccttggagatcaagaggaggagtagcaaagagacgtaatcaattgatttccggcgatatctccgtcgtcgaaaccaagattccagttcaactccgatcgccatcaaggatagagcggattcagtcaccgcgcgtgctgttgacgccgcgtgatgcggtggagataagtcggagattggaaaacgcagcggcgcgtgaggagtatgccgagtgtttggagattgtgagcaaaatcaagaacttgggaagaggaggggacacgaacaagaagtgtttggtccaaaacggaagcgttttggctttgtcttcttgttttgaaagattcgcggcggcgcgtgatggacacatgcgtttattggaggaaatcttgtttgttctatcgacttggttgcctctgaatcgatcagaaagtttcaacaagatgggatcaacggcttctcttaactgtctcgtacggttcttgaacggtaaggacgctaaaacgagacaaaacgctgcgttttgcatcagagaggttattgcagtagacaagaggtatgtgtacgcgttaacagatgtggaaggagcttgtgaaggattagttaagatcatcagagactctgtttcgaatagcgccacgaaagcatctttaatggtgatttatagagcgatttcttctaacgacaagatcactgaaaaatttggaaactgggtttggagagtgatcacagagatgatgtgaacaatgccgaaaagagcgtttgcgagagatctctagttgttttaaacgctacatgcgataacgagcaaggcaaagaagatgttcttagaaacgctttgatcgttcctcttctggtgaagaagattcttagagtttcggatctcgcgacacaatgttcggtttcgatactttggaagctatggaagaataagaaagacggagaatgtgatgatcgtttgttagttgaagctcttcaagttggtgcctttgagaaactcttagtgctcttacaagtcgagtgcgaggataagacgaaggagaaagcgagcgagctcttgcggaatttaaaccgttgtagaaacgagatcgagaagacaaattgtgtcgattcttcaatgcatttgaagaatgtgaagaaatcattttagtcaaacaaacaaaacacactattattctttgtaattactctgtttctaaataaactgattttttgaaatttgctcgaatcattatgtttcaacagccaaatacagtttttgtccatcacttatcaaatctacatcaataattttggcttcatcttcagataatacacaagaagcctccggaacattcagctgctcctttgctgttcttataagctcctcgatgcttcgaggtacccacagtacaatcccgcgccttcttttctctttcgaatcaccaggatgtgaaaaatacactgtacatttcttcttatagactttatctgcagattattcgaataaacaaaccgcttgttaaagtttctatctaaaaaaacatcggtactttgacttatatgccgataaaactacctttaggctctttggagccactcggaaacgaagagatttgagaattcttagcgtcttcgagtaactttatcaacatcttgttcccacaacccaaagcttcatcaagaggtgtgtttccccatctaattacaaaaaaaactgttagcaaccgcgaaaacaaaccgctctttatttggttaaaaaagaagttacctgtcttttgcaagaacattagcacttgcttctaccaattggatcgccaagacataaaatccttcagaggcagc

SEQ ID NO: 60931 - DNA, 532 bp, Arabidopsis thaliana landsberg
  unsure (1)..(532): unsure at all n locations
cattttaggtcaaaacaggtttagactatataaacatagactaatcaccgtttgattagtctctgacactgtttctagcatttattttaaaaccatagttatattatatatgtaatgcaaaaaagttgtaggaacacgaatagctaagacgggaatctcacattcgttcaatatgaaaatacaacatatttgtgtgcatatctttcaaatctgataaaggagggatggaaatttagtaaaaacgaaagagattttgtttgtgttttgtgtttagaaatcatagaaatctctcgtagaaacttactaaattcttttaaaagcaggcaagtgtcaaacatccataattttgttgacatgggtgacgcgatccatattgaccttttcatttaatcattttactttccaattaaagaatattattttttgcaaaacatattgtttgaaccatccacaaataacgtangattcaacgttttagtttgagtgtttgacttaaaagatacctcaagggtcaagcatacactaagataca

SEQ ID NO: 60932 - DNA, 1395 bp, Arabidopsis thaliana landsberg
aaacaacccctccccccccggaaagagcaagcctttgttcggttaaggtcggatcttgaagaattttcatggaccacctatgccattttaacggctggcttcttgccttctccacatctttttctaaaccaagttctgtccaccatctgaaacatcaaaaaccatacaaaaacaaaatcgtatatcggaattcaattattttcgacaaaaagttaacattgatcttcagggagtatcatcattgattttacttaaatgtttgagacatttctccttgagtcaatgactttagcctaatggaatcgatctccgccactcgtaatagagactgtaaccattctggatcttcttgacccgcgattttgatcatgcttgtgaacctcttggacgttaatcctcttacggttttgtggcgaggttgcgccaaagacttcattatctcttgcttttgatgactttctctacctgagcaaagttcattaaggcggctatatgtgaattctctggcaccgtcgagtgtttcttcaccttctacacggagctcagaagcttcaaacaattctgttagacccttgacgtcattttttactacgtctttaaatccacccttcttgtctaggatgtttttgaaaatacctaaatgttttataaaaattgtaacagtaaatacgcatatctcatacgagcaatatagtaagtaaatatatatatataacatcacatactttcttgaacatagtgaccctcttgtctcagcaatcgaaagcgaagcgctatctcatggagatcaccgttgaattggaggccttctttgtaaatcatgtgaagggtttgctcgatcccttgtcgaaaatggagatcaatgcctaaactttgaatgacatcgatcatctccaggttctcggatggaacatctacgtttgcacttagtatattcttgatcttcttgatattcaactcgtgtgaatattcctacgtacaagaacaaacacattcttagttctgaaaacagcatgagcaacaaaaagtaagcagaatatatatactaaggatgtcttattatgaaactgcttcgaagggttagaaactgaagcatggacgtttctcaagatcgatcttttagcagtatttgcaggcgacaaagaatcgaccgtattgggaaatttggatatcagaaacgttggagaattgtttggataagcagaaacaaaacaagaacgtgaacttattttggtagctattaaggccatgatgtatgaacttaagttttgttttgtttttgtatgaacttaagcttttaatgagaatggtgttaaacttcaaacgaaatgctctatacatatagcgattatggattataaaggagtggtggatgtagcatttaggggacggggc

SEQ ID NO: 60933 - DNA, 1340 bp, Arabidopsis thaliana landsberg
actcaagtttgtgtaaagtggaaagttataatgtgggtttgattacttcaaagtatgcaaaacattcatgactccattagaatagaggtttcactttcaacatctttactaaaacatcttctgatgaaatgttttctgcagagtgcagtaacaactaacgcacatctggattcctacacattcttcctaattgtgatttcaaaacagtctgtgcaatattctataccatgaggttggaaccattagatagtacaccatttcgtcttttacttacattaagatctgcctctgccattttttcaatctgtgctgccttttcttttgcaattgtcgaaatcatctcagcttttgccaattcttcagctttactcaaagccaactgtgcttcagtttcctacagtaaatacaaattgtgagttatgatttcctaagtcacaatacacttttatcctcagtttcctgaaatgtacacagaccttttgttcaagttcagctttgagcttatcttccattctctcctggattgctttaatagcagctgctgcttttgttcgttctctttttagctcctgaataaagcaacattggcagttcaattatagtcgtatgcgtctacccaggaacatgaaaccgagaatagatagatgcttacaagaatccattacaaattcgcatcaaattgcccatacttatagattagtaaaatacaaagtaaacatctgatgcatatgagcagtgccactggacatatgtcctggactgagtaatcaagtagagataaaaagataaacgcaccttatccaatattgctgcctcctctatacgcattagctcacgtgccctaaggtctcttaactcattttcatacttctcctgagtacaatcaaaacaattggcagtagtgtatacgttaaaacctcttataaagcaaagacactacagaaaataaatactcatacgacatattctgtcttttaaccaaccttcaaggctcgtaattcttcagcaaaaacctgggcatctaaatgggcctgttgcttctcagctgcatgaatggcagccagaaaatcaagtaccaactttccatcctcagtcatgtaactatctttcagcccctcggttgagttaggaaaggcctaattcacgaaactatccagattaagaacacttttctgcaaattatcaatcaatataaagcactgaagtaaggaacagagacaggaatatcaagtattaaacctcagtttctttagttatttgctcccctattgacgaggacccagtgctttcagtatcactgccttctagattatattccttaaggagagaacctggtaatt

SEQ ID NO: 60934 - DNA, 432 bp, Arabidopsis thaliana landsberg
  unsure (1)..(432): unsure at all n locations
cctcctcatcgcagcagcattactgcttgtagcacaaaggttgtggttcttcctcagaaatcgacgtctccttctgtgcgaacgactctggcagctaaaaaaccaagaaccggtgcgcaccctcttaaaacggttgtgcaagatatggcaaagacttcaagtaggggtaacacaaggtctgttacggatttaccagtttctgctgtgaaatcctcagcagcatgtaagatgggaactgcggtaagaaaagacggtagacatgcgaatcgaggactcgaatctcctgcattgatggngagaaagcggaaccgggttagatgatctttgatgagggctttgttcatatgtcctttgagctaggcagaaagcttattgatgaagagttatatttgggcaactaatctgaggcatagacgtgagaatcatgatcat

SEQ ID NO: 60935 - DNA, 943 bp, Arabidopsis thaliana landsberg
ttttttaactgattccatctttcttttgtttagtagagtgaacggatggtattcatagggaccatttcttcctctcctctcattattttccatttcgaatatttggcaaattatacgtaactttgaaagtataattaatagtttggtagttttgagctatgtaacattacttcaaaatgtaattaattttgaaactttattaaccaatctttaacggcatcgtttgataaataaaatttaacacgacatagatcaaagataattgtgcaacaaaagtcggaataagagatgaaaatctataaaatagttttagtaattgacgataaaatcgtttgtactcggttgatgtatttgataaattcttttcttgttttctgtaaaagaaaaagataaaattttagatttttcttttctttgtgataaagtaaatttttaataaattggtcgacttaattttgagttgtataattttatctgttatattatgagtaaaattaaagaatataatataagtagcttgaaagttgttggaatcacgtggtgacctcaccaacaatcaaagcgacagagccgtgaaagttgaggtggcagcggcgaagcaaaggcacgtgatagcggcggcgagagtgtgaaatggggcacgggacgacgccttcgcttctcattttgtatgccttctctatgtttgccaatattactttttttccaaacactactatttaaatttacgtccaataatttgattaattagtaccagtttgaaactagatcagtcaaatcttactgtttcgtgaaaaatgtcagataaacgctacccctactgaattctaaaattagcatcatgattaagacctataactagatacaaagccatgcagttttagaccattccatgtagaaggaaaaaatgttaggttgcgtgtggaatttgggcaacatatat

SEQ ID NO: 60936 - DNA, 224 bp, Arabidopsis thaliana landsberg
cgagttgcggcgtaaccgccggcatgaagtgttcggccgggtgcgcgacatgatcgtcccagccgagaatttcgggcgcggcaacgccgtcggcgccgatcacggtgacgtcggaagcggagcggcatcgcacgaggggcgacaaatcggatgacgacagatgagggctcgtgccgcagacaaagagctcatgccgtgacgcggtgacgacatacgcccatcgc

SEQ ID NO: 60937 - DNA, 1275 bp, Arabidopsis thaliana landsberg
ataagagaaaatggaatttttttttttcgtgtggcggaaagtattgtagtattattttttctcttttgggggaatattatcaaagattcaagaatgtatttatttatggaaataaagaaggtgtttgctttttttgtgtgttcttttaaaatctttatataaaagaaaggtatctattgtttggttggtataaatacgcatgcgcattggctttttcgagtagaggaagagactagatagagtcgtgattttttttttcttttttaaattatcaaatggacgtgaaattatttattgaaaaataaccaaaaaaaaaaaaaaaagaagaagaaagagtctatcggatacgtcggatccaatctcccaatccgcattggctgtcgagacaacgtggatgtaaaataaggctttaagttcaagatcatttacctcaaagccactgagcctttaggttaataacgtccccaactccgctaatgtcttcttatgacatactcaaaatctatttttcttggtcgtcaaaattcaatactaatgatgtatatagatgcatggttcattcacaatatagtgtacttgattttttatgcctttccagtttcctataagtatgtatctatatagtatttgattttctaatccttcatataatcttaataaataatattgagttcaaacataagatatttctttatatatggatagagtctctagttgatcgtgtgtaggtgtttcatctttgaccagtggataacgatcagattatttaatttgaaacgttgtttccactttgtagagcttagactctatgtcactatgaaacgacttgtcaacaaagcattttgagccaaataatttaacatataacttggttaaaagacgagtttacgattattactattcttaaagttaaattacgtaatattttcagatttagttttcagtagtcacatgcttaagaacattaacatcagaatacaaccataatgattaatgagagatgtatgcaaaatatatcaactaatcatgttaaaaagggttgtaccattatttagtgatgcttatctgcttcattaagataataattaattttcaggaaaataaaactattgatttgaaattcttttacaaaatatcgatgaaattaaatcggcaataataaccaaaaaatatacttttaattataaatgtgaaaaagggggaccttttttattcataaaaaccccagacagatagggtagactcacgttgctaaatttaattaaattcccacac

SEQ ID NO: 60938 - DNA, 969 bp, Arabidopsis thaliana landsberg
tccgatatctaaaacgctctcaagtatagcacaatccacaatatcaatttttgcaaatcttactcttcttttcagctagattttactaatcactcgccaagaacaaccaatggccgttcgatcaaccgtaagtaacctaagacgtcgtcgtttctctatgattcatttggtcttcacgatttgacttttatcattttgtgtttgaagggtcacttgaaaaacgtagtgcagaggttaagaacttacacgaaggcgacaaccgtaccaagatccaaagcgtattctacggcggcaacagagtatggtggccagagaaccgccaccacagcggcagcaacaaaaggtgacttcacaccagtttacgtctccataggattgatttcattgtcagtaacatttggtgtctacactgcgtatcttcatctacacgaaaaccctggcgtacgtgtcaacaagaagatgagagagaccgttcccgagatcgaagatccagatagagttctaaacgaagcggaccggttcgctaacaggtcttggtttaggaaaatagctcacgttcaagagtttgacaagcaggatgtgatctctgacccaatcaggaaagaccagtttgctcataaacctcgtgccttgacgcttaaggatgttggcgttgatcctaagatatcggctgctgcagctcactaagttttatgaaggctggtttatgtgttttgttttccatgtttctgtcgataaataaaacatctgaaggagatccaagagttttcaaatgggtcggttaaggttttatcctgtttcctcttggatgtattacagtgatcaagcaacttttgagtgtatttgtgttgtttcaacagcatgtaaattatctaatgaaatttcggtcgaggtaataatacaacttcgttttgcttctattttcttctggattaacgattttagtaaaaatactcatttgggagaaac

SEQ ID NO: 60939 - DNA, 1092 bp, Arabidopsis thaliana landsberg
aaataagcattccacaattacagtttaggatctacaatgttcttgtggaaataacattctattaagcacaaatctgggaaaacgtttgaagttgatttataaatgtggtcttcaggactgaaagcctcacctgtaaggaagggacattcccattgcttcgatagcagaagccattgtattcgctgtgtacatgccaccacaggctccagctccaggacatgaatgatggaggacagtctttctctgttcatcacttatggagccactaacaaattctccataactctgaaatacaaaattggaaaacatgatgaatcccacaagtactggtacaatttgacaccaaagtcaccaagatttctgtaactcaatcccaaaattggaaaactcaatgaagtctcataaatacacattaaaattgttataaccaagctcgtagcagatagaagaaaagatacctggaaagcagatacaatgtcatatgtcttgtcttgaaaatggccaggctgcaataatatcaaagcaaggtgaataggctatccaactaggcacaagggtttagggtttaagaaactatcttctcatcaatttgataaaagtaagtaccttaatggttccaccataaaccataatccctggtctgttaagccttcccatagccataatagttccaggcatctaaaaatattacaacaataacattatagcaaacaaatcacataaaacatggagataaagacaacacaaagatcgatgattaaaaaaaaaaaactcacatttttatcacaaccgggaatagatatgttaccatcataccactgagcactcataacagtctcaatactatcagcaatcaaatccctagattgcaaactaaaacacatccctctcgttcccatcgaaatagcatcactcacaccaatagtattaaacctaaacccaaccattcctgcattttcaactccttctttcacagcctcagacaatttcagcaaatgcatgttacaagtgttcccttcataccaaaccgacgagataccaatctggggttttagcaaatccgtcgtctgataaaccaacaccgtgaagaat

SEQ ID NO: 60940 - DNA, 535 bp, Arabidopsis thaliana landsberg
  unsure (1)..(535): unsure at all n locations
ttcctaattacccgaggggaaaaggctttttcttttcgggcaacaatatgtttgctgagcaaatttcttccaaacaatttcaaacttgggacgaagtgcttagttggtcaagacaaggttccccaaaaattttcataatttttggaacaaaacttttatttctaaaaatcaaatagaccttctaagagcatattttaatcccctaaaatttggtatctgctataaatatcctaaatttatttttactacaaagtacatgattttacacacctcataaaactggtcttacaattttatcatttttgtacaatttttggtctaatttaaaagctctcggctaaataaataaggaaaaatcatttctttatgggctggaactagcccactgcggcctagcatcgggcagagtcggtctgtagccgggagcccgtgtctgcgctggcgcttttgtgcaaaggacccgcacgctttgaacaatccgactcgagtccaagtcactgtcgcgctgtttcactgacatanctcattaaaccct

SEQ ID NO: 60941 - DNA, 508 bp, Arabidopsis thaliana landsberg
  unsure (1)..(508): unsure at all n locations
tacccaaaaccagttcagaactaaattaaatgctaaatcaaggaacatttaaaatgaaatatcctcaattatcacaacaacaacaaaaaaaaaaactaagcagaagaatgataatcgaaattcaaatgattctcaaaatttacagtcattatatgaaatatgcagtggcaaaagaaaacaatgcatatagtaaaaaatgatcactcatacagatccacaaaaaataccgtcatttcgtttaaaatcattatttgctttcttttgttcatatggatatatatatgaagatgcattggatcactcgcattctccttcagttgtcgccgaggaaacgtaactcataacaagagacgacgtactctcatcagccgtaacaggcagctgaaatagttgcttgcaagagtggcaagcgatctccatcattgttgcattaatcctcttgattgcttcttctctaacaacgtgagccttctccaactcggntnttgcttcttcccttattctctta

SEQ ID NO: 60942 - DNA, 515 bp, Arabidopsis thaliana landsberg
tttttaccgcagtctcctcttggtgtagaactcttcagggtctgtctattagaaagtatgaattttatgcttactaaaaaaaatttaaactggttttatgaaaaggattttcaaacatgcaaattttttaaaattacattaataattattatttttttcttcatccttattgaaaaattgttgattaagttgaatttattattattattgaaaactatgaaaagttttttaaaaattatctaaacttatagcattttcaaaattttcagaatgttttgaaagttcttcaccaaaacgtgatgaacgcagtgcataacattttcggtcaatttttttcaaactgttcaattaattttaaaattagaaaaatactatttcattaaatcaagaatatgaaagaaaatatcagacctattttccggaaaagaaagagtcaaattttattcagaatttttactcatataagatacaatttgtagtttacttaggtactatttgatgtcaaaaatgaatat

SEQ ID NO: 60943 - DNA, 568 bp, Arabidopsis thaliana landsberg
tgacacaaatccttttccttttgttcctctttctctaaaccaatctttcaaacaccttattcgtcttcaagatttctccaacaagtcctaccatgtccggcgaaggagacacgaccctcaaagctatctgttacaagcctggctctctccagttactcgatcaggttctctctttcacttctataaagttttcaaatttatactttttttcctcaaatctgattactcgtctgaattggaacagaggaagcttcctttagagactatttacttagagattcgtgatgcttcagatggatggtaaagtctttacctttatgattagagattgttatgggaaaattgtggtttaaaaagtttgatacttttggtaggagtgctatacatgaaatggttgtacgtggtgctcctgctatagctattgctgctgctctctctttggctgatgaagctttcaactttcatggctctgatggatcagcttaacatgctgatgcttttgttgagaacatagtggaccatttagtctcaaggttggattttgcatttgttagttaaaccctttgca

SEQ ID NO: 60944 - DNA, 1346 bp, Arabidopsis thaliana landsberg
ctttgtcaattcaaaatcagaagtatttgataactgcattgcactagaaatctagaattgtgttaaagtatcttaatgtaactaatcatatatatcacacacaaacggtatagctattaaacatagaaaaacatatttgtaattggtataggttacatagatttgtagtcgtatttatacagtcacacatgatgtcatttggtgtggataattcatagaatataaaggattttcaaaatattagatgagacaaaactagatacaagttttctattatttaagtgtatgtgtaactatcctaatagtttacagtgagatcatgagatgcctaaacggctaaactattaggcatttatgagaaattgctcgtgtttctcaagatatgttcatttggggctatacgtattttcaaatcatcaaaagtgagtctaaaaaaaagttcaaagtgggaatgcacctatgagtggttcataacatggcagaggtcacattaccctcgcatgttttgaattccttcctaaataaataaaagattccaaaatccattaaaactcctacaacatctaaaaaagaagagagaaacatgatctttcaccaatataaaaactacttctacgacatctaaaaaagaagagagtgcctattttaaatatacaacaacctacgggggaacaattgaaagagacagaacaaaataacattttcttatgaaacttttagcctaatatatccgaccatatgaagacatgagtcatctatctcaagaaaatgggccgaagctaagcccaaaatcgatatatgtgtggtttacaccagtctggttaagtaactcgtgactcaccgacgtgactctcatcaatcttcatcacattcccccgtgcgccgtcggtgctattccacgcccttcttcattttcccaattaatttttttctttcattttaaaatttaaatcctgagtttatttggatattcatttttttttgttgggatgagataatactattcacgtgtgtgaatttacctccacactgaataactaaattctactcttggtttttcatgtgtccaattttatataataaagttaaataagatgatgggattttgtacatggaaaacatataaaaagttggcattttttatgtaagaggtttttacacgagtacaattaacatcttatttaacatgcattatttgatgtgttctcaaaaggcaaaagctagagaaaacaaaaagagcaatggaacaagaaaaagctaaaataaaatgaaagtggaaagacagaatatataaagagaatgacagataaggaaaaaaagaaagcgaaatgtgattataaagtgaa

SEQ ID NO: 60945 - DNA, 532 bp, Arabidopsis thaliana landsberg
aatctacacgaaaaggcgtcaaactaaggattgaaactgctgtattgcccaatttttttagccagaaagattcatctttttttacttggatgtcgatgaatagatgaagaaacataggttgagagtgagttaattatgtgctttttaaacttcaagttttgtctaccaaatacggtgcttgttataactgatatgattttgacaattgagttatacaattcttttttacaagttgtatccttttttcatttcgaaccatccccctcttactcaacgagagagattgggaaataattgcttgaagcagaaaatcgaataacagattagctgaattaaaaatatgttcacttgaaactatgttccttcaataccatcaatgatttctggcatttccctccaatttctgttgttttctctttccaagttagaactccgcacttgttttgagatagtttcagccttgggtgaataaagacaaaatcctttacctattttcttctctttttctagtgctggtttttcccttttccat

SEQ ID NO: 60946 - DNA, 406 bp, Arabidopsis thaliana landsberg
tcttaacatcgatattagcttttttttacatattcctactaaatcatattttgagtggtgtatgaacctaatttgtggttcaatatcgaaggcttaagaccaaattcttttatgtaatcagcatagtgctgctactaaaactctctgctatgacgtcattttaagttcactaagctaaaccacaacatatgtataccattaaacaatcgcttacatgatttagagtctgccaatgaatatgaatgtgaacaaaaatttaattatcatatttaatatacaatacaaagattatgttcgccgcactataatattcacaaagccggtctccataattgatgctggagatataatatccaacatcattaacctattcagagaagatttccttgaagttttcgcgagttga

SEQ ID NO: 60947 - DNA, 1594 bp, Arabidopsis thaliana landsberg
cgttgtgtcaatggcgtagttggtttgatcttaatgaattactttcctattcaactgattgtaagattttttgaggttagaggtggtactcttgagcgaataccttctgcagatttgcgtcgtccacgtgatcctgaccctggcgtggtgatacaggttagagattgaatgattcttggtttgctgggttttgcttcccttatcttccattgctgattaaatgtatgaaaccagatcccagttactaatgatgttgaggagctaccagtcaggacacctgagaaagcaagatgcataacatcaaatgaagcatctagaagtgacgtttctcattcatatggtagcaaggatttgaattcagtcgatggttctccaaaagatgaagctcttgtggggtgtcaagaagaaaacgctggaagtttcagtggcgagaaatctcttccaacagagaattgctgcagtagggaagcaacacctagtgataaggaaatgcttgagaaggagaaagaagagagtgtttgcaattctgatgagacggatccatcctcagtggagagggaatcatctcttggagatcgcattcgtttgagccctacctcttcttcttctgttggtataaatgaggaatctgatgattatgaaacagagtcattgaaagacagtgctactgatgaccaacgtgaagtcagtaccccaccacaagaagctagacttgcagaacatgaagcaattagtatcaaaagaggggaagatagtggtacaatgcattctagacacagaagatctcacgaagactccagcaaaaggcactgtgggagagctggttatgctcgctatgttaaggatgcatcgcctacaccagatcctggtcgtgggaagaaagttggttctctacagggcttgtatcgtgattcaaacaaaaactggcagaatggaccacctattacattagagagggatgaaactgaaggtaaaggcgttcattactatagagaaaaatctcatggtagattgaattcatctgtggatcatgataggcatagagagcacaggtttggttggcggaacaacaaagaatcatcactcggtcgaggttttgatcattctaatagttacaagtgtgggacgcatcttaaagagtatacctcacgttcatccttcgatcttaatcagagaaattctagatcaagttttaaagaagaggatgatcgatatggttggcatcatcgtgaaagaaaatatgttcatgaaagaagtcctatccgagcatatgaaaactacaaagaaagaaatgggtgtgattggctaagagaaccttattatgaggactgtataccgattactgacatggattataggtaccggtcagagaactcttctgcacatgcaatacacaacctcaagcacagtccagagaatgatctttattgcagaagaaggggtggatacgattataatttgcatcgtgatagatatgaagatggagttcacagggtagaaagtagaattccatttgagctggcgtacagggagatgcgttcttttgctgaagtggaaatgagagaatatcaagggtataaaagacatgaggaat

SEQ ID NO: 60948 - DNA, 1227 bp, Arabidopsis thaliana landsberg
aaactgggccatcactagccaataaagttgagccaatatataacaagcatttgacagattagctagtggagaatatgttttatgcatacatacgaatatacgatgatgagaaacaagtgtgttatctcatatgcatggatccatgtttcgctatgtgttatatatagttatatgtctgtccccgtaacgttttcaaaactcgtccaaatttgatgaaaaagtgagagttctcatataaacgcatgcattctacatacatatatgctgaaccagtgagtcccttaaaaactaattaaacacatagtccttcagtaaacttaagtcaccaaattttcagaatcaaaacttgatacatcgaactacattctacaatactacaaaatgattcatcatgtttgacgccgcgcatgcatatgttacatgtttgtcttttatatatttgtacttgttcgcatgaaaatatttagtaaactatactacatgtggaccatgtgatgatagtggtagatgagaagtagtggctatcatatgttactaaaacactttttaattggtcgctaaagttggcaattaattgcgtgctccaaaatagaggacctttgactttcttcaacacgcaaagttaagctcagttgacgcagactttataattacagtgttaaaaaaaaaatcaactattagaaggctacttgattattgtactaatgttttgtattattgccatattggtcgtaattagaagcgaatgcatgtatgaccttgatttttgcacttgctaaatctttggtactagtattaaagaaacgagtttacccgttctgctgctatttacttgtgatatactttgatctgttacaatgttatgagcataaaagtaaatacattgtaccaagtttcatctttccttagattgtggctatcatcagcttttctaactatctctcaaatttaaagcatattgcgactcacagatgcaacagtatacatgctttggaaagaatgaaaccactaggctccacaacgccttgttttctcctgcatcagttgtttttaaacataatgaccgatgcattagagacactttcctagctagttcgaagagaacaaccatgaagactatttcaagaaccacgggtaacaaattaaatcagcattacagagtttgccaactgtttcatatagacattatctatctttttgggtcctagattagctatgaactattag

SEQ ID NO: 60949 - DNA, 1272 bp, Arabidopsis thaliana landsberg
taccactaaaatattgatgtatcgattatataacgtgagaactctctttaaccagacctaaataaaattgtacccgttttctttagcaaccattatatatatgtatatatgaatagactattaattacatttgataaaaaaagaagtatcaaatgatcaacaggtgaataatccgaataagttattcagataaatttgccgtaaaggaaaaccaattttacctttaggaccttttccctccttacctgggccaggaggtgagaggcctggtaaaaaaaaaaggacttcccaaacccttggaccttaggaaaatggttttttccaattttactcccatgtcgtcagcttagctagaaccaggattggctgcaaagtacgccaaaacgccaacgaaaggagcattgatgtaagtagtgggctcggacttgcggaaatcagaccgatcatcatcgtacatatcgtcctctccaggcccacccaccaccgctccaatcaaaacgttcgggttcggttcggtagaattgaaataaaccgacccgtctttgcatctgatggcttctggatgatccacgatcgatggcaatgatgaaccacggtgatggatcctctttggatatctctctccgtatccgaccatgtacgataatcccatcggattatcccccaatatatagtccaccttcattttccaataaatacatgattagttttgctggatgccaaaaacaaattatatgttattcacttataaacttaaaccaaaccaactcaaaccggtctaacctgtttcttggcaagacggcggagataatcaggagggacggtaagggtgccgcaattgagggagagagagcttcttgaaagatattgagcgtatacgaggaggaggaaagatatggtggtcgcatgttggagctggctaccgccgggcttgtaaagtagaccagcggaagtatactcaacatgcggtcccgaagattccgggaccagactacacatgaagctctctgctgatgctttgtacgcctctaagttgtacatatttccttcaataacttcctgtaccgaaattaaatcaaaccaccaattttatcagttatgataccggtttggttcttaaccgggtcagtttggattcacgtacacggaaagaaaagaacataactttgatatgcacgtgaaagcctcgtgtttactagacttgtgctaaagtatttagagttaatttcgatttcacccgtaaatttgatgttaaaaaattggaagtattga

SEQ ID NO: 60950 - DNA, 1276 bp, Arabidopsis thaliana landsberg
gctatagatgtgagtatcctccattcattgtggttcagtatttaaattttgcatgtagggttgaaccattcctcctggttgtagatggagataagcaagtacctgaggcagcattcaagaacaattgctgggaagtcacagcttttcatcaactcttatgcgaaggctctagaggtacacttcctggttggcttggctgttttaacttttgtacctcttaatttcacatataaataaaagctttctaattgtgttctgtgttattcggcacctatagaaaagacatatttcctgttcgcttgttgttgtgtacaataggagttagtaagcaaccaaggagggtctcaatatctttggccaggatctgaaaattgttggttcacctttgatacacaaaaatctgaattcacactgtttatggtggtactacaggttattccacgacagttatgtgacaatgctggatttgatgcaactgacgtcttgaataaacttagacaaaaacacgccatgcaaagcggtgagccttctctcacagtcacaagcttgatgtattcatcttttgatgagagctgcttaatctcattcatgatatctttgttataacaggtgaaggagcttcgtatggagtggacattaacactggtggcatagcagattcttttgctaacttcgtttgggaaccagcagttgtgaaggtatttcaagattctataaaattccactcttttttcgttcttgggactattgtgccagttatgaatatgtctatcttgtgtggatatctttcattgaaaagtttattgatagtatgattccctttgttctggtagatcaacgcaataaatgctgcgactgaagcggcttgcctcattcttagtgtcgacgaaaccgtgaagaaccctaaagtaaataacacatgctctcattttcttttgtatgttttgacaatgtatatgtattgtattgataattgttgtctattgcagtctgagagcgcacagggagacgccgcaggtgcaatggggagaggacgcggtggaggtcgtggccgtggaatgcgaaggcgataagctccgtctctaatgccaaacttgtgggattcttcttcttcttctctaatttcgattttgttgaatttttgttttgaagttaaaaaacctattattgggtttgtgtttgttcaattagaatactggttgggtatgtatgtctatacaatctgtgaaacataagttttagtgttgttttggttaaggagtttatatttgcttaa

SEQ ID NO: 60951 - DNA, 471 bp, Arabidopsis thaliana landsberg
tgctttgaatggttccaggtttgcaatgaacaaaacgatttttatttaccgtttatgaattttggttcgcaacaaactaacataaaaagatgaactcatttgtaaaatttttggtgtatgcatattaaaaaaaaatgatttaacataactaaattttgtaaatttttaatacaaacgcaaacgttatttttttcaaaagcccatttacgacgaaaaactaactaacaagcccattagtattagtattccttttaacaatggacccaggcgccgaataaaaactaaatccggtccggatcttaatcctctagcaacagtgaaccgggtccgcttcgtcggaactcatggccaattcgaaaatggcgatagcttctctagcagctcaaatccgtcccttcacatgtttggccgcgtctctgccgtcacggttggcgcctcatccaccagacctcatccggtggatcaagcgag

SEQ ID NO: 60952 - DNA, 697 bp, Arabidopsis thaliana landsberg
accaggtatcgagtcttgatacttgagagaagctgttcttgcctactcacggggatgtcagagttagggaatctctggtacagagtcacctgagggaagtcgtcggagctagtgttgatgagatcaatgggaccctcacactcttccttactctccctggggaggagatagaacttgcggtctcttccagaatacatcatcacattggaggcaggaaacgggaccttgatgcgtgtccaagccgagtcaccaggccgccacaggctgaggaatggactactagaggacttgactgccaatacacagtcttgctggtttggagaggctgatagagagatactggagatacgagctttagcatcatcctccaatggaggcagattgaaacccttatgtgacgaaacagaggcacacgggttgaagatattagtgagatacaatgtgggctcgtatatcgtcttcgcaacaatccatcccctcgaagatcccatcttcatcgtacattggagctcctccgacagatattggtcgcgaattttcaatatttccttcttcctcggatcatacaggttaatgtcgaccactgatccaccagacgccgccctgtagttggtatcctttaaaagcagatacggcgtcgccgccgtggagaaagaccgcagttcactgaaacagagtctctgcttcttcacaactg

SEQ ID NO: 60953 - DNA, 1259 bp, Arabidopsis thaliana landsberg
catgttatcacttcccagtatataaaatgttctgtaataatattaatttaatttgaacttataattgtttaattgtcacagaaaaaacaatgatgtgtcatgtgtttatgcatacattgaaattcaacatatttacacatttactactaatgttggttctttgcttgagtctctgaatccacaaattcagcgactgaagaagtcatctgatttggtttcttgggagctttctcttcagggatgatgtctctctcaggttctttcctcttcgaacttacactctgagaacctgtatgcattgttcctagactcggtctcatttctatctgagaagagcctgtggctgcactaactgtaacccttttttttccactcctgagaaactcttcctcagcttttaatcgttccaccaacatacaaaccgttagaaactcctcttccatcaatctagtcacaaagccactccacgacgaaggaaacttggaaatgatggtactcacataaaacgtctcatcaagaaccataccagcacccacaatggaatctgcaatcttgataaactcttgaacttgctcaagaaccggtctctcttcaaccattttgaagtcaatgtactttctgacttgtaccatcttagaattggattcctcacgacggtaaacccatttcaactcttcccacagttccttagcatgcttgaatctcttcaagtactgacggtacagatcatcagacaatgatttcatcaaatcattatggcaaagataatcatctctcaaccaatcttgagagctaccactaccaataccaggataaggctcagagagaacataagccagcttcatttgcttcaaaaaaagctccatctctgatgcccatgaaagataactcctcccatcaaatcgccaagtctcgataagcgaaaaaccgtgagtgctactgcttctcgtatccaaagcctcacaagcatttccatttggtgttctgcagcaagatatgcggtccaatgaatataaaacaccaaaaggagaacatgaataaggtaacattcttacgtattctttaactggaaatgcttaatagcttcctcaatagcagagaaatttttcttgaacacagaccattggtgtgttgggaaacttattcctaacagagaacacaacatgaaagctttttcatcattcacaagagttgcttcagagtaaagataacaagtaagtgtgtgtgttcaaaaattgtacctctaaattttgcatctt

SEQ ID NO: 60954 - DNA, 566 bp, Arabidopsis thaliana landsberg
ctgacgctggtgtttcctctgacgacaaccaggacgtgcctgaatggagccgtgcgacatggcatcgagagctgagcagcctacaccacacatgcagcttccatgaatgcaaccagacacccccagctaccagatagcatcaaagctccgtcctccttgttattgcccttctccaagaatacatcccgcctcgatgggctctgtaatctcaccatcatgacacatcaccagctgaccccgcgccttaccgacgacacgaggcctcacctggttaactgtgaagtagtccacgcgcgccacgatctgcggcttcaccgccaaccgcactacatcccctttgctgatggtgcggcgggactcaaccacccgctcgaacacggtcgtgtgctcgcccgaggtgctgcgcaccgatgcctgcatggaagtagagcaagacgctgccgctgataaggagtagccaaggaatggcgggctgcaagtttgagttatgctgacctaaaatctgattttaagccgtgcgaacgaacgtttgcacgcattggcagtgctaccacacacacacgtgt

SEQ ID NO: 60955 - DNA, 1577 bp, Arabidopsis thaliana landsberg
gaaatgtgaaagttgaaaacaactattcgatgctattattgatataagttctcgttatgatttacaattttcattttctacttctgtaaaatatatgaagatggatataaaaagaaaactcttgagtgactcacaataacgttgagattaatgactgcgtttataaagatctttttaaaatgatgtttacacttcttctttctttttttcacaattttacacttctaatgtaggaatcatatttgttttgtctgattaaatatagtttaatatatgtaaattaagtaagaacatcaatgaacattaaacatagaaaatattaacaaagagcagttaactatcaaggggaccaatttgattaaagaaattattttttgttcccattagaaattggcaataacgttgaggttgttctctcaaattaaaaaaaaaatattttctattttgttggtgtgctcttaaattccccattgttacattgaggttgccctctaaattttaaaatattttatttttttgttggtgtgcccttaaatcacccattacacaacaaacaaaaaaagagactaaccaaaaaataattttataattaattttgtttcttcctacctacaagtatttacttaaccattgcctcgatcttttaaaccatccacattttttgaatcaccatcaacatcttttctctcttctctttcttctctctatctgagtccagaaacattcacattaattacaaactgaaaaaacattgaaacttttgaataaactcacgagaagtactctgttttctcttcttactctgtttcttgttcttttaattttgatacaatggcgtctcagagacatttaaaagatcttcttgaagaagatcaagaaccgtttcagcttcaaagttacatctcagaccgacgttgccaaatcaatgctcacgtaacgcatttacaggtcaagaaacgcagacccatctctcaaaacgctggacttccctcgcgtttctgccgcaacgcttgtttcttctctctccgtgaatctcctgacccgaaaaagtctccactcttcgaactcaagtcaccaaatcggagccaaaacgcgattttcgtcaatataccggcgagaactgcttccattctactagaagctgcggttaggatacagaaacagagttcagaagtgtctaaaacaagaacacgaaacgcaggaaacgcgtttggtatatttgggtcagttctaaagaagctaacgaaccggaagaaacgcgaaatcagcggcggcaaagaagctggtcgcgtttcttcctcttctgttaaagatatgttgagatgggaatctccggttgtacgtaaaatagtcacaagaaaatccaaacgtaacgaagaagaaaacgcttcttcccaaacgcataaaatcgcgtctgaaacgcatttctcacggaggtcaagtagtagtggtgtttggtcagagagtgttacgaacggagagagatcttgggacgttgatttcgaaacgtcgattagcaccagcagccgatctaacggttcagatgagtttgcgatgatgatgaacggacaagaatt

SEQ ID NO: 60956 - DNA, 1834 bp, Arabidopsis thaliana landsberg
gtgtccatggcagctttgcaaacgcttcgtgaatggatcggtatccagcagttcccacctgctactcaatctaaattgctcgagatccttgggaagtataaagaagaggttcctttcttgtttctagcttcatctgctttctgtttgtttcttcttgtcttagagagatttaagaaagaaaaaaaactggtgtaggatgtgagctcgctaacggtccttgtaatggggaaaggtggtgttggaaagtcatcaactgtgaattcagttataggcgagaaagctgctgcagttagtactttccaggtgccaagtttaatgctcttctcatggcttgtctttatgactattggctatctttcttttaatttttctcatagaaagtgtgtgattttccctctttatagtctgaaggactgaggcctaccttggtctctcgcacaagatcgggatttacattgaatatcatcgacactcctggtcttattgagggaggatatgtgaatgatcaagccatcaacattataaaacggtatgatgaactgtttccaggtctaaggagttactctcctaatttggggctcatttgtggcatttgtattaatttggattcgtggatgttgaatttgaacagatttctcctcaacatgactatagatgtgctactatacgtagaccgtttggatgtgtaccgggtggatgaccttgataggcaagttgtcggtgctataactgatgcatttggtaaagagatatggaagaagtctgctcttgttctcacccatgctcagttctctccaccagacgggttaaattataaccactttgtctccaaaagatctaatgctcttctaaaagttatccagacaggcgctcaactgaagaaacaggatttgcagtatagttttttcctccttacataaatgtctgtaacgaccttgatagtagtcaagttaatagactcacttacctctgatcttttattgtagggtttttctattcctgtcattcttgctgagaacagcggaagatgccataagaacgaaagcgatgaaaaggtcagttgattggttttgtccacgttctctttttctcgcgtcttgtagtagttggaccaatcttgaagtcggattttccaaatttgtgacagattcttccatgcgggactagttggattcccaatctgttcaacaaaatcacagagatctcttttaatggcaacaaggcgattcatgttgacaagaaactggtcgaagggccaaacccaaacgaaagaggaaaaaaactgattcctttaatgtttgcattccaagtaagcccctctgaaccattcagtaacaatacagaataaggcttgatcaaaacatcatgcatcatttattcatcttttgatggtttgaaaatgcagtacttgctggtgatgaagccattggttcgagcaatcaagtccgatgtttcgagagagagtaaaccggcgtgggagctgcaagactccggtttagcaagtcgaaggtcttgagttgtggacacgagttttgtttggtttgttttgctatctgagagattgctctgtaggtgaaattgtgatacaacctcgagaaatggggttcacagattattactgtcgcaaaggtctcttatcttaattacatcttctttagccctctcgttaattcgtagttaagagctacctctcttggtgaaaatgatttagaagagataattcccttttgtcattaaatgggaaaagtcaccgctgcagtttttttgaccccaagcaagttttgaaataaaaataaaaaatttgaggttaaaaaaaaaaaaacccccatgtttt

SEQ ID NO: 60957 - DNA, 469 bp, Arabidopsis thaliana landsberg
  unsure (1)..(469): unsure at all n locations
nnnnnnnnnnnnnnnnnnnnnnnnnnnnnnnnnnnnnnnnnnnnnnnnnnnnnnnnnnnnnnnnnnnnnnnnnnnnnnnnnnnnnnnnnnnnnnnnnnnnnnnnnnnnnnnnnnnnnnnnnnnnnnnnnnnnnnnnnnnnnnnnnnnnnnnnnnnnnnnnnnnnnnnnnnnnnnnnnnnnnnnnnnnnnnnnnnnnnnnnnnnnnnnnnnnnnnnnnnnnnnnnnnnnnnnnnnnnnnnnnnnnnnnnnnnnnnnnnnnnnnnnnnnnnnnnnnnnnnnnnnnnnnnnnnnnnnnnnnnnnnnnnnnnnnnnnnnnnnnnnnnnnnnnnnnnnnnnnnttaaaatttccggaaaaacctcccatttcctttaagggtttaagggtccccttcgggggggattttttttttccccccccccccctttttttccccccccggggggaaaaaaaaaaaaagggggggttttt

SEQ ID NO: 60958 - DNA, 430 bp, Arabidopsis thaliana landsberg
ttctgaggcggctcagggcatcggagtccggggccgtcgtcgtgtgacccaggacgtggagcacctcctccctggcccggtgctgccagtccgggtgcatggagagcacgaccatggtccacgtgagcagcaccgacgtggtctccatgccggcgaagtagaacagcttgcactccccgatgacgtcgtcggtggtgatgccggccctggcggcgtcgctgccgtcacccctgcagtgctccatgttggactccagaagcagcccgaggaggtcgtcgtcgcccgccgcgctgccgcttctcagcgcgttctctctcttggcgatgatgcccttgaggagctcctcgacctctgaggcgatctgcttcatccgtcggttggttttcgtaggcaggtacctgcgcggaacgtgttatcttgattcttgaac

SEQ ID NO: 60959 - DNA, 516 bp, Arabidopsis thaliana landsberg
gaagttttctttccgggcttttggggtcagctaggcgattatctttcggatgaatttcatgggaacgatgatggtatagtgccagactcagcgtatgaggatggaggtcagtttccaattctagttagtaacaggaagaaacgaagaaatgatgatatgggtagtggaacaaaccatctaaagagtaatacttttatcaagagagaggcaaacatgttaggaaaaaatccatggcctgagaaagatcgtggtggctcttcggtttctcgtgatacgggaacaggaaaagacgttcaggatatgacattggaggatacaaatacttcagatcatggtttcaatggcggccacgtagatgtggttgaaaatttcttcactggggatcccatgttgcgtgacactttcgctgcaacgaatgatggcgtatataattattccctcaacggcattccggatgctgaaaatgatcttagctctttcgacaatggagataaagaaaacaatgatctcttctat

SEQ ID NO: 60960 - DNA, 1332 bp, Arabidopsis thaliana landsberg
catcacagcttagcaactacgcatgaaactcatctcaaaggtcacaacacaacaagcttctttctcagggaatttgcctccagacatctactaaactaatatgattgtttactacatagtcatttacagtcattaggaccttaagaagtattattagtcaactgaatttcaagtcatgcaaattttaatactaaagactttacttgtatggtttgtttgcaaattgttttagggcaattctcattaataaaacaaaaataatttctgtttacaaatttataaccgaagaaaccgcacaaggattaaaccaaacctgttatttaaaccggagaatgtagaaaaccaggaaacgagaaccaaaatacacaagctttaaaccaaactggttatctaaaccggatcaagttttccccgccaaagcaattttcattcccattgttccaaacagtttaaaccctaaacttttccccaattttgctcactaaatctcacgaatctctcctctcgagaatctcctagggttccgattatttctcaattaagatagtatccagctcgatgacggaaccaaatctcgacgaagatggttccaagtcgtctttccagaaaacggtgagtgagcttcttacttcatctcctcgtatttgattcaatcagtgttctaaatccgcctttttgttcatctgggtttttcgagtaaaggtggtgctgagagattggtggttgataaaatgcccaaaggaattcgaagggaaacaatttggtgttgctggattcgaagagtccgtcgagtaagagtgctttggacttttcaggtttcttttttttttatgaaacgatttagtttttgaattcttcgaattttgccttaataggacaagagcaatgcgtgtgtttacatcttcaccaatcaccaaagctttggatgttttcacactcttagcatctgatggaatctatatcactctcagaggttttcttaacaaagaacgcgttcttaaaaatggatttaaccctgaggtaatctaaagattgcttaacttgttggaacttgatctatctaagaactaaggaagaagaactgactttgatttgttctttctcttttgttctgtggtctggtcttgggaatagatttctcgtgaattcatcttcgggtttcctccttgttgggaacgagtttgtaacagttgctttgaaggagactcttttggcactgatgttaataccgtcccttcgactatcgagaaaggttaggtcttgaagcaatgtgtttgtgtgtgttttttttttctgaggcatctatgttttattgagtatgtccttgtttta

SEQ ID NO: 60961 - DNA, 1147 bp, Arabidopsis thaliana landsberg
ttcaagttagattttgagtttcccttctaaaactttctgctctttcttcaccttgtaactaatttagtactatacatatttaaatattttacacaattttgggcagtaaatctggcattatatttaacgattataaaaagaaaagaacttattatagtcgttaaacttaaacttattttacaatcaactttaatttcccgattacttgaaagattttacaattaaaactagagggtctaaaataaataaaataacatataggccctattgacaaatacgataataatataaggtccaaagagctattattccatcttacttaaaaaaacaccgtcgtttcgataagcctcacatcttaaatcccaccggtagactgtagtgatgaaactccgatgaaacaacaatggcagcgttaagccaccgcttacgtagtttcacacgccgcttctcctccacccggaccactcaaagaagcggcggaggagccaacaccaaggtacctattctctacacaagcccagacatcgactccgatcccgtcactctccagctcttctcgtggggacgtggcgcgtcaggtcagctcggcggcggaatcgaggagattcgaatgtatccgtctccagtcgctaatcttctctttcgctctgatcaatccttctctctcgctcaaactcctggaagaatcgacgcagattcttccagttttcgaattggaatctcttgcggcttgttccattctggtttaactatagacggagatctatggatttgggggaaaggtgacggaggaaggttagggtttggccaagagaattcggttttcgtccccaatttaaatccgctttttgaggaacattcgattcgatgtatagctcttggtggtttgcattcagtagctttaacacatcaagggagattgtattcacttgggtaaagctctagcatctatagtcttcatttgagtttggaatcatactgtttgagctagttgatgcaatgttagctagatttgcatttgtgttttgagcttttggttctgcataatgtgatggttccacaaattaaaaatgaagttgttaggtggtatggtggttttggagcgcttggtcataaggttacactagagaactcggtcctcgacgtg

SEQ ID NO: 60962 - DNA, 354 bp, Arabidopsis thaliana landsberg
ctttacggttttgcgctcggttcacatcgcaattttttggtttttgtctttttgttttttcggtttagattttttcttaccatattttcaggattctgttcaactttttcatttttcttttccaaaattagattacattaaccaaaataatacattttcaatcaatattatagtaacaagatctattttggatatctatctttttactcgaactcaaaaagcaaagttgtaaggggattttggttttgtaggatttaaaagtgattcggtctgaatttgtttttggttaggcatggccagtctggtttcggacaaatttacgctcaaacccaggaacgtggtaaagagcggtgc

SEQ ID NO: 60963 - DNA, 583 bp, Arabidopsis thaliana landsberg
tgcaccctgattttttttactagctccatttctcttgaaaaattgacgttctgtagctgcatcgacttatctgaatttttctaaaaatgatgttctataaaaactttccgccctcaagaatttagcaaaatatcgatgttattacctaagccctgtgttacttatgttttccgcccttccttgtttggtccctggtgctggtgagctaggttggaagaacttagctcagattgtcttgtacagaagagactaaatgacacattgcaagctgacttggcaaaacttgaagaacagactagaacatatgcaggggtaaatttttcgttcttgtctacacataattcatccctaatagtcttattacgttttcttccccttatttgtcctctgaagtctacaacttctgatcttttatattttacctcctgaataagctatcacgtatatctgaatctttatgattctcaattactaaattctttcataaagggttgtttttttctttttatctgctcaggtgattgagaagttctatgatatcccgatagcttcactctgtgagtcccttgaaatgagtttgcat

SEQ ID NO: 60964 - DNA, 935 bp, Arabidopsis thaliana landsberg
caaaaggacttctttttaaaggtgaatttctctatggaagctgtcttatatgttcctttttcaggatctgatcttgtgatttcgctttgtttctttgtatgtgatgatttacttggttttcccccatttgtatggcttgcaattgtttgtttcagcttttcgagacgagctgggtttcggatcctgtgagcttcagagacgcttactggtttatcaacaaggctttccctttgaatcaagctttgattgagaaaggagtgaaaagattttgattttgatcagatacacaaagtgttgttgttgtcgttgttgtagtggaagattctgactgttgacagtatctcgaaatggaaacgcttattgtagctgtggaacttagggatcaatattatgggaagaaatctcttggacatgatcgttttagatcagctccttccaaaagttttaggcagataaattgcagaacttttcaatctggtgtgggtttgcttccaagacctaagaggacttcttcaacacctttaaccaaaggagctctttctcaagttcagtctcctcgttctcctaagtctgttttaccggtttttcatcatccatctgttgacagtagtaaaaccagtcccattccaattgctaattgcagaggttctcagatccgtaggtgttctagtgagtttgttgacaaaaggagaagcctttcttactctgagctatgggcaggacctacttactctaactcgcctccacctgcttctgtgccgattcctaagttttctctccagcaaaagaggacggtatctttgacctttcctgctcctgactctgctgttgatattcgtgaagttgctaagtctgcaccagtttctccaacctcatctggtgacaacccttttcgtagtactgtctctgccactatgacactgcgtcgcatgctc

SEQ ID NO: 60965 - DNA, 1626 bp, Arabidopsis thaliana landsberg
tgactaaaacattctctacctagaaaacaccaactgcttctctctatgtataccatataagagccacacactatcttttcacgtttactatcatattttgtccccactcttatccaatctaaatatatataagcaacaacaccttcatcgatctatctgacacatagtttacacttctagtagttttagataaccccgttttctttgttttgcagatcataagggaatgaattcagtatcagctgcagaaaggctaaagagttttggagatgctggtccaatatgtaacaaaagcattatatttccaagtaaagttgttacattagctaacagcttcgagaagaaagaccgttcctggtattcaaactttttatgatatatacatggtactgcagacaagtttagcttaagctaatgagttttttttttaaatctattgcaggtatgtcaaatctcaaatccctactgatctgtctattcaagtcaacgatattaccttcaaagcacacaaggtagtctgtttatagcaatagagaaaattgtgttagcttgtgagtctagtgtttgcaattctagacaactaagatgtgcaaaagctcagtatggatagactaacttggacttttacgcatgtttttgccttgaacagtttcctttgatctccaaatgtggttacataagctctattgagctaaaaccttcaacttctgagaatggatatcatctcaagctggaaaacttcccaggtggagcaaaaacaaaagagaccattctgaaattttgctacaatctcccactggacttgaatcctctcaatgtagctccactgaggtgtgcatcagaatacttgtacatgactgaagagtttgaagccgggaatttaatctccaagacagaagctttcatcacttttgtagtacttgcctcatggagagatacactcactgttctgagatcctgcacaaacttatctccgtgggccgaaaacctccaaatcgtaaggagatgctgtgacttgcttgcttggaaagcctgcaatgataacaacataccagaagatgttgtagatagaaatgaaagatgcttatacaatgacatagccacccttgacattgatcacttcatgagggttataacaactatgaaagcaagacatgccaagccacagattacaggtaaaatcatcatgaagtatgcagataactttttgccggtaatcaatgatgatttggaaggtataaaaggttacggtttaggcaagaatgagttgcagttcagtgtgaacagaggaagaatggaggaaagcaacagtttaggatgtcaagaacataaagaaactattgaaagtttagtcagtgtacttcctccacaatcgggagcagtctcatgtcactttctcttaaggatgctgaaaacatcaattgtttactctgcatcactagctttaatatctgatcttgagaaacgggtcggcatggctttggaagatgctaatgtatgtgacctcctaattcctaacttcaaaaatgaagaacagcaagccagagcccggtgagaaaaatttactctttaacaatagataaatcgactaaagaagtctttatttgataactttgatttaggttt

SEQ ID NO: 60966 - DNA, 423 bp, Arabidopsis thaliana landsberg
  unsure (1)..(423): unsure at all n locations
ccggcagacgcgacctatggtggctgtattgactctctgaacacacgataagcatatcgagggtgggacgcagggcatcagagcgcctgatgtggcggtctcgctgctgacacacgaacgaaacagaagctggaacttgggctctgctgacgccggttaccacctgaaaaagagagcnnnnnnnnnnnnnnnnnnaacaacccaccgctggaccccgacgcttcattgtatggaagctgacaattatatgcaaaaaaaaaagagcgctcgaagatcctttcatctcaactacgaaggcccgcgctcaaagggactaatacggaccaacctggatgttggtggacacatgactcttggatcatgacatcgaccgtcaatggaggcggcaatacctacatatcaggaataacaataccatatttc

SEQ ID NO: 60967 - DNA, 571 bp, Arabidopsis thaliana landsberg
  unsure (1)..(571): unsure at all n locations
cataattaccgattatatgcagaaaccacaatttccactgcactgaaagagtctctcccattaatacactgctcattgtcaaaactcactctacgaaaaaacgttattcaagtaatgttggttctgacttttttgtccaaatctttaccacttttttagataagcttttggtaaaagtacccggtacaaatagcacaacgagtaaaatattttaaataaaatctaaaagtcactgatttcgaatggtatttagaagaaaatcatacataatattttaatcctcaatatgataaagatgtacatgtctagaactagaaaatttatttttaatttaaaaaaaaaaattagagaaggaatcattctccggtacaaacattatcaaatttcattggaatgttaaaaagaactaatactatcttaatattgtttcattctattagatatactttatatcttacattttctatataaatttaaacgcctttaatattttgcgatcattctttatcnttatatcatgctttaactaaaatattaaattattttgtaagtaaaacaaagtctttaatat

SEQ ID NO: 60968 - DNA, 422 bp, Arabidopsis thaliana landsberg
  unsure (1)..(422): unsure at all n locations
atccttttttcntcttacatctcgttccccaaaagaaaacacaatcaaaattagagagacaagaacggaaaaccgacaaaaagagatataanccggagaaagcttacgtcagcaaaacgttgatgaaatcagcaggacatcgagaagtagagccaagtttacaaagtatagagacaacaagatcgtctggaattgaatctagcatatcggctccggttgtgttttccggtaccggagaaacagaggaaggaacaacaacacatcgtcggcgttttcttcccggagtaaagtcacaggagaagactctctnagtttttcttgagggtaacataatcttcttctttgtctttgagaggattacacagactctctcttatctctctgtgtctatctttttaatctctctgggcttataatataca

SEQ ID NO: 60969 - DNA, 183 bp, Arabidopsis thaliana landsberg
tggacaatacgggagacgggcctcttacatgcaaaaatatacactgtcccatcaagaatccgccagatacgtactattgagtgtgaatgtatgggcggagacggctactataccatgaataataatgtaccggattattgcgatcgaatacgagacccgagagagatcatagaatataaaatt

SEQ ID NO: 60970 - DNA, 470 bp, Arabidopsis thaliana landsberg
  unsure (1)..(470): unsure at all n locations
nnnnnnnnnnnnnnnnnnnnnnnnnnnnnnnnnnnnnnnnnnnnnnnnnnnnnnnnnnnnnnnnnnnnnnnnnnnnnnnnnnnnnnnnnnnnnnnnnnnnnnnnnnnnnnnnnnnnnnnnnnnnnnnnnnnnnnnnnnnnnnnnnnnnnnnnnnnnnnnnnnnnnnnnnnnnnnnnnnnnnnnnnnnnnnnnnnnnnnnnnnnnnnnnnnnnnnnnnnnnnnnnnnnnnnnnnnnnnnnnnnnnnnnnnnnnnnnnnnnnnnnnnnnnnnnnnnnnnnnnnnnnnnnnnnnnnnnnnnnnnnnnnnnnnnnnnnnnnnnnnnnnnnnnnnnnnnnnnnnnnnccccngnancccctttanaattttncaattttggaaatttaanaangggncccnnccccccaaaaccccncccaaaaaaaaccccctttttttttttttcccccccccccctttttttgggggggggg

SEQ ID NO: 60971 - DNA, 568 bp, Arabidopsis thaliana landsberg
cagtactcatatcattattcttgcctaattctctgcattggaaagcaatcttgtgctcaattactgcttttttcaatgaacttgcacagatgatctcatatctttttcaaaaatctgttttttttagtattaatccaggtgtgtcagatacctactaaatcaaacttggattctttgtctatctttaattattacattaatttcgtaatcacatgtctacaaatatcgtacgtctatatgtacacaaatgtacatgcacagtgcacacatacatagacgtaggtgtacgtagtggcacgtgggtatcctagtctagatacttctatgaaaatgttttttcctttgtctttatatgttataatttaaattttgatgcttttcgaaatattatactatatataattaacaaaaaaaactaaaaactacaaatgtattacaatctagaatgctgcataagttcactattaattacgtttttggcttgtaccatgtttgaaacgacgtgacatagttttgttttaacctcaagcaaacaagccatgaaaataaaattgggtgatagtttcct

SEQ ID NO: 60972 - DNA, 560 bp, Arabidopsis thaliana landsberg
tatttttcacttaatttaatatcatttccaagcgttagaaaaaaaaaaaatatccattcctaatttttttgttacaatatagaattgtgattttagtctattccatctaactttgattgtttataggtcactcagatttcgaagtttaagcactagtacagttcactaggatacaaatcctagaaaagtagtatatttcggtggtatgtatttttattaaattaattgataaactgtttattttagtaagtttttgttgaaaaaaaaatctagacatgtgtattgtgtatacggtttcagaactctcatggatgttctttgtgtaactagtctcccatcacaatccacattataatttttagtcaccaactagtcaaggctagtggttacaattattatcattaacgtatatttaattgaaatatggaggaacacgaattgcttggtgtaaaatattggcggctatctataatatataacttgcttgcaacataatccttgattacagaaatcgaaagtaagttaaaaaaaaaaaagagaaaagggctggcttatattta

SEQ ID NO: 60973 - DNA, 297 bp, Arabidopsis thaliana landsberg
agccaactctccaaactatcacaaaaatttatagttttcacatctttttaccattgattccttttgcatttaaggatcattataacaccaatcacaaattgttttaatgaaaaaaacagtttatgtcacaagttcccctcttcatagaccacaatgcattgaaacatatggattcactagctaaaagtctcatcatcatatgtctctctattggtttcaatatccatttataatcccaagaaatttatttaccccgatttgggaactaaatcattcatcaactgtcataagttgatg

SEQ ID NO: 60974 - DNA, 1419 bp, Arabidopsis thaliana landsberg
ggactgttagactcattttaggaggaaacttttttttttttctcttttgttaactaatatgttagtgtagtatagttatacgcttaagatgttcctgtttgatcgtgaggaaaagtgttagtgaagtaaaatttcatatcggaagttggaactgttagggtcaatctattcattatatattggttttaagttgaaagtccatgttaaatctaaatttgttacagtatcaaaatcacccgattgttagactacttcgtaaatgttgtttctatatatgcttactcttcatatgttcatgcacgagcatcttacgatgtgagattttacttcactaacacttcccttcacactaagacataaacatataaagagtgagcatatatggaaaaaagatccacgggttagcctaaaaatcgagtgtttctgatatcatgatcttttaccaggattatccatgatctgctttaacaaatgagtgtcaccaaattattcttaacatttgaatatccaggattgaaggtttaaattttttaaattaaggattattgttgattttgccattttgtaaccccaaatcttttacatttgccattttgcttaaactaatttagatttaccattttttgccatttgagaaatgttttataaaatataacttaataaaaatattataatctgaaaaaaatggaaccaaataaaaccaaacataatatgttaaattgtttttataagaaaatagcaaatctaaaatattttcggcaaaatggtaaaatctaaaaatgccaccaaaaagagtcgttatctagtaattgattatgaaatttaatattatgacaagaagtttttttttggaaaaatacttttatgtcaaaacttgtgcttgttcacgaaagtgtcgatgaaatttctcaaagaagtgaataacagtagtatacacatgttggtttggttctcttaatgatgacccatcccccacccatgaacgtttagggtgtgtggtctcctctccctctcttccactatcatatatcattaacaaaagcgttaatttctataatttaaaataagacatattcccttattaaaaaaataaaaaaaatagacatatggtcagtggtcacatccatctttcattcgttaccatcgttttcattagcttgacctgagtagacctcttttgctaagttattacactcttttggttaaaagttataaccctcttttcattgaatgtgtatcattatctttatcttgagagtgattttacacatgaaaacgaaaaatacaagtacaacgtatttatatatgctatcaacaacatgcattatggagctttaaatctcgatggtaatgtaccgataacactattacaaaccattaaaaaaaacatatgtatgaactaaatataaattaatgtta

SEQ ID NO: 60975 - DNA, 1149 bp, Arabidopsis thaliana landsberg
aaagcggctttgataattagcttttgattttaacttatggagcgaaatggatcagttccctcaatttatgcgactaggtagaggcattgattgatccatacattgattttatgaagtggttgagtaaaacaatttagtgttcacttatctgtgtgcagcttacttttttgtctcagtgttcatcaatctcttaataatggctacctccctttggcttttaggattgacatacgagtcaatttctgctgttgtcttgttttatcttcttgttctggtaatatagatctcttatctcgaaatagatcttcatatgtttcttgtctctatgttttctcctaaatccagcttctatgttatccactgaagtgaatcttagactcccatctgtgtaacgacatgttgcagctgatttaaaactatatattcacgaaacagttttccatttcaggacttcgattcagcctacggcccggcatggcactgcattgttgggacaagctttggttcatacgtgactcattccacaggaggattcctatattttcagatcgacaaagtttacgttcttctcttcaagactgccgtggagccgttagatcaaaaatgagataaaacgttgatgatcagagcatcttcaatttaatccttttcttttagaattctctgtcttgtatcccacaatgtaattctgcctaagacaaaatctttgtggctcctattgtgtaattagaagtcatcttctctactgtgaatcgtttcaacttcacaatgcaaaatattgttcttctctttctcaaattctaattttgtttttttcgttcttgtgttgttgttgttgttgacattttcttctcttcaaaagagctttaaacccaaaacctctaataccaattttgctcctccgttttataagcatcaaagaaaaaaagaatcagtgaagaagaaaaaaaaatggatcaatcgcagcgaacagtcgctgcaacgccatcgtcttctcgatcgtaccaattccacccagctcgtgctgcaattatcgatcttttcaatctctacttaggggttggttaatctcttctccaatctcccaatttttttcatcgaattttgtttctctgctgattttgctttctctatcacagagaggaagcc

SEQ ID NO: 60976 - DNA, 550 bp, Arabidopsis thaliana landsberg
tatatttcttgttttataggtggtctgaagtgttgtcatttgtgtgttttttatcagacaaaacaaagtcagctacttacaaacttttgataattcataatcgctgcttatattgcggcaagtttcacgtcattatcaacgtggggatgattcagcagaaaacttagaaaagtgggttgatgcttatcgtcgtggtttctgataggcgtactttacattaatgataatctcttggacttatattaataatttcaaagtcgtacctatgacttgtactatttaataccgtacagatcacagctgtttcttatgctaatgacgtggaagatgtacgggcagctgactatgatccaacacatctgaaattgatacacgtctctttttcttgccaactttgtacttatgtgtatacatagatctctgtacttttttgctgcttcacatgttaatgttaggtacacttttcgtagatcactgtaaaacttattaaactgattttatgttaaacattgtaaattaattagtttgcgtacgatcttttgcataatat

SEQ ID NO: 60977 - DNA, 486 bp, Arabidopsis thaliana landsberg
caggttgcgattcttattcttctctttaaacaaggatttcgaaaccctaatcgatattgaggtcaagattcaaacaactctgcttatctctgaggtaaatttttggaaaccgtaatcgatatcgactcattgcgtaaatgaaacaccaagacagtagaaaacggaatagaaaataatatgaaaccgaaatgaactgctcgtctacatttgactaaggaacctagtttacttaacaaaaccattcactagacaatcatcgctattctatgggtcttaaagacaaaaggctacaaaatgttacccagtttttttacaatacgtcattgttcagcagttggtggtactcgtatactcacaaaaaggtctgatgcctactccagtactccaatacctataagcacagaatggaaaattgatggagcaattatacgtaagattaggagcaacgagagatataattatgattttaaggccgaaaagaaagta

SEQ ID NO: 60978 - DNA, 949 bp, Arabidopsis thaliana landsberg
tatcctgtcagtgcttgatgttccaccagaaaagatggcacgtgtgattggaatgaaaggagcatcgatcctcgccattaaggaagcttgcaagtatgaaccatttcgttctaattacagtaatgcaagcaagacatttcatatctgactgtcatataacacgagtgattttttttgtctaacaacgcggaaattctaattggaggggcaaagggtccacctgataaggttagtcttattccataggggtacacaatctgaacacaattccattatttagctttgaatgagagattggtggaaccgaaagatgtaaataaggtagtgtttatgtggaaacgggttttggtgcagatatttgtgattggaccggtgagagaagtgcgtaaggcggaggctatactgagaggaagaatgatagactattgaaggaaatgagggtcctttgtaatctgtctcattgcccctataaaaaaaattactaaaaccctcttaaaacttggaaactccatggttcagtacggacccgagagagtcgtcccctcttcaataaaagttacatcattaacttccgtttatactgtggaacttaccattccatttcccgcaagggacttcatagtttgatgaaacaaaaagaccatatcaagtatggtttattggcaaatgcaagagtagtttatctgattgaccgttaagattgattttatttactttgcgactcaaattgagagtctgaaacccaacggtcttatattttggtatagtaacgttcaagcctcaattggtttgtaagcctgttctgtttccttttgtgttagtgaaactgatagttcaaagttctaattacgttttataggggttgataatgattcgtacgtaactctacattaggttttcatacgagttagttcagacccgtgtcccctaaatacatattagccttggg

SEQ ID NO: 60979 - DNA, 377 bp, Arabidopsis thaliana landsberg
tgccttcaggttatctgccacatttaaaagtccaactacaatcagtaaaccaatcgaagctaatgtcacccgtctttttttctttgtctctacagcatatacgaccttaacgaggaaaactgtgtgatcacacagattataaaagaatgaaggaaataattttatatatcttcaccactgctgagagtaacctcattctgtcatgaactacatttttaatgtaagcacaaacctggaattggaggaacggttggccaatcagcaaaatcagcatcattcatgcagcagagacaccgacagtacaaagcaccacgaactgcaagatgccatagtgaccgctgatttagctttcccatcattttgtgatagagatacag

SEQ ID NO: 60980 - DNA, 506 bp, Arabidopsis thaliana landsberg
tcatcaagagattagtaagatttgctacgagtgcttgagtatttgcatatatttttcgtctcacttgggaaatatactctatggaagacttattagagtttactattcctgcaatttcacttcaaagctcaaaacgaaaaacaaacagagtaggttgcaatggagactagctaggattgaattgtatatatatattgatagtaattatttttcaatacaacaaaattacatcgtcggttattatgttcttttggttgcaagacttctctgacgcgtaaggcctgccattctcattgttcctccacctgcagaattttccaaaagttatacagatactgtcactattttcaaaaagaattacaacttcatgcataaaactcgtacctcctccattcttgtcagatcttttacggctacgccaaagaagccgcattggagtcccagcaaagcctgcatcagtgcgtagctgcttctccatataccttctgtacgtatccgaaaacagc

SEQ ID NO: 60981 - DNA, 1144 bp, Arabidopsis thaliana landsberg
tgagcagccacagtttcaaggcttccctaataatttcaataatatgggtttctcgttgatttcacctcatgatggtcagattcaaatggacccaaatctcatggagaagtggaccgacttggctttgactcaaagcttgatgatgtcaaagggaaacgatggtactcaattcatgcagaggcaagaacaaccatactataatcgtgaacaggttgtatcgaggtctgcaggtttcaatgttaacccgtttatgggatatcaagtcccgtttaatattcctaattggagattatcgggaaatcaagttgaaaattgggagctttcagggaagaaaacgatatgatttgaattacggagctttattagtttttagggttttatagttttgtttctgttggggtttttaatttttttttgtgtatgatggcttgacatgcaaaagtcaagtgtttttttttgacataacatcatctttttacattttatacaagtttcggttatacgtaaagttttctttaaacactcagaaaataatgtaccacttattttattatattatccttggtttttatatgatcatctcccaaattgtcccaaaaaacaaaatctataagaactagttaagatgaattaattaatcattttactttccgtgtcgagttttaattgggatggtaagacattgacaaccctaaccactagactataaatcttgcaactgagtaatttatttttgtaaaagcttttttaaaagaaaatatcttttttaatctttgttgattattcaattacttgatagcttttgttcattgttttaaaagctaattaataatttgtacctttttgttgattgaattccaaaattctttggttataccaaaaaaacaaaatacgtatagtgtctactgtcctacagactatctatagcgtgtctagaaaaaggaaaaaagaaaagaaaaaattaaggactataaagtttaattagttgcactgttctcaaacattgtccgttgttataacttcaagtggttgttgaaagaatagtttggttgattgagacgaacaacgaataatgccacattgtgatctatacattattcaaacattacacgacaaatattggatatttaagttagagatggcc

SEQ ID NO: 60982 - DNA, 114 bp, Arabidopsis thaliana landsberg
  unsure (1)..(114): unsure at all n locations
aaagacacaaaaagagacactcgtgcgcaaaattactcaaacaactattgctctaacaaaaatagncatttatcgccgggcgaaagacaacacaggggggggtagagaaaaagg

SEQ ID NO: 60983 - DNA, 1800 bp, Arabidopsis thaliana landsberg
ggttttacaataagtttggctttgatgatttgagcgcaatggtcaagagacatctggatacaatcaaacaaataaagcgttatcaatccaccattcatctcctctagtccttcaaaaggcttaagagccattaaccccatttagaattcttcagatcggagatccatgtgttgttataagatttcagaaatctgcaataagaaagcacatttgaagtcattaacctaagataaaaacagcagaatgtttcttgctttttctttgattgattggttctactgtatacattgattggcatctcagcgatgagtatgccactgctttcttcgaggcttttgagagtcgttacttcacctccaacaaccatgtttatgactattccaccttaagagaaaagtctcaaatgttaagtgacattgtttgatgaacaaaaagagtttgttttgaaagaaaaaaaaaaagaacctgaagctaagcaagttgttatacgccttgtatatgtttcctgaaacatggtcattacaagtagtgaataagaggaaggttctggacattttgacttgacaattgcagattgattaagaaaaataccaaccaaccttctttgtaggaagctcgtagtttatgagaacgcgtgcggatagagaagattctcctgatgagagtaacggaaggcaaacatcggtcacaactaccaaatgagatgtcttttcttcttttccgttttcactctcttccaaaccttcttctaccacagagttaagttgctggttccagttgattgttgcttgcctgaatttctctataaccatagctcgttctctatctgctagatcgctgtactgtagacacaaaagacgttgaacataaacataacctagtgggaagaacatgtaagttaataccatgatgaacaagaaagtggtacaacaagaacaataacaaacggatataaaaaaccgatgatatcaatcaaacaatgaaagacaatgaactcaaatcatgatgaaccaagcaagtgaatcaacaagaagggtcttttcaaatcaaataccaaagagaagactaagaagaaacatgcctcagctatgaaagttaaagagaagaagagagagagataccaaagcggctaaggaaatgtaaggaagagtggataaggaagaacagacggcgtcaagttcgtcacgagagctgcaacagactacaatcggaagccatggacgacgacctagaacgcctaataattccactacagtctcctgtgcccacatccaaagtttcgaaatttgcgattcagaatctcagtcttgatgagaaattacaaggaatattgatacaatttacttaccattttgaattggggacgatccacggcgaggtagaaatgcaattgttgactgcaaaccaaaaaaacaaattgggtttttagggtttttgttagaaggtatgagataatccttataaactcaaaattaaaacctggaacgagagggagattgaaatggtagagatggagcttccatggagtccataatccgtctttctcaaaattgtccaattcgccggagaagttacgctccgataaccaggtcacggacttatacgcagtcgtttccagtcttttgagatttattactctagcaacgtcgtcgtttggttatatgtaagtatcagatctaaacaacatcgttctggttcatattttacataatttattttttggtcaaagacatttatacataaaaaatgattaaacaaatgttcggttaaggacatttacattattcaaataatggatgt

SEQ ID NO: 60984 - DNA, 1950 bp, Arabidopsis thaliana landsberg
ggttgttagctgccgaaaaatgattaaatcactcttttttaccaaaacatattacattggatctatggcgtgtaattgataaattctattaaatttcaaagaaacaaggatctttaagacataagaaaaacaattgtaaagaaataaaaataaacgataataagtttatatcataaatttatttattttacattgaaatgaaaaccatgaaataaaataaatttctctgaaatattacttattatggaaggagaagatattttagttcacattttatatttgggtactgtatcaaagttatacccgaatcgggtttggctcggctcgttgttcaagaaccataaccgtaaatgaagacaaaatagttttatggatagttaaattaggtgctttctaaaaatgatcaagcatcgaacatctattatggtaagacctaattattaaatacatgtgcaatacagtgctaccgtcccactaaatcaaggaataatacagagaattttgttaactacaagacaaaataacccagctctgaccaccacctttctttctttttttctttcgagacccaaaagagtggtgaccggatatttatttaatattttgtcatttccccacagttttatttaaatttataaaataaaatattggagtaggtccatcaatttagttattggattttgcgaggtggtggatcaagtcttaatgtgtagtgactgttcattgaaaacataattatatgccaatgttaacattatgtattaactgatttaaagtttactaaaaccacctttataataaataaaatttcacttctagaaataaagattgttttcaccttataggttaaagatattgagttcaatttacgccaatgtataaatcctctacataaataagaagatggaaactctttgacaaaatgggcttataaataagaaatgatctagtttttgtattccctcttgtttaatatttttacccacaaattaagaaagcataagatattcatttaattgttctctttacataaaaaacattattaattaaactgaattcaactaatataaaaaatgattgtaaaatataattggtataaaaatgcatttaatttgtataaaaacttgaaagcatcacttaaaatgaaactttttgtttttgctaaaacatcacttaaaatgatacgggaagagtataagttagaacaagagttaatatatggacaataaacaaacagaaagggataaatccgtccaaagaacaacacccatagatttgtagtaatatataaaaaaaactcatagctcccaaaaaaagaactgtcttttattctcatctctttcacaaaccccccaatctccaacaagaagacctctctttcataaaaccctcacacgtgtgaccgattcatcaccatgagctcatccccggtcgtgaaaggcctaaccaatgaagagcagaaaaccctcgaaccggttatcaaaacgtaccaccagttcgaaccagacccaaccacgtgcacttctctcataacccaacgcatccacgctccggcctccgtggtttggcctcttatccgccgcttcgacaaccccgaacgctacaaacactttgtaaaaagctgccgtctcatctccggtgatggtgacgtcggaagcgtcagagaagtgaccgtaatctccggcctcccagcctcaaccagtaccgagcggcttgagttcgtcgatgacgaccaccgtgttctaagcttcagggtcgtcggcggagagcaccgactcaagaactacaaatcagtgacgtcggtcaatgagttcttgaatcaagattccggcaaggtttacacggtggttcttgaatcttacaccgttgatattcccgagggaaacacagaggaagacactaaaatgtttgtggacactgtcgtcaaactcaaccttcagaaactcggag

SEQ ID NO: 60985 - DNA, 130 bp, Arabidopsis thaliana landsberg
aactgcaccagatcgggcccgcccatgaataatagctccagctaggctctctacggcgagggggtatcatatggtagaatactgcatccttcgtcgactgcaaatctcgaaccactagcttgtgcctttc

SEQ ID NO: 60986 - DNA, 745 bp, Arabidopsis thaliana landsberg
cttctctatattcacctcttaaatgagaaaacaaatgaatgtgtttagagatttacctgtggaacccgaatgatttcgcaagggaccttcatggatttcctcgcttccaccgcaccttgatagttcatccaatcattcattccatagataaacgttgttggcactttccactctgatgcactgcacacaaaagaggagtcatcgagtgtgagtatgcagaaactttatcagcaatgtttttggtggacatacctttgtaagaggggcttcctagcaaatgctccaaatgagaagatgtatttcaagcataactctccactagcctttgcagccaaagtatggtacacataatctacattgcaaaacgaaccatcactatcagcgattgcattatcactctccataacttctatggaacttaaagaaacaattacttaccggttagcaatttggcttcctcttctgttagcccagttccctccgaatgtgcaccaaatcttgcagttgtataccgatttacaagacctggaccccaaggacctaatcctctgcacacaaagcacatttacagaaatatagtgaatatattactcctgccaactaatttcatcgaataagtgttcccatgctcaattgagtgccataaatttgtatcaacgaaatgagtatctatctaatcaacctattggtgaatgggaaatgattatatgagcatacctaaccagcttctgaggagtgaaatttg

SEQ ID NO: 60987 - DNA, 518 bp, Arabidopsis thaliana landsberg
atgttcttgatatctatttagaatcgggttgttctaatgcctctctctccaatgacatattgcttagaacacccaagcaaaaagctgctgcttatgccaatcgagccatatgaacctaatcctgcttgctatgtctgttccgaggtatacacatcattgttgtttagccttctttcataagctttcttgtattaccagtcttctgattttctttttggtttttatcaacagaccccattagtactcgagatcaatactcggaaatcaaaactaccggatctagttgatagaattgtgaaaaccaaccttggaatgaacctaccgttgattatgcacgggaattcccttctgtatgaagttggcgatgatcttgatgatattatggttgcaaactacaacgctaatcttgaaaagggttggtcttgattgttctaccatttcaattaaaacacaggtttagatatcgcaatttctcacatgcttgtaatcttgttcagtatttatcagaacttcctttt

SEQ ID NO: 60988 - DNA, 1097 bp, Arabidopsis thaliana landsberg
  unsure (1)..(1097): unsure at all n locations
tcatgtcaacgttcgttaatcagagcatgcatacatcgtaggggaaacaatagagaacctttaacacaagacgagaacagtcacaagattgtatcattaaagatgtactgtttaggcgattaattctcttttgaacatgcgccagactgttcctgcatgtagaagaacacgagaaaagcaagttggatctactatcttgtttcatcctctacttcacacaaaacaaagtttgattgatgtataagccccattgagatgatgtcttttgttgggtggcgtcgactgatcatgatatgaatagctagaagaggaacgtttgtttttaaacaaaactcttatttctaaaactgcaattttgcaattattgtattaggaatgaagactttgattaactcattaactcattaacttctcattaggaatgaagactttgatgaactcatgttatattcaaatgtaccatgcactgttgttgcgcttatcaaataacttaaggaggtgttagtagtttaatttgctgtggttataaaaactattcctaaagaagtttcttggaatgatcaccattggaggtcacaaattgttggatgcttaaaatgtagtactactaattttgtatattttggtgcttaccctatggccttttttcataaaagagtaaatgtgtacgggtgagtctcgtgttgcgtacttcagatatttccagttttcatcaatttgacaatttaagcatctgtaatcttactttatacacaaacataaacacttgtgtttttcccattctccaaccaaatagtcacatgtatgactctttaaattaatactacatcctgtactatacttgggattgtaacagaatttaataggtaaacaagtacgccacgtgacgaacaactgcaccaggtnnnnnnnnnnnnnnnnnnttaactcataaaagcatttgacctaactgactttttttaaagtccttcatggtcaaaaagtccaaacatcccatgtgaaacgtcttctgagttctgaccaaacccgttatcttcgaaacctattatttcccccaaatggacaaattctttatcattcaattgtcgaaatgtcgg

SEQ ID NO: 60989 - DNA, 460 bp, Arabidopsis thaliana landsberg
  unsure (1)..(460): unsure at all n locations
gtccttttgttttcttctaaatccacgtatggtccatccgatatgttatatcttggagtttaattaatgatctttccttaacattgatgtgccaacatggagaagaaacaacgagagagaaatatacgtgttataatgatgatgatcgtaatgaaaatcctctttttttttttttttggacattcaaacatgagaattatgataataaaatggatatgattgtattcatacaccatattgtcttgagtcttgacaaacatgaattatgtaacttatgatactttcgacggattttaaggttcttgcgttttctaatttttgtttttgtaaaaaccgtgtttatatttctaaacattttacttctgcatacgtatttacgattccataggaccatcatattttttagtnttattcttatttctaatttctcccattcgcgattttgtttaaatatatataa

SEQ ID NO: 60990 - DNA, 508 bp, Arabidopsis thaliana landsberg
cacatgtatttagagggagggttttacctaattaaaaaattaaagtttaaaacaaaaaaaaactttgcctaagacaaaattgtaacttgggccccttaaaattgtaacaaaaacaatgacccgaaataaaataaaaatataaccaaacccaacagaaataaaaaacaataattattcaataaaatctttttaaaaagcacctcaaaggaaatttgtaaaaaataaaaataaagagtgaaaacaaatctaaataaaaattatttctgttacattcttctttacttcgttaataaatgaagctaagtaaaaaagaaaatttattttagttttatatatcaaatatgcagtatgtaataaaacataagtcactcaaaagaaaaaaaaaataaaaaaaccttaaacacattttattttttttcattataaaatcatgaaaaattgtaaggaaatttgaaaaaatatatatatatatatattatatatccttttaattgggaaacatttgggg

SEQ ID NO: 60991 - DNA, 565 bp, Arabidopsis thaliana landsberg
  unsure (1)..(565): unsure at all n locations
cgatgacaancctatataaggtaagagtaaatataaatagacgttttctttttactttcttactttctttattacgtttcataataatactgtgtaaancagtaagagttgggatactttttccgttttacatttctgcccttcgaattagttaccgcatacaannagcataagagacaagtagacatagtcgtaccaaaaaagaagaaaatagtgcaaaaatatcatatagttttctggtacgcctcatcaattccacccccgtacaccataattatatagaatttcaatatcgaaatgtcgacagcaacaaaattcaacatgtcgaataatattgttttaaatattccattttactagaagatgaaaaaaagagagaagaaagtaaccttttgtctttgtcaccttgacttaaacagtaatacaaaccccacacgtaaattattcaagttcaaatcgtagttaatgtttatatttgagaattgcaaatggtttaaacgaaaaccaaactacgaattacacatttgagaggacttgtctagaaataaatgagaaagaagaatat

SEQ ID NO: 60992 - DNA, 995 bp, Arabidopsis thaliana landsberg
tgagtgaagccattgtgaaacataaccaaggttttgacttaaacagtataaatctgaagggttacatggtgagcctgtcctcttattgatccccctatgattcattttctaaaaggttataaaactctaaaacaatgttgatgaatgtgtggatgcaggtaggaaatgggctgatggacgatttccatgacaggcttggtcttttccaatatatttggtcgttgggttttatatctgaccaaacatacagcttactgcaacttcaatgcggtttcgaatcgtttattcactcctccaaacagtgtaacaagattctggagatagcggacaaagaaataggtaacatagaccaatacagtgtcttcaccccagcttgtgttgccaatgcttcccagtcaaatatgttgctaaagaaaagacctgtaagtggccttaaaacttctcttttcaatgttacactctttagtgtcctaatttctctgtttattttacttagatgactagccgcgtgagcgaacagtatgatccttgtacggagaaacacactacagtttatttcaatcttccagaggttcaaaaagccctccatgtcccaccaggacttgcaccatcaaaatgggatacttgcaggtaaaattgccttgcaatatcttagaaacttggttttggaggaaatgagcctatttaagtattgtaacaattctgatccggacagctttggttatgcagtgatgtcgtgagtgaacactggaatgactctccttcctcggttctaaacatttaccacgagcttatagctgctgggcttcgtatctgggttttcaggtctctttctctaaatatatccactgaaagcactttaacgatatcttttcttcaagtgttttggcgttttggtggtaaaaacaaaaggttttgttctttggtaacagtggggacgcagatgcagttgtaccagtcacatcaacccggtacagtatcgatgcactgaacct

SEQ ID NO: 60993 - DNA, 436 bp, Arabidopsis thaliana landsberg
gtatgttcaactcgggttttgtgaatgtttaagccattgttcccaatttctagacctttaggggtatgagcaataattggtatctcaaaatggatcttacattctgtccgtcttggaagattctaattgcattttgttgttaattcccttgaacgatctgtttctaacgtcgttcctcatcccttgcattatctgatacagttaatctagaagcggtgttgagaagatgaccattacattacatattttttgtcagaacgatcacctcgttgttcaagggaagactattcttaccaaaatccctgacaacattattctaacttcggttaccggtaatggattcctttccggttcatttataggcgcgatgtttgtacaaagcatgagtcttcatgtgttccccatcggtgtttcggagtaagcaccttaatatacc

SEQ ID NO: 60994 - DNA, 1261 bp, Arabidopsis thaliana landsberg
tcgaagaacaaatcaaatcactgcataatcttataacaagaaacaatgaatgttctctagcctgaagtttatgtaatatgccaatagattcacaagattgttctctagcctataccatgttatcttcctctgcgcaatcaaccacgacatatgcgatgatgttatcgacaagttcttgaagatccaacaccatcttcagtatcgatcttccaccagtcaacaccatcaccaatctccacaggttccacctctgttccattctcaatctcatcatcataatcaaactcgtaatcccaaacaccgcaagaaccacctctctctttctccaaagcaggatcataagtccactccaacttcttcaacacatctctatccttccacttccccacaactttctcaacttccttcttcgccttccccatcgtcacttccttccacgaatacgcaacatccgctactcgcttcagcgcaccttcgttcgaatctccaatcacaaccgtcctcaaacacctctccttagcttcccacaaaatccccgcaaaatcagaatcatcagacactaaaacaacacactccacttctctcttatccatcacttcaaccaaatgttccttcaacgccttatcagcagcatctggcttatcactaaccatcttcacccaaaaaccagctcgtttcagctcatcagctaaaccgtaaccttccttcggagtcaaaacattcctcgccgctcttttatacttctcaatcttcatcgaatacttagccacaagtctcactcttcgatgtcctttcgaagattcaatctgtctcatacgtttctgattctctgtctcatgaatctgcttgaaatgattaattagcttctcgttagtgtagaatctccggtcacaaacaccgcagaagtaaggctccggtggtttaactaaacctttgttctctaatttgtttagcaatttcctatctttcctctgttctcgaacttctaaaggaacgtagctaaaggcgtgacgattcgcatacgccatcattagcttcacggttccgaaagacgacgcggcggttcgaagcttgacggcggcgtcgtaaggcgggaaagaggctggtggtttgttgtctagatcccaccaaacccctactcggattttgggtttagggtttatcgagctagagctaaagctaaaacctttgattgaattgagagatgtggtttgggttttaggtctccaactttttaggacaaatcttgaaaacatcgccg

SEQ ID NO: 60995 - DNA, 441 bp, Arabidopsis thaliana landsberg
aagtgacattttatggtttaagtctatagatcgaactctggattcgtttggtcagaagtaaaagaactcctgattttttgtccaggttgattttgtaatggaaattctttccaagttggtgaggaagcaggtgagtaatttaaagatcaaacacaaggatcagcattgagacttattttctattttgtgtggttatgactgaatgtcttgccgtgtcttttggatgcagatctggaggctgccaaaattgtggcctggcttcttaaaatgtgtgtctcagacaaagccgcattctttccctgttttattggaggtacaagaaaacgttgtggaagaatatacgagtttagtgtattacccaaaaatccaaataactcttttgtgttgttttgcagttaccaatgcctcaacttgaaagtatcatgaagaagctttctgatc

SEQ ID NO: 60996 - DNA, 1932 bp, Arabidopsis thaliana landsberg
tgctaagaaacataggaaatatttaatattaatcgaaacccaacttttttttcaataaatgtttagcgttaacatcatagtttaacaaacattcttttttataactcaaagttttagagtttagtcattaaaccaagatgtagagattttataaagattgaggtagggaggagaagaaagttaagaggctcatggatggtggcttgcagagatttgggagtttttgagagagttgatgacgtggcaacttgagaacacatttgttaaaaggctgaggtgggtagtgtgagaggcctcaaataactttttttttattagtaagagattctgaaaagaggttaccgatatctaatgaattgctatcgaatgttgaaatctcatgaaatttggctacactacatacatacgactataaggcaagtaacaaagactgctagggactgacaaagtgacatgtgacacttttatgcttagcctccttttcctttctaccaaagttgaacatcaagcacattatttccatctcaaaaccggcccagagaatataatatgacacgatgcaacaacagaacttggccaggggaattatacaccccctcctacataccacaagacaggaattatacaccccctcccacataccacaatacaacacacattcagagaccacgagatggtgaatttacaagaaatcaacatggaacaagataccatatccatataaatcattgactgatgtttctgagttacatggaagatacaagagactatttctcttaggccattaaattgttggtaggaatatgtgcttcagtatgagttccctagttcacttaatcactagtggaaagttacagcttacatgaggatttcatctctcaccgggaagtttctctagacccggtgagtcacatgaatatcaacacaatgaaacacatcaacacatatttcagagacctcagatgttgaaattacaagcaatcacaatggaatatggtaccaaatgaatcaattagtttctatcttaagccaatatcaataactttcacattcttcacatacaaattcacaacattcttcacatacaaagactctaattttcagttactaaaataccaaaacactaaagaaaattaggtttcaatctccaaaaaacatcatcatctccagaaccaaggaaaaaaaaaacattctaaatttgagccaaaaaaaacaatcagacaaagcacaataacacacaaatcaaatgttttagtaatcaaaatgaagaaaaacattgttacataccacaaacataaaaattccagaacttattacacacttactacataggtttctccacaaattacatcaagtttaggaaaaaaaactgaaatcttaaagaggaaacttaaccggatttagttgatatcggtgtcgtcgaaatcatcatcgaatttgttgaagaaatcggcgtcggcgagcttgttatctgagacaagtcctccttcgttgagtatctccatggcttcgaggtcatcaacgtccatggccatcgaagaacctgcatcatccatctccgataacatatccagctgcatcggcctcatttctctcttcgtctcttcttcgttttcttcttcgggaaagatctaaaatgttacagtgactgactgtcgaagttttgatgttgaggtcattttcttttaggcctaaatgttgtggcccatctttatctttttaggcccaattgatgtggcccatgttaattttaatcgttcatttttcgtagtgatttttagctgaatctgtggattctttttttttttttaagatacatcagttgaggaattggctgaaaagtggaactagaggaatttttaaaaaaggttcggatttttttttttattaatacgatgtttatatcctctattaaacaaatttgattaatgc

SEQ ID NO: 60997 - DNA, 1009 bp, Arabidopsis thaliana landsberg
tagggatacccttttagatccggaccataagaaaatattttaaacattttaaaatattatgtattagagattgggcacgggatatgtgaaaccaaggcaaaaataaatttgtggatgattaggatgtttcattctaaatatttttcagtggtatttactcagatcatatctaaccatgcgatttgaaagcgaaaaaaaaataatctagacaacacataatggatggtggttatgagtttcgacttataaagatgtgtagatagacaatgagaccatatattttttcacgtatcattttatgtataagtgggttcttaaagaaaaaaaattataagtggattcttaaaaaaggataaccacctcgacgcattcaacaaaataatgccatacttaattcctaaactagcgtgcatagatatagaaacttaaactaattaaaacacattagcaagatttttttcaatgatttaacgaaagaggagtatgagatagaggagaaaagtgataggtggggaagtggtcccagcaccaaaaaaaatgtgtggctgtcaccaattggaatgcaccaaattctttttacgacataaaaacaaaaactgaaagattgttttttttgttttgctttctgataggataactatgacgtggcatgcgtcactagacgcattatcattcgcgcgtccatttcacgtggtacagtcaaattagtcaaacctcccgggagaaacgaatgttcttttacggttttaacttttaacttttaatcttgctgctttggcctattaaactcttcttttctgagcaaaatcacacacgctatgttttatggttacgtaaacgcttttttttattggcttaaaccaaacataacgtgtagtaaatagaaactctccattcacttcttctttttttggttggttaaatgttactaagatttataccaaatcaaaaatattttcttatgttttcggacaaaactcaagccccatttactttttttttttttttt

SEQ ID NO: 60998 - DNA, 404 bp, Arabidopsis thaliana landsberg
tccagcatgctgagttaagcactgatgtcgattatgctctaggccatatcgtgaaggcacgtgtgcgtgtgtttctgtattctcatttatatgcatcaatctgagaatatgccaaagagaaaattaagtgattaccttcctttaagacatagatgctcacccgattgcctcgaatgcattacttttggttgtcttaatccgtggcattgcaaattcttaatgttaaaaattcagtggtgaaaatctgctactacatttttaatatgcattggtattgttttgaacaccggtactgattttatgtacagacttaactctctctaaaaatacttgtctttcctaaagcaaaaaagcaaagaatccgggcctcttacacaatcacaggctttttgcaattttttttt

SEQ ID NO: 60999 - DNA, 799 bp, Arabidopsis thaliana landsberg
tcattaatctctctgcacacaaaaacccaaaaagctggatgtctccattttcaatgaacaattatgagttctttttttaaaaactcattatactttgaagattaatcacaaagatttcgaagctaattcgtcatttcttgttactataatcttttcattgttattaatcactttggcttaagtttctgtatattacgtcgagcttcttcagtcttcatccttgtcttgtcacttgtcagagacagaagattaaagaagaagaggcgtttctctctctctttttgcttcagaaaaaatggggtttttcttgtgttcctcttcttcaatcttcttcaagttcggaatctctataatctttctagtttctttctctggtttaactccttcaggtaagccgaaagattctatctttattcaagcttttctctgttcattaccgtattttactttctagggttttatttcgtcaatgattctgagtgcaactttccttctttgttccccatgttttagttatgtgcatattttaaaattatttgctaggagcttgtgtttattgagttctttaagtttggatcttgcaattgcttgagcttttgggtacatagggaaagagagaagaaagttattttgtatgttaagccgtataattgttttgaaggagcttcttatcctcaaaagagaagatctttttgacattttcatcttcaatgctctgttattatagaaagagagaatctatgagataagaaaacaaaaaaaagcttcagtattttgtgtgctcatggtgttgcttttg

SEQ ID NO: 61000 - DNA, 992 bp, Arabidopsis thaliana landsberg
gaaaaaaaagtatatcaatttctatcatgttagaggattctctatagtaatgcgagaaacaccacatatgtgtaatgtttttgttaaagaagatcttctctatggatagatccaaaatacaatcaatggtaattaggaaagcagttcttgtttatttcgaaatcaatcaagttacatcagttttgggattcggtttcttttagtatattttatagatctatcaagctatcatagaaatcactcttggcctcggttaaaataaaaatatacatgtttcatgcaaccaaaaacctttaatgtattttgacaggatggttttttaagtagtacgcaaccatacttttgctaattaagtcttttattattacattcagtgcagccctatatggctaatgcgcctcataatttttacttaacattagccatgtctcctttttcatggattgaaattcacttttcactttacctgaaagatatttcattaatgatatcttgtcaaatacagcaatattcaaagcatcgagatatggaagttttcaacagttataactctttcttatgatccctctcttgtctcatcaggatccttccacaccactttttatttttttcttattgaacctatctctggtagtttatatatattcaagtttgattttcatcgtggagatttatcaattattggatagaattcctattactatcaactaatacctactcgcaggcccgtgccagccattttgggatggcactagaaagttaatatgatcatttatgctttagctaaagtttggaaaaatggaacaccaaagagacattcaacatttactactatggagagtaaacgctctttactccaaaatcatctttcagcttataattttgctttagttgtacatgaaacctataaaccatgcagatgtatggatctctaaatcgcattctcacggattatgtggtatatttggaaacataacctatatcgatctcta

SEQ ID NO: 61001 - DNA, 533 bp, Arabidopsis thaliana landsberg
gaaggaagaaagggcaggccgccgctggcgctcacggtacagagcctcgctgttgggtgctggacttccctagggccttcctgggcgattgcgcgacgttgtcaggggtggccggtgtcgcggattccgaatctcgccgagatggagtcgttggcattggcgctgggtggctgtgcggcatggatgaaggtatggggggaccgttgcattctcctgggtgtcctctacgtgtagcgcggttgggatccaagtagtgggtacggggttcgaatttggggtgtccggtgataatccgccgtggaggcccaacgatggcgccgtcgcggtgggttcttggccgccgcgtttgctgcgggggagggagacgaccacacggtgccgtcgcgcgtcttgtacaagtgaagaagatggcgctgctccgtccgatccgatctatgcggtctggagtgctcggacgtagcgcttcgattttattaaagcttggccgtgcgatcttgatcgggtggccgaagattggataagcgtggcgtaac

SEQ ID NO: 61002 - DNA, 1076 bp, Arabidopsis thaliana landsberg
tttttaataccaaagtatctttcacatcgttctgtttagtttgatgttctgtttttgggttttgtttagcattggagaagtcattgctaagtttgctcaactctctcgtcaagaaagagcaaagaggtttcttctcttcactttcacacatttctagaatctagaatctttctgcgttgacattacactgaacatattacttcttcgatttttgtctacgtttgaacaggaagttggaaaaccttgaagtaagtagtggttcttggcgctgtttagtctctcttctctactcatctcctaaactatcattgatactaatttttttcataatatcttaggccttgaggaaaactttcatgaaagctaaccacgatatagatatatcaaagtttctagacagaattaggtgtgttatattatatcaagaatatgagattctttctgaactctttctttgtttgttcttgtttagtgttgtgtattactactaatgtgactcgtttttgttatcttttacagtacaccaacagttgaggtatgtacaactactatgatgttaataatgttgatgaagtatctcctaattcgtttcgcgacacgggaactttcaggtgcttagcgaaaaaatcaggtttctgcaaacacaattatcagatatacacacacgactaaggtgcaaatatcttctatttactttcagttaaatgttccttttggttttggtattttaatttgtgagttacatggttttttgagatagctactggaccgatgtagagaatatcgacagcgtagatgatttgcagcaactagaacattcactaagacaatctctggctcaaatctatggtcgtaaggtatgatcttcctcccaaataatcaaataatgagttaaggtctcatttaacaaaacttatgcatcttattacgacttataggcgagcatgccgcaacgtcagcagcaacaacttatgtcctcacaatgcagaaaccaggtaaagattcatcagtttggacattataaagatgttttgagatgtgtataaaaatagagccaaaacattgtgtttatgcag

SEQ ID NO: 61003 - DNA, 1635 bp, Arabidopsis thaliana landsberg
gtgttatgggtttatgtccggaaatggtaataataatcaaaatgaaatcaagatggcttctacattggggatgtctttggaaggaaacgagagaaagcaagagaatgtgaacaataacaataataactcagagaatcctagcaaggtgttctgggggtttccatggcagatgaccggagattccgccggagttgtaccggagattgatcccggaagggaaagctggaatgggatggtttcatcttggaataatggtttactcaacactcctttggtctagcagatcattaataaataaatatataatatattactatatattaaagtttatgtcatcacatgtttgtacaccactttcactaatatgggggatgtttggtttttataatttctagggtttctatctttttttagtttcccaatttttcttgttgagacgaagacctataagagttcttctatgaaaactatagaaaaaagtttcttctttgatgttttaatttgtaatttaatggtgtctagggtggttaattatttgttacatgcaatggatcctacttttccttatgctttttttcttaacgttataatatgattatagttttatgattagaatgataaacataagtgtataaaaaattagtacaaatcatcatcagtagaaaaaagttagtgacatatcaagttatcaacccttatgttggatatatctttgttgatagaaatatatatcaattggcatatggttttaaggaattattttataatacagacaattaaaaaatcaaagtggatattgttgattaggttaacatgttgtccatcaacattccactggttgttgtcagaggccaaaaaaaattggattttgaaatgtgagtggtgagtttcaagatattctgtcatgattgcttcatattttccaggtagatatttggacactattattatattttatttatttggcaaatacaattaggagtatacttaattattaattgatttggatataattggttgataatacgccacaatagaagaaattttataacattttatgaaatctcttgtacagaatcaaatctaacacagagatttgcgcgtgacttaaatgccacttaaatttaacaagtcacacgatgcggtaaattaactatattttattcgttatacatatattttatcgctcgtttgaactattcattctctatagggtccaaaaaaaacataactgctgtaaaaaattgttttataaaaagctgttgtataaaatctccgagtttgaaatatggtaatggtgcaaagtttcaaattttggattgataggttgttgttgcctaccgacaaaagggtcaatattggtacgaggcatgaagccgtatgttttagtttaatattcaatttttaaatcgatttattcaaacaaatgaacaatggttggatacgagtttcgtaggaaatcaaaatccaacttaatttaatttatatatatatatatatatatatatatatatataggaacagttaaatctggcagaaatcagcgaaaatcatatttgtaatttttggtagcatataacaaaataattaaatatttaatttgattgtttgaattaaaattacctattttaatta

SEQ ID NO: 61004 - DNA, 1663 bp, Arabidopsis thaliana landsberg
ccatgtcttgatgactttgaaagtcctcgtcgccttcatcagtaggaccgtgatcatctcctctcgtgcttcgagctcgtttattagtcctcaagattctatcacttccttctccaatgtccatatcaacaacatcttcaaatctactccgcttcccatgtgaggaactcgcagctctgattttgttgtcaagtgcggtttcttttaaccttgcttgagctaattcttgctgacgattatcaacgtgtgcctgtgcagcttgcagctcaagagaaagagcttcggctcttcgatttgcagctatatgagccttacgctcttcatccaacagcttttcaagtgacttcacgttatgagccctctgtgcgttggtttcctttatcaatgacccgatttctttctctcgttcttcaactcttgcttctaagattgtaactttggagacagcctccatctcagacacacgaagtctgtccagttcatcctccaagtcagtcttctgtctctctaagttttcgacttgcctctcagctcgttcgatctgagcaagtctttccatcgccaacctctgactctcacttttctccttttgcgacgtgacagcatcagttcgagctttgtctgccagttcagtagcgcgtttagcttctatttcagctgccttacatctctctttgacttcatcgaagcgttgaaactcagatcgatacttttgttccatacggattttctcttgctccaacttattagcctccttttcatatgctagagcctttttgttggcactgtccaacttatcagtcatttcacttaatgttaatcttagtgatgctaactctacctcaaagctttcaagttttgactcagccacctgcaaaagacacaacacaagctaagatccacattccacaaaggttcaactgtttcagcatatttaacagaatgctaggagtaacaagtaatctacttcgcacaaacgtttacaacataggaagatagacgaggctaacataaatatactatcattttgataacgctcaccttcaaatctgatcttagaaccgttagagattgctctgccttctcaagttttgtagccttctccgtaatttcttcatcctgcaattgattaactattgataatatatactgatgattacaagctcaaattcatcccttaaaaaaatgggacaaagaatgataccttattagctaaagtgatactaaattcctccctaagagcatcttccctcaactgtgtttccttgccagaacgttcttgcactgaagcagccttttgaagagcagatctagcctctcccacagcataatcatacttccttttccattccttggtctcttctgcagcagatttggcttgttctctagctgcagcaaccctagcttcagaagtagtacttcttgtcctaaggacttccatttcagaactaagctgttcttgaacagctttctgcttcaaaacaatctggtcataatttctaatccattctttgatttcttcttttttagattccacggttttaaccaacgtagagcatcgctcgttcagcgaactattctccccctgtagtttagttatgcgctctctgtatatatcttccagcttcttcttgtcattgttggatcatcataacgtttctgg

SEQ ID NO: 61005 - DNA, 414 bp, Arabidopsis thaliana landsberg
gcataacgaataaacagtgagagagatagaaatggcgagcttaactagtaataagcctagaaattttggtgcgtatagtcactacgctactccctgcactcgcacgcaccagattggagctctttttctcgtcgtctctaccttcttcgtcactaggcttttcgatcagtggttctcggaatccaattccgttactccggtgattgatctccgtcgtacttcttcttcttacggaatcaaaactgataacggtattatacggtggccggagcgaggttatgggtctcacctctcgctgaagatctacgtttatgatgagaatgagatcgacggtcttaaagagctgttgtacggtagggatggtaggagttaaagaccacctgatgcttgaaaggacaatggggatcccaaggg

SEQ ID NO: 61006 - DNA, 345 bp, Arabidopsis thaliana landsberg
tgactatgacctcggggtccttgcccgcagcatagaatcctttgccttcccagacaggcatactcacttgttttctatggtttgcggatcaaaacatgtaggcagttcgcgtgccggattggaatatgccatcaaagtactcatgctcgtgatttgaccatacacctgtctgggctatgaggcagtcccgctctatatatccgagacgccatgtacatatctgagcctgacagaagtgttaatatgcgaggcagtggcgaattgatgaaaatgaaatatgggggagggcttggatggatatcctgtggatctggtgtggcttgggtctgattatattgtgtctgg

SEQ ID NO: 61007 - DNA, 529 bp, Arabidopsis thaliana landsberg
tgcgtattttcacactggggttggatgagctagatcgtaacaaggcagcaagaagaggtggatcagagactgccaagagcaggatagattaccaaacttggactattctgagggaaatggggatgcaagttaactctcaaaagaggattggatcagtccccgggatcaaggttggagataaaattcagttcaaagcagcactcagtgtaatcggtcttcattttggcatcatgagtgggattgactacatgtataaaggaaacaaggaagtagctacaagcattgtttcatcagaaggtaatgattacggggatagattcatcaacgatgtgatgatctattgtggtcaaggaggtaatatgaggagcaaggatcataaagcaatcaaagatcagaagcttgttggtggaaatttggctttagctaatagcattaaggaaaagactccggtgcgagtgatccgtggcgaaagacgattggacaacagaggaaagggatatgtgtatgatggtttatacagggtggagaa

SEQ ID NO: 61008 - DNA, 1391 bp, Arabidopsis thaliana landsberg
gctatactttcttgtttataccgatatgagttttcggttttcatgaagcaaatctgttactggttctcttgtgcacttgtttggaccttaacaaaacccttacgtttttacctttttattgcaggctgctcagtttaaagcagttgctagcgtaggagtttcgggtagccaccgcgggcttctccgtgatgaaagagtgtttgagctcattcaacaatggttaggagttgagcccaagaaggctaaacggaagcatttaaggactcacaaagtagttgattctggttaagtccaaagcctagtaaactaaaagatcttgtttgaataagttaaaatgaagaaatcgttattcaaagtgtggttgtaattatttctgctatttttattgtacgttgtgacatatgtatgtgcatgaaattgtagtagaaagaaaagtaatctcatcaaaaattaattgggagaagaataaaaactagtgatcataccttttttgcctttgtttctgagaacaataacaacaaatgttctacacgaaatcatcttctttgcttaaacatgcaaaatcactctcttgatttctgtttcttgagtttgtaaatcatagtaggctttgatactctcacacactttacatacaggtataccattctttcgtagttgtaacgaaagaaaataatttaatgaattaaaaaataataaaaatgtagactttcgtcaaaacgatttgcaaattacacaattctgagaggttccttcatctgcaaatgctactactgattcggtgatggaatcgatcggcgacgacgatgagctccgaagcaaaacagtttctcttccgagaagaatctcgtttacgattcttcttcttcttctgttaatctccttgagtacaagggtctctggttcgttagacaaatctggaagaagagtgattgaagcgagaactgggcaagacttgatttgggttgttcagctatccgatctccatttcagtgtccatcatcctgaaagagccattgatttcaaaaacattgtgggtcctgctctggctcttatcaacccttctctcgtcttaatcaccggtgatctcacaggtttatatctctctcctgaattaaggacttggttcgaaattctcaatctttcattggttcgttagatgagcttcagtgatgttgcttctgggttcttaggttttacttgtgagcttcttatatgcaagtctcaagctttgattgctcgagctcaaaaattgaaactttagctttgggaaccactgtggttatatatttgctatatcagatacttataaactctcatctgtagttgatggctttgtttgtttgaagatttgctggttgattggtttttcttaatgtggttaatcagat

SEQ ID NO: 61009 - DNA, 274 bp, Arabidopsis thaliana landsberg
tgacggacttaggggggtgattggccaccccctttatcgattcggactccattactccatcgatggatggaatcgaatataccctcgaggaatgaccgaacgtgcggacggctgcatgactatccaaaaacgtatctatttactacacatgacatcggagaagcagtctacatccgagtcatctcatccgttctcctactaaaactgctgaattgcagacgagaattggcttgtcttgcactcactgtccttattattactagggtgtctgact

SEQ ID NO: 61010 - DNA, 501 bp, Arabidopsis thaliana landsberg
caaacgtttcgtcagtaagaaccgaacgtctcgccagtaataactggacgtttcctcagtaaataatcgaacgttgtttcagtaataatcaaatgtttcgtgagtaacaaccgaacatttcatcggtaataatcaaacgtttcgtcagtaagaactgaatgtttcgtccgtaaaaaccaaatgtttcatcagtaacaatcgaatgttgcgtcggtaataatcaaacatttcgtcagtacaaccgaactttttatcaataacaactaaatgtttcgtcagcaataattgaatgttgattggtaattagatagtgttttgttagtaaataatcgaatgtctcatcagtaataaccgaacgtttcattagtaattatcgagcattttgtcaataattacagaacattacttcactactggtattactactgagtgaattcttgtaaattaatgtctgatatgtgctatatcactgagtatatatattacttaaccccacaaaag

SEQ ID NO: 61011 - DNA, 808 bp, Arabidopsis thaliana landsberg
agagcgacaagataacataaatataaataatatatttaaagataatgttaaacttcttaaatttcaatattaacatttatcatattcttctaaattcttctataattatatattcttcccatatcttgaccacgttatttcgaacctcaacctcgatcgatctttaattctttatatcactctgttacgtttttatcgaatagaatgatttctacgggctaaaaatatagaatttaacagtccaaatcattattataaaccatcttttaatgtaggtcccacgaaccaactatcttataactcatatcccgtgtaatatatctatatttatttaatcgttgtactatttagttatgaacatgtaacatgcctaagtggttagtgataacgaaacgatcgtcgacttttcttttaggacatggtactaacaatttttgcctaacaaattgtctaatcgattatagaactgagatgtacagaagcttatgtaagaagtatatcagttacttataggttttaaatgataaacacactcagtttttttgtataggtttcgaagattagtttagatttcggtttgaaatttagattgtaaaaactaacttagaaatatctttcgtgtttacatatatcatttaaattccaagagcttagtttacgtacgaagcttagatctcgacaccgcgttacggagaagtcgtcgcgatcacgtaaggttaagggaaaaaaacaatcccacccaaaacctgtcgataagtgaaacgacatcattacccatacggaatcttgataactacgaaagtaacac

SEQ ID NO: 61012 - DNA, 2222 bp, Arabidopsis thaliana landsberg
  unsure (1)..(2222): unsure at all n locations
tttcatttagtgtgtctaaacctgataattgctcaactagtggatccgccattgaaacaaaaaggctttccactgaaattctctgaggttgcacttgcacatgcatacaaacaaatattcttctaattgtttgcgcgtaagaaaaaaaaaaaaaaactatatccattattgagaaaagtagctgaaaaataaataaattaatagacaaaaatgttaatcaaaatttgcttttgagtaaaaattaaccagttgaatgaataaaatataacttctacagaaggtataagagtttacatgttctaatcctccattaaacaattataaaatacccacaaaatctaaaacttttaggtgaatattcattaatgaataattgaataccactaattaattatgttaaattcatcacaactttttcatgatacatcacacataaacccccataatataataatgaaagaaatgtgaatttggttgaaaaaaacaaaagaaaaaagtaaaaaggttgaagcaagagactgacttttatccaaaaatgtgcttgaattttaattaaaaaacacgaattcttcttgactttcgtttcaaatctaaatccttcctcgcataaactcttccctgaatcaaaaacccattctaataaaaacaaagacgatctcaaacacgcttcttcttcttcctcattcctcaatcatccctaagacgtcacctcacttaaacccaatccaacgccgccgaaccaaaatcaacttcttcggttcttccccaattcaatactactttctgggtcgtcgttaaatccctaaatctctctctgttgttaccttcccatgggatggtcactaagaactctcataagagcaatctgggcatgacaaagtccatgaatttctttcagaacatcattaaacctttcaaacgcagctccaatcgaggtaagatccgtttgatttgttgattcttagtgtaagattaggtttttgtgaaatttgactaactttttcttcgttgacttaaaggtcttgaagatgatattgagcgaattgctgctatggagcaaaaagttttcccatttcaagttttagtttccgctaccaaagattttcacccgacccataaactcggtgaaggtggtttcggtcccgtcttcaaggtaaccctaattttgacatacccagagcttaaagtttccatttttagggttgtggttgtataattgtgtgtgtgtgttttcgtgggttttgttagtttggctgatgaggttgattggtgtgtaatagggaagattacctgacgggagagacatagcagtgaagaagctatctcaggtttcaaggcaaggcaaaaacgagtttgtgaacgaggctaagttgttggctaaagttcagcatcgcaatgttgttaatctttggggttattgtacacatggagatgataagctcttggtttatgagtatgtcgttaatgagagcctcgacaaggtcctcttcagtaagtttttcttctcaatgagattggtttgtatattaggataaatgatattgaaagaagatggttttaacatgtagtggttgcttcatttgaatgcagaatccaacagaaaatcggagatagattggaagcagaggtttgagatcttaannnnnnnnnnnnnnnnnnnnnnnnnnnnnnntgaagacgcgccaaactgcatcatccacagggatattaaggctggcaatattttgctggatgaaaaatgggttcctaagattgcagattttgggatggctagactctatcaggaagatgtaacacatgtcaacactcgtgttgcaggaaccaagtatgctctctctattgtttacccttaaaaagctcatttacatatcttcttgtgtcatttgaactccttttgtttgttggtgtttcatggtagaatgttatttaacgtccattgcttcttcttttcttatgcgcagtggttatatggcgccagagtacgtaatgcacggggttcaatcggtaaaggcagacgtattcatctttggggttttggttctggagctcgtaagtggacagaacaactatagttttagcatgagacaccctgaccagactcttcttgaatgggtaaagcctctagtctcatgaaccatccccaatacccctgttgtgtgatggcctggcaagacccatatatttcagcgtaatataaacaatgctaaattctttctgctttt

SEQ ID NO: 61013 - DNA, 465 bp, Arabidopsis thaliana landsberg
tgacccggtgatctcggtggcgccgtcggcgagcagcttctcctgatcgccgtcggcttcagaacccgcactcggccatgtggatgatctcggcgccggcgtcggtgtcctgcagctggatcacgtcgacgtcttcgggtgccaccccggccttttcgaaggcggcgcgggcggcgtacaccgtgggagccacgtcctcggccaccggcgcgaaggtggtgttcacctcgtacgcgccgtagctgcgggtgcggatctcggtggctttgagatacaccggcttgtcggtgtagcggtgcgcgatgtccgcgcggcacatcaccaccgccgccgcaccctccggttcctgtgtggcccggccggcccaaggtaaaaaccaaattggttttttaaccccttttgggggcccggggttttttcccaaaaaggggcccccggggggggggggggaaaaaattttttttt

SEQ ID NO: 61014 - DNA, 217 bp, Arabidopsis thaliana landsberg
tgggttcatatacatatatctttgtgtgtgtgtgtgtgtgtatgtggtctataggttgcgtttttttttttaaacaaaagccaacccgaggggccctcactctgaagccatttaataggaggcggcgcaaggaacaagggcaaccacactgctagccaagttcaaggcaacatctctcaagacactggtgggggatacagatatctctatgtgaact

SEQ ID NO: 61015 - DNA, 840 bp, Arabidopsis thaliana landsberg
tttacaaaagctagagtttgcacagatgaaaaactatccctagctttctgaatctgcttagaagagtaaatagcttggacctcgtaatcaggcacgtctacagcaaagtaaccttgagcattaataggcctaaagttatactgattccgacatttacaagtcaagccaagagctgaccttctacctacttcattcatagcttcttccacagcttttgcaaagtgatccgaactagtttgctgtgatttctccttcacatgaggttcaaaagggataagctcagcaggatcgaaccatccataactattatccccaaagaaagcaaccagaacgtaacccatcttcttcacacgacgaacagagggagacgcaaaagcttcattgaatatttgacctggccaccatggatgtgactttacctttccccaaaccatatctcccacttcaaaaccatagctcaatgccttcgaatttctagaacccattttctccctcgcaacataatcgtcaaattcggataagaaagatttgtagtccggaactcgccttttctccattttcttctcaccagcttcgttgcagagctcataaaatcggtgatcagagtctctaatctctcttttcatttcacaaaatctagattccgtttcactgttagacactcgagaacctaaatcgacatttccatttccatcacttccagtgtctgcagcaaccgaatcaagctccataaggaaagcttcggcctgatcaatcatttcaaatttcccggagccattgccagaaaaagtaacgaaactatcaccaaaaaccctaggattcacattcacctcagccgaa

SEQ ID NO: 61016 - DNA, 275 bp, Arabidopsis thaliana landsberg
ctctcactctaaactaataagatttggcaaaacgattgtgcgcatgctccattttctatctctgtaccattgtggtctttaactctttcatttcttgagagtttttttgatgagtttgcgtttgataatccaaaggcaaaagctttttctttacgcgttaaatttcaactttttcttacaaatgcatattgattacaatcctagaaccctaaacttgataacaagagttgagcttttgcccatcatctaaagttttgatttttatgggtttctat

SEQ ID NO: 61017 - DNA, 318 bp, Arabidopsis thaliana landsberg
aacaaacacagaacaaccacaaaaccccaaccaaaacaaagcccaacggaacaaacaaccccggacctgaggccctcaagaaacccaccaatcaagaagcaccgcatagtagcgaaccaagggacacaccggaacacccaaacaatactccaacagcccaagaacaacacaaaatgaagaaaagaataataaccttcctaaccacataaaccaaagacgaaaaaccacacccggcagtcacaaaaccatcttcaaacgacagaccacgacacccaaatccaataaaacaacccccaacccaaacatggacgaaaaaaa

SEQ ID NO: 61018 - DNA, 1281 bp, Arabidopsis thaliana landsberg
aactgataacatttcagatattgctgagattttcgatagtctcattttacagaacggcataaaatcattcttcttactgtttttagaatatcatggatttctgtactttgacaatgcctttgcgtttaatactttgcttatttctacaaattttgcttgtttcttgtccgacgcagccttctttcacgccaggatctgataagctggaaaatggccttggagaaacgacaacttccagaagctgataaaaaggttgcatatcgagcttggttttgttcacttctcataatattgcagataatcattaattcacttcatgatgcagatgctgtataaactctcgggcttcattgacatcgataagataaacccagatgcatggccttccatcattgcagatttatctactggggaacaaggaatcgctgcccttgcatttggtatgcgcaaattttccatctaaatatcttcttgcacaatcattaccttattataatgcacacacgactttaggttgtacaagattgtttcagcctcataaaccagtcactaaagggcaagctgccattgctctttcaagtggtgaggcatctgacattgtcagtgaggaattggcacgtatcgaagcagaatccatggctgaaaaagctgtgtctgcgcataacgccctcgttgcagaggtcgaaaaggatgtcaatgccagtttcgagaaggagctttccatggaacgagaaaagattgaagcagtcgagaaaatggcggaactggcgaaagtggagttggagcagctgagggagaagagagaggaagagaatctggcgttggttaaagaacgagctgcggttgagtcagaaatggaggtcctctcacggttaagacgtgatgcagaagagaagctggaggatttgatgagtaacaaggcagagataacctttgagaaagagagggttttcaatcttcgaaaagaggctgaagaagagagccagcggatttcaaagttgcagtatgaattggaagttgaacgaaaagccttgtccatggccaggtatttcttctacagttcgagctacattatgtttataatgcaaataatctatctgcattctgatttctaattagtaagtctttcaatctgtccaatccataaccatattatgacccatcatatgttctttgttcagatcgtgggccgaggaggaagcaaagaaagctagagaacaagggagggccttagaagaagctagaaagcgatgggaaacaaatggactgagagttgttgtt

SEQ ID NO: 61019 - DNA, 263 bp, Arabidopsis thaliana landsberg
gtgcgtttgtcgttcctaaactcatctcaccgtctgattctcgtaacatcgccttgaaatttgaagttaaatcaagaaatggctaagaggataattcaagaaaaaaattggaatctgaaaacagaagactaatgacagagatgaaacaggacagggtgtctttgaatggacattagtttctgatctgaagagatgaagatttagggtttatgattgagaagaagaagaagattttcagaagtttgagagagatggaagaagga

SEQ ID NO: 61020 - DNA, 362 bp, Arabidopsis thaliana landsberg
  unsure (1)..(362): unsure at all n locations
aancagcatccatacccgggggcgggtgttatattatattcactgaataccccacccccacacacccactacaattttatcattaaacaccaaacaataactttattacatttcaaaataattatcattccaatagcattaaatgataatttcaacaccaaacaacatgttatggataaaaattgaaaaataacaatttatcataatatataaatcctcatggcccacgctttagatatccattgagtaacggtcatcgacaacccttcttacccattataccctcaaccgagccgaccaatgaatttatctctccatacccctgaccacattgattcgctcaagatgaaacacaaggtcaa

SEQ ID NO: 61021 - DNA, 405 bp, Arabidopsis thaliana landsberg
tattgtgcggtcactggctggactattatattatgattatgccaggaacagctggccgcgaaagatgtgttagggtatatagagataggaactattttaggatttgcagggttattcacttttttaatgctgaccaaattaagccagaaatcgcttatcccgtcaaaaaatccgtttctggaagaaagcttaaaccatcatatataattgattaacgttagcgttaaatattagtattacttaaaatgagttttaaaagattgatcaaagcaaagacgttaactgcagccatcattatggtcctgatggcaggtcaggttggagcacaaactaaagatacttcagtaaattgcagccgggatagaatcaaatatgccacccggccgccgttagcagtcctgatgc

SEQ ID NO: 61022 - DNA, 377 bp, Arabidopsis thaliana landsberg
aaattttttcccctcttcccccctcccccccccgaaaaaacataaatatctaatcccccttataccaatccccttaaaaaacgccttgactttcttacaaaaataacaccacattaataacatcttcttcttaacacactcttcaacacctctcactcaaatttcattcaccatgttctctctcaaatcctaaatctcctcacctttcacacaattcaccactcatgtattattcaccaaccccattacccgaccccttaatccattaccacctaccctttccttcacccttacccctttcaatatacccaaaaaaacctcctctaacatgaaatcccaaaaaccctccggctaagcaacaactctaccaacccttt

SEQ ID NO: 61023 - DNA, 1314 bp, Arabidopsis thaliana landsberg
taacaattttatgattctgattaaagccaatttattcgattatattcggtttacatatttgatttagaatgtttagttttattggtttggttcgagtagaataaaatattcactgttcgaacaacaacaacaacaaaaatttccttcatttctctctcagccctaaaaaagcttcacgccggtttgtttcaccgccgttgtgcttcttcttcttcttctacctgggttctctctcaaacaaacaaatctccgacgactcattcgttcctcccaggtaagcttcttcgaccaattttactttcgcatttttctccgattcacagaccctagctgttcccattaatcaggatttagccagaaacttctagggatctaattgtttttgaatctgaatctgtatttgagtttatcgttttgtctccttgtgtagaatcagaagatttagtgaaatggctttttgcaataagctaagccgtttcgtgaggaggcagagtgagaatgcttccatgattggctctctcaggtctttctctgctgatgccactcaccatagattccaccaggagactcacaattttcttgagccagaaaactatattggtagctgggaagctccgagtgatccgaaagatgcagagagaaagcttgctcagcttaggagagattatgctaagaaagttagagtgtatcgtaaagagtacattcatgagattgagatgcttcgtgttgagaaacagcgtaaggatgaggctagattgttggctgaacgagctgctaatgaagagaggcgactcttgaaggctgaggctgctaaggttagagctgaggaacgtaagattgctgacgaagagttcaggcaaactctggtgagttcactttctctcttctccgttctttgtttattgtatagaaaccatgatggatgtttgatcaagtagttggattagtgtgagatgattcttgagtaaataggagaatgggtttgtctggataaggttcatctagcatgtggagaatcaaattgttgttttcctcttgaaaatttggaaccttttcctagttatgcatcagggtgtagtagtattatatagaagagaacttcaaggtatagcattatgtccgtgattggaagaaactttagattagagctgatggagatgtatgactaagaactttgataaacgttgcttagcatcaagtggaggttttgatttttcctgcagctatcattgccttcctacattagctggaggcggtctggtaacagctcgagcgccgcacccatccctcaattttgaggggtattgcgtggct

SEQ ID NO: 61024 - DNA, 504 bp, Arabidopsis thaliana landsberg
ccgctgcacaggcgccggtgccgcacgccagcgtctcgccggcgccgcgttcgtagacgcgcagccgtgcatggccgcgatcgacgatctgcaggaagccgacgttgacgccctcggcaaacgccggatggcgctgcacggcggcgccgagcgttgcgaccggcgcggtgtcgacgtcgtcgacgacgatcaccgcgtgcggattgcccatgctgacgacgccgacctccagcggctcgccgtgctcgagcgtcagcgtgtagcgctcggcgcgcgcggcggcatcgaacggcacgtcggccggctcgaagcgcggcgcgcccatgtcgacgcggtagcggttgccgtcgacatggcgcagctcgagcacgctggtctgcgtgcgcacgcggatcgccgccttgtcggacaggccgtgctcgcgcacgaagcgggccagcgcccgcgagccgttgccgcactgcccgaccttgctgccgtcggcattgaagatgcgatagtcga

SEQ ID NO: 61025 - DNA, 312 bp, Arabidopsis thaliana landsberg
gcacgtttacatcttcttcgctgacaatctcagagtaaaccatgaaattcaaaccatcgagaacaacttatatcaaatcgcaaaaaagtttaacatatttgaggaccactaaccatttatggagccagcaaaaaaaacatcaacaacttaaccactataaagttgcatcagagcataaacagtagctccaataaaaaatacactaatgcaaatccacaaccaggagcctctgactagcatgtaaaaagctttgcgcaccacctggctggacagaacgacacttcctagatgacgtacactcgcccctaaaga

SEQ ID NO: 61026 - DNA, 2369 bp, Arabidopsis thaliana landsberg
ccaaatttatagacgtctatgcatgtgagccatgatgaaaggagcaaagttaggcttaaacaccacgtaattgattttgcagttataaaataaaatgagaaaaaagaaacagtccgataaactcaaactttgtaatgtctatatgagagccatgataagactgaggcgcgaaaggggaggaaaattgggactaaataccacgtatgtcatgagcaaagttgggactaaacaccacgtacgtactatattataaattcattgttgaacatgtaacgtatgggtcctttatctattgaaagttagaagtcaatgcttgaacatgtaacgtatggactatatatggaccacctatccactggatcacttaaaaacttcctgaaagttaaaataatctgcttcgtggtttttctttcttacatttctttatgttgatctctatcaacatttattttcttgaccgttactcgtttttttttactgattttaatcaagattttatacaaagcgtaaatattagtttgaaaatccacatcttgatcacttgtaaatttgtaatttggcgtttgttcagatttattgtatgttttagtaaacacattttattaacaaacaaggtttaacatgcatgtatggaggcatcattgacgcacgaacattacaatagagttggaaaaatgcaaaagtagaagaaacaaaaacaataaaacatgcagaataaaagtagatgataatttgaaagttgtgcaagtatcacaccgaatttatgtggtcgatcttttattagtactttatcagtagagttggatacatcaatcacacaatgctgcatctctttgtcatatgtttcctcattttgttttagcgcatgctccacctgaaagatagataacgagagaatattaaaatcaatcacgtattgtcaagaacatgtttaaacctatacgaagttttaaatacagttttactttgtgttccattatattcatggtatgctcatgctccatccgtgacttttcttccatcgttattaactctgcttctgtaaggttcttaggttcgatcttcttttctttttctcccggcatattatttccttcctgagaaatcgatgaatggcaatatttaaaaatctattaacaatagccattcctaaaaaatagtctggcatgacaacgtgaacatataagaaacatgctactttgtttgtttgtttgtttatttgttgtaatcaaatggatcggtcgtgagaatgacggctatcgcaccgatgttatctaaaggcaaagctcatatatacgagatatcacttcatattatgacctggtgagtatacggattcccactattttggttttgagtagctgcaacatggtccagaagcttgactagaagaacgatgtttataacggagggaaagtcttgatcagccatattctgatcaccagcaattaattcctgcatgcacgtatccatgttgagtacataaaaataataccttttgaaaagaagaatgaagaaataggaaaaggaagtttaattggcagagtactatatcaaatagaaactcacgagctttctgaaccttttgtgaatgaagaacaaattaaagaagaatgacacggtaatctacattctacaatacaatcatatatatgcgagtgagtaacaaaagaagagtgtatggataagttaaatcgacgtaacaatcatattctagattatctaacaaaacaaaaatcttatattatatatatacgtaaaatgagctctctccatctattgtatcagtgtatcaccttatctctaatgtttaaaaaaaataaaaatatgttaatttagaagagatatcaatttagtttagtagtttagaatttggaaaccgaacaaagaaaaataaaacattttatgaaacaagatttaatttttaaataaaactattaaattaattagggaccaaataaaatacaattattggtatttgtataagtgacacttgagtttaatttgcttacttaattgagtatgcgtataatgtagaagtagaaacggtaagacgaaacagataggcatagacgacttttgaagatattgactgtggtacttccttgctgttgagtgttgtctttgttttgattaatgaactatatcgtttattgtttcttgtatcggtgttgatagtcttatacttactatggacaaatcaattgattatgtatatgttgttgttttgcttttggggcaacacgattatggataagtatgcatgatatgtcatcacaacagtcggaataatcgatttatcgtctccattaatttagaataatgatatattgtggacatgcatgagactcttttaatatatcgaagat

SEQ ID NO: 61027 - DNA, 586 bp, Arabidopsis thaliana landsberg
tggattccatcttatcatctcccccttcggcggttagatatcttctcgaaacagaggattctgccttgtggcattgctctgtatgctgccttgatcctcctgcccacggctttgaaaatttcatcacacatctatcaacgggagattataaagtgatggtaattaatcaagtgtttgtttcacacatctacctgtttttttttttttgcctttgtttgacttgtccatgttcatttaatgttccagctgagtttacctaggaatactgtgcctcgtccgccggttgatctctccagggggagtaagctaccaaaatcatgttttactttgtttgcccaccatgctttaccacaagcttcactttctcttttatagttgcatgtgactgcttatctgatggagagcgatatgatgagtcgcgatcagccctggacagacgagcggcctccacttcctacagatttatcaacaagactcgctaaattgaaagacttggaggctgtgaaagacgagggtgagtccgtttgtctattgggacatcaacttgtgtccgcttcccccatactgtgatgctagtctggtcggt

SEQ ID NO: 61028 - DNA, 353 bp, Arabidopsis thaliana landsberg
cctatttatcatcatcactcctcctaaagcaaataaatgaatgaacaaaaaatgaagaagctcaatattatacttacttgttggtgtgtcatgtgtgcgtagatatgatgtggattgtgtaagaaactaatgtggctactgggccctctcatatgggaccaaacttcgtagactttagtatttacattcatagaaccaaaacattagtctcattacaaaacatttaccacttatccgttaaggctataggctacaaacaaaagttaccagaattgaccaaagaatcttacgagatttgtgattttggtatatgcaattattcaagtgtgggaagtgagtatatttagatctat

SEQ ID NO: 61029 - DNA, 1346 bp, Arabidopsis thaliana landsberg
  unsure (1)..(1346): unsure at all n locations
tagttctgggaaatcgtaaaccaaatttcaggaactctagttcgtatgatttagttctaagtgtgtataagtttagtacgagttggaccaagacgcacacattatctataataaatcggatctcgggcaatgtgagcaattcataaagaaattagggatttggaccagattttctccctcgtgaaaatggttaataaaccactctaatataatgaatgcatataatgggtttgaccactcacttggttgtctcaagctctatatatctcttcccagtcatgttatgttcactagaaagttgtttgccctcagatgatttaatgcacttcagtacgccaagcatcttgaataaaatctagttgtatggtgctgaaatctgacgtgactaggcatattatacttgcaggcctgtgtttcagacggagaatcagctaactatttaactaagattttgattggtgggctatttttaaggtgagtatgcttatgtcgagattatatagtaatactcctgaagctattacttataatattgatatattttcttgtgcaagtgtggttcgctgctttaattttaaacttcttgcataatcattcatggtttcaattcagggatgctttttcgcgctctccttgtgctctaatccaaccatccatgaaagctgctgccgaagaccttgcaattcccgactttggtattaatatttccggactattttacaaaattcttctattgtgatcctgtcagttgttaagcatttttcatgctgattaatttttcttccataaatttgtggcagccaagaacttttgccctctcatatatccattggacagcggcccgtggcaaatagttcaggatgtacccttgatctccctacactctcttcaggtcaagccatccccaaaacccccacactttttctcaaagacagttatccagtgccaacccctcatggtatgtatatatcacgtaaaagtcaaaattttctctttttcacatattcttgaccattttctttttctatcctttctcaggttcatcttnnnnnnnnnnnnnnnnnaagaatttcttcttttctggctgatggcattgttgtaaatcctggtgatgttttacctgataactctgttaactctcttcttttcaccctcaaagagttagatgtctctgttccattagacatgagtcacttgcaagattcagcaattgaagaagacctatccgtaaaaaagtccttcgttggagcgaggcttcatattgaaaacttgtcttttgcggagtcacctaccctaaaagttcggctactaaacctggagatggatcctgcttgcttctgtctttg

SEQ ID NO: 61030 - DNA, 1343 bp, Arabidopsis thaliana landsberg
aaggaaaggtacttaaaagtattaaattactttaaacttttgagtaacaaaagtctttccttgttatagaaactttgcttaaatttgtgtagggcataatgacttgtctcagatgtttgggggattgtgtcatatgggaagaatcaatcgatgaacgaccttgggagaaagctagatccaggtagtgttgttattcaagagttgaagtcttaattctgtttaatgtttgactaataaacctcatttttttctgccacagttctccatttagagtaaaggaggatgatgaggttgataatttagagataaagttcagtaaaaggcgaaaatcgaagcggatttatcagtcaccaactcctgaagttggacaaaagatcagccgatctctaaaagttagcttcattcatatacacttcatgttattctactctctccatgggaaattgtcatagtcagtccaaattatggtttttatagagtctcaatgccaaaactggactttttagtaagcgcatgaagattatacatcgtgatccagtgcttcatgctcaaagagtagctgcaattaaggtctgtaatctactccattttgttttatatcctaaattaacatggaacaagttttgttgtttttttcccttgaatctgcttagtgttgttgtgttctagaaagctaaaggaacaccagctgctagaaagcatgcatccgaatctatgaaagctttcttcagtaaccctgtaaaccgtgaacagagaagcctatctatgaaaggtaagtctcagtttcttggtagaatttcagagtttaggtccatgtagtactcttttgtttcttgagctttatctgtttacattctccaataatgtgagatcactgtgatgaattaggttgaggcttgtcacttaaagttgagatataatgttgattcgaagtgtagaaatgtaggtttcgatttgatttccttttgtggtgacagttccatgtgcaagctatgaaatggtaaaagaaccatttttctctcattgattcaggaactaagttttactgcaagaactgtggacaggaaggccatagacgccattactgtccagaactaggcactaatgcggacagaaaatttagatgtcggggttgcggcgggaaaggccacaaccgtagaacttgtcctaagtcgaaatcaatagtcactaaaggcatttccactaggtatcacaaatgtggaatatgcggtgagagaggtcacaacagcagaacatgccggaagccgaccggagtgaatcctagttgcagtggtgaaaattccggggaagatggtgttggtaaaataacgtatgcttgtggg

SEQ ID NO: 61031 - DNA, 549 bp, Arabidopsis thaliana landsberg
ggactggccttgctccgagccgatatccgaagtatggttcgttcgctagttatatgcttaacacatgcatctgaggtcagaggtgccgctaaggtgaacgctcagcttcaactctgactatatattatatataagtgcactgaaggttaactatgtcaatctacaactcaatgtgattggcttcgcccgggctcagtctctttcggccggtatgtagaatcgtcggagcgagcaaagcagcggagcgaagtgggctgtgtaatcattttattttttgactcttttttaatatataagggtaagtaaggagctgaaaacgagtccttcggagggcgaagaaactcattaattcattttgatgagggcccctcattcaaatgttatgcttagtggttccctcacattttgagttgattatttccaatttcgagagtgagattgatccgaccaagtagtagtgcgggagccagtacatacatggctagtttccaggcaagccatccatattggcataaccttcttctatgccatctagctttatagccgata

SEQ ID NO: 61032 - DNA, 645 bp, Arabidopsis thaliana landsberg
gattcctcgaatccacgttattacaaattggaaatttagactattcaaaagtagattatcagaaatgtcaaatgtgataactagccaagaacaaaacaaacaaacaaaaagacatccatcgtccatgtgcgtctttaaatatcttatagcttttctcagaccaacttttctagttgtctgtaattataaccttgctcagagtgtagagcactaaacaattattatcattacaaatctatcataattcattacttaacattactaatcggtttgacaaaaaaaaaaaaaaaaacattgctaatcgctattatgggatgcttgtatcttgagataccaaaaataccctttcacatcatctcaacttttactatgtaagaaaaatcatatcatccccttattcatattcaacttgttggatcgcagagaaatgtgttgaatcgtttcaaattatcaattccccgaagtaaccttcgatgtcattcacattaatgatctgatattaatatgcaatcttcttgaaatcctaaatggctaatagtaatatatactgtagttctaactaacaagactaaaacagaatattcaatttattctgagtacatatcagacttgcagaactataaaaagattgatacacatgaagca

SEQ ID NO: 61033 - DNA, 741 bp, Arabidopsis thaliana landsberg
agttttgtgattgaggtcctctcttatggcttacacgttgagcttcgttatatagtcgagccattttgtaaagaaaatttgagaaatataaatttgtattgctacgaatcttaacttttttgtattattcatgttttatgtgaaacccatatgcaattatgctatctgtattatttttcacccggtttcggatcgatcatttttccgaggaaatagtggagaaaatcaatgaaaaggaattacacttgagatgtaacaattattccttttatttcgtaaaatataacgaattctaattatattttaattctagatcttaattactcgtgttataataaaaagatcaaaaagagaaaggtctgaactttaaaattttgttactttacgaaaaatctctaacatgttttggctgttgcgcagctaactcgatcggtgtgcagtgcaccgacacttttagtcctcgtgccaaaccatactttttatttcttatttaattgtgattcatagatttttgttttacaaagataacaagctaggataaattattataacacgactgtgaaaagtttaacaaaagaaagacgcatcttataagattgatgataactttaaaaactgaatatctaaatgaatatgcatatagaatcagtattctcaaggtccgagcataatctcattttatttttatcaattggttaacatgaaagaaccaatttcgaaaacacattgttaaaaaaaaca

SEQ ID NO: 61034 - DNA, 539 bp, Arabidopsis thaliana landsberg
tgtagttagtagcttacgcaactagtatgaaacatagtggaatacgagtttaaaatgaataattattgacttaattatatttgcatgagtagtccatattttaatgctactagtactaacacaaatatatttgaactatggacaagtctggttgatgcatttcactcgtgccaactgtaaaaccgcaactaatagattatggaatagctaatgcaaaatttacagtcacaaacttataaacaaatgaatatattatctctattaaataaataagaataaatatatatatcagagcctatatatatatatatatatatatatatatatatgcctctctctctgaactcagtcaaaatatctattcacgatacccaagagtcttgtgggtgtctttagcacgcgcgtgcgtgaccgagatccaccactatattgaagtggtattgagtctattgacttctactaacacacttttgtaatgtaataacatactaaaagtgtcgcacatgttggagaccatatttgtgactatgtgtgtgtca

SEQ ID NO: 61035 - DNA, 643 bp, Arabidopsis thaliana landsberg
gggggggcgctgaggtctgcctaaagaacaagagatgccgacttctttttgttctttctctgcgcttctgtgcctgcacttaggagcttcttgtctgcaaaaaaaatcccatggtgtcataattcttcttcaacagctaccgagccttctatgccgtaccacgtcaggttagctaaacgtgatacgagattacaagaatactggctattgaatgtgtaattagtttataaatctgctataaaccggtacaaattccttgagtcaagacacaaaacataccccaacagacaagcaaaggagaagacgaagatgaagaagaagaagatgaataccaagaagaagaagaagaagaagaagaagaagaagaagacagagagagagaggaaagagcttttgcattcgtacctgggacataaatgattaaaccagacagcttcagagagaaaaatccttttaaagaaacattgttccacttcagacctgcaaaaattttaattactcaagcagatcaaagcataattttgtgttatatttccttcataatcaatgttattagaccctggattaagtgaataagaaaggaacaatcaaactcatcaatattatatatatgtataaagagtgcattcaaaatgaataatga

SEQ ID NO: 61036 - DNA, 290 bp, Arabidopsis thaliana landsberg
cgcgcagaggatctaaccagggcatgtgtgaaaaaacttactcaaggaccccctgagcacagcaaagccatgtttactgctaacacagatgaagagaagtcaatcgtggtaagaactttaagttctcactccttctgtatccatttcatctcatctttctttgctggtttaatattaccaaaactcctttcacaaaacgaagaagcatagatcaaccactggactcatgacctaggataacatattgctactgacataggggacaaacacaaccatatcttgttacctct

SEQ ID NO: 61037 - DNA, 301 bp, Arabidopsis thaliana landsberg
aattgttcctcgctaacccctcaccaccgagggtgaatcagggcctaagaacaggacaaaaagcgtagcccatggacaacatgtgaatattactaaactaccactcatagttcccgacggacaccagaacctaggtcataccaaaacatggttatcttactaacgacacaaggggggcccgatcctttatgctaagaagagctacagaaaatgcctaaatccaatctttcagtaccatgtgctactactctaaattaacctaatctgtacttcaaagaaaagctacaccaaccttcaacaa

SEQ ID NO: 61038 - DNA, 123 bp, Arabidopsis thaliana landsberg
cggcgacctatctttacgtacactcccctgagatgtgttcataaggtacgtagtgaagccatacaataactgttagtgggcagatcacaggtctaatggaacatggggtaaacagaaatgata

SEQ ID NO: 61039 - DNA, 1355 bp, Arabidopsis thaliana landsberg
tctctcttttttctttttagataactttttggccacatccaccctccatgatacacacacgctagtttcgaggatcagaatacatacatacctatgtttattatatagatagaacgataatggaacacagagcacatgcctcatctgttgtctttttattattacttattactcttctcctccacttctgtattattacagtctgttaaagtagaacccccttttgtttttttctttctatgtctcaaaaattaaaacaagttatgaggtttaaagaaaaaattgagaaatgtagagggtattagtagaagtgatttacggtaagtttattcgacagctaaaaagatagtttatgcattccaaaatattcctcaaatttgtgatgagtaaacaaatactggtaaggtgggttttctgacaacctttggatatacagtagtatgtcatctgttttcattgcctcattggtcaagatcaaagttgatgaccacattagagctccttcttctcccataaataaaaaaaaattgatcaaagtttgtagtatgaatttgttatataaacagaagagaaattaacacagagatgtgagttggtccaaaagaaaaatgattgagcagccggaagaagcacgttacaacatctgcagcatatctggtcagagagagtacagaaatattggggattcaaacaattcacctcgtgatgaaacctgaacattgaaacatgcattatagcctcactcacatgctcacataatgccaaaccctttttctctgttcccgccttgcttttttttttcgtggcaatagaatacaatacattggttgggtgattaaataaagagaatgactaggataagtaagttagccgttaaagttgtaaatctcgagtaagtgaagtggtccgtttatatgaaactcataaaaaccaaagtcccatgtgcctaaaacactagtagaatgtggtaacgtatcttgttcacattcacgttttcatatgggaaacgaatgaaataaacaatgcaaaacgcaataacttaattagaatcttgaactggccgaaaagtgcaacccgtaacggaaagcagaggctgagagagaagagagaagagagatgagggagagagctgacttgggaatagatagaaagagagcgtatcaacggtggtcattactttatgatggcattcccaactttgaaactgccacgtcgatgtcggtcaacagcggggtccatatatgctgatcttccgatccatattttttctacgtggcatttttctttcctcttgaaacaagaattcagaattgaatcggaaactctgaacttaagtaagtaaaaaatgtattgac

SEQ ID NO: 61040 - DNA, 1532 bp, Arabidopsis thaliana landsberg
ggaaagatatagagagagatgtcgaattggagactgcgttttcaacgaagaaactttttttgcgttttaggaagaggaggcctcattaaatttgaagttggtattaaagtcaaacctctcatcatatattatttattcattatgaatttcaaattgtttttgtacaacagcttaatttacaagcagcataggaaacacaggggaacaaaaattaaatgatcgcttcatgtttttatctaatttgttagcatattgaatgattgattttcttttaatttggatatgttgattgtcttgttgcatcatcaatgtatgttttatttaacaccggaagatcttatgatgggttcattacttcataataatctccgagttctacaagactacaactttcacgtgacttttacagcgacaaaaaatgcatctagcgaaaattaatccacaacctatgcatttttgtcactcttcacacgcgtatgtgcataaatatatagtatatactcgacaatcgatgcgtatgtgtacacaattaccaaaacaattatttgaatattcagacatgggttgacatcaccaagtaatattcacagtatctgaaaactatgttttgacatccctaaatagtttgactaaccagtttaatatgagagcatttgtaagaggcaagagccatggttttgttggctcgtttaatatgctcatttaacccccccaaaaaatactattagatttaaacgtaaaagaattaacgaacacaagaactgctaaaacaaaaaaaaatcaatggccgacatttcatagttcatacatcactaatactaaaagatgcatcatttcactagggtctcatgaaataggagttgacatttttttttgtaacgacagaagttgacatgttaagcatcaatttttttaagagtggattatactagttttttttttttttttttaatgtatggtatgatacaacaacaaaaactataaaatagaaaaagtcagtgaaacctcaaattgaaggaaaaacttttgcacaaaaagagagagagagaaagaatgtaaatccaaataaatgggcctaattgagaatgctttaactttttttttttggctaaaagagaatgctttaactaagcccataaaatgaacatcaaactcaaagggtaagattaatacatttagaaaacaatagccgaatatttaataagtttaaaacatagaggagttttatgtaatttaggaaccgatccatcgttggctgtataaaaaggttacatctccggctaacatatcggcaaaaaaggaacatggccaaggctcgaaagccgaagaacgaggaagctcctggcgcgaagacttcagagaacactggagctaaagttcttcaccagaaactctttctctctattgacttcaaaaaacgccaaatctacgggtccgttttcctctctttctttcgatttttcattcgcgaaacaagtccgtgaatgtgatttttggttgatatatataattcgggatgaagaaaccctaat

SEQ ID NO: 61041 - DNA, 805 bp, Arabidopsis thaliana landsberg
tgccaagattttgcttcaatgaattagtttaattcattgtgatcacgatgacctaattcgaaactccataaacccataagaagcaaatgattttctcatactaatccaacgaaaccctagaacctagagaccagaagcttccagacaaaccctataacagagtctaatgatctgatcaaaaaacccaatttcgaaaaaaccaaaattggtaagagaaagggtaaaagaagctaactttctctggtgatttgtctgaaattcttgtaatctccgccataagaggacgatccagaatcggagaaggacatcgcgtgaaatcgtcgacgaaatgttttttgatggaaagggaaagtagaatcgaatattaaaaaaaaaaacagattcgcgaggaagaagaatgaaatttccgttgaaattgtggatctagggtttacttggtgacgaagacaacaacgacgttaaagagttaaagaaaacttggcgcttctagatttttgccgttcctgggtcggctccagcgagcccatgagttttcaaactttgaatcagttttttctcagacgtgtgttaaagtcaaaatatagggacgaattatataatatataatattctaaatgacaaacgtaaccttgatattaactaattttgcaaagaaagccactatatcaagatactttacagtaatcacccaactaatcaaaatttgaaatatagcccctaaatcaaactatgattcactacttattaaaaaagtttggaaaaatttatggaagatcaaacttgtaactaaagccaaggaacatca

SEQ ID NO: 61042 - DNA, 1350 bp, Arabidopsis thaliana landsberg
ggtactcccacatttattttttctttactccacagttattcttattcggttaattatattcagacagaacttgatacttttttttaccacattaatactccatacaaaaagtattcatctgaccagtttgtactttcgataccatctgaaagaatactttattgtagtaaatttttggaaaattccaacggagaaatcaatgagattggtctcaaacgattatcttaaaatggaatatattttcaattattaccattaaccaaaatcaaaattattttaaatgataaaactccaattatcaaaagaagttttcagttttgtgtgctcgaatcacaggcgtgagatgaaaccgtcccctgttataacacaacacaaccaaacctctcactcatctttcataatatcctcttattggttacatagagattacaaaccataatagttacgctaatcactccctttattcgcagtattcgattgaatccaatacaaacatgacatgattgattttgattctaagatgaagaacataaaaaaagggaaactaacccatagagtaagaaggtgtaggcaagttaatgacagtggtcttcactttagtcatcaaattgatgctatttgtcacaccttgtgaccctattccactgtccttaagtccctgtttattccaatccaaaaccaagttaatcaaaccggtcataacggaggcaaaaaagggtctagacatcgatggtttacctggaaagggaagtggtccggtccacgagctggcgcagagttgatctgaacggttcctgtctccattgcatcactgatcagtattgccttgttgatgtctttagtgaatacacatcccttcaaatgcaattattgtgttagctctggttaaatgcaaaccatataaaccggactaaaccaaatccatatagccaaacctgaaggccaaagttgcttgcattgcaatgattaatcccttcttcaacagaattgatcctcaagaccggcacaacaggaccgaatggttcctcccacgcgatcctcatgtccggtctaacattgtccaaaagcaacggccaaatcaagttaccttctcttttatactcttgacaaaacgttgctcctttctccttagcatccatcaccaatccttcaatgaaattagctgaagattccgacaccactgccgtgatatcggagttctcttcgggcggtcccaccgtgagtttggccactttagctttcactttctcaacaagctcatccgctactgattccatcactaggactaccttaaccgcagtgcatctcttgccgctgttaaggtagataaaacccgttaacacataatca

SEQ ID NO: 61043 - DNA, 1529 bp, Arabidopsis thaliana landsberg
gggacagatattccacaatcactttggtcgtttattgttttacaaataagagtaaactaagttgtgggcttgttggtcttccggcatgatcaataattcacgttaagatacggatatggaccgaataagttttggccggtgaaaaagtagagatatgtggacatgattatgagattgcgcaaacgataaagtccttaaaagtaattttaattattaagaacccatccctaaagagatatagccgcaaacttttttctttcattggtatccatacatctttaatcaaaactttattaatcatataattatgatcctatacgtcaccataagatgcttttgtacgatcatgtgttaataaattattctactactctgtttttttcataaattgtgaccggacgtaaaatatatagagacgagtattaaaacttaacgagattgtgatgtctttatcaaagaataaatgtgttcaacattaaatttgacgtagagaaatctcaccagaaaaccatatgggacttgttaggtttggtatccacaaatcagtttacaatcaatttgcatttgagatatgctctcaaagacaaataatcagatccacttgttcaatgccattgttcacccgtcatttagtgtttcgaccttatcttataaacatttcttttcttgaaccttatcttatgagcatacaataccaacagtaataaacgagaaataagaggggcataatcgtccaatacaaagctgacttttaacattctcaaaacaccaactcatagttgcaacattgtccggacacgtgggttacttaccaaccaacgatggacccattttcatttaacagatcaaccaatcatgtttctctttgtgtggttctgacttcaaggctcaaagtacatttctttttttctaattctttgaccatactaacccccttatttttcacgctacccattcttactccaattaaattcttctagaagataaatcattctattcaaaaacgtttaccaatgatcttagctgtaattaacgcaattaaatcatgcttaaggtatttagaaaagggtaaaacggtaacatactttatcgatacataaattggtcaactagcgtaatttaacttttgtccccattgcgtatataaaccgtcgactatcgaagccaacacctcaatttttcccacatttttctctcatctgcctacggttgcagattttattttattaacacagaaaaacaaaaaaaagtataaacagagtccacgaatttgggaaagtttaagatcaagacatgaagaaaactggaatcatcgcagcctccatctctgtcgcggcttctgccacggcgatctccgccggctctaccaacacctccgtgtcattctcttcgccggaatctaatctctctcgtcaggtaaaaaaagaagaatcaagctcttgtttatttgtttctcggtagcatttaaagttcctcctctgtcccaagtactcacaataagtttctcatcgccaaaaatttatcaactt

SEQ ID NO: 61044 - DNA, 510 bp, Arabidopsis thaliana landsberg
gagagaaagagggaaggatctaccattcatggaacattttgaacatttgaaatatattactgaggtaatcattcaggaatacagttcctgaaatggtataaatcattaagcattgggaaaacatgaatacatatgagaaccaaaacataatttggtaacgtctagttgagaagcagctctcccaggcacaaaccaggatgctcacaagttgcgtccaaaggatctgttatttccatctccctatggtttcttaagacagccagggggaatcatctccctatggttttttagcaggaatacatatatccaaggtgtggtatctcacagatatgtaggttgtggggatacatgtcagtgcatgggtacactgaaatatacactattggatggacagtgtaacaccccaggtgttactcagggtgtccatcccagggttaccccttttacccattatcacatgaagactgaattgggcaaagtataccaaactgggaattctaggtcctaagc

SEQ ID NO: 61045 - DNA, 735 bp, Arabidopsis thaliana landsberg
cacaagcttccgtatattaatgccaacagagaagaacaatttaatcttttcccataaggttattaacatagagatcaaagtgaccagatggctgaaatgtattaaaaaaaattatcaacatttccatggttctagaaccgcttaagctataatgatacaaacacttacactagacagtgggaaaaagaactctttatacaaatcaaattcaatgctatgtgagttgtaatggacagagaattcgagactgaatagtgtaccaatgtagtaacatcagattgaaaacaaagagatggtagaaattgcagaaagctttaccattctgagacttaaggcttcctcctccaacttttcgatctcgtcttccctttcaggagatcctaaaccattttgcatttcagatgcttttgcctgtaatagatgaacaaattcaaatttatgaaacctcaaaaaagctctcatttgaaattaagcaagttcactacaagtgaagaacaagacactcaacaagcattagatccttcatctaaactctctatcgattcgaagatttcctaatctaagatctcaaaacaccctaggaattcaaaatttcctctgtccagaaacaactcagaacaaaacacttctcgaaatagttagtaacatcacattatgttcaataccttctgcgaatttggaatcgcagcaagaacagcacgaagcgaagtcactgagttcttataccgaagactc

SEQ ID NO: 61046 - DNA, 427 bp, Arabidopsis thaliana landsberg
gatcaaaagatcaaactaacgttttagatagtttttgtcatatggattggagtaatagtggataaggtagacagcgatgtagctgatttctttctatttttatttatctataaaaactatattattgatatatatattatatagtttgattaaaacgacatcgtattaatagtttagtcaaccgacgccgtgataaagtgtgttcacggtgatgctgcagaaacaggtctcgacgacgacgacgatgacgacacaggagctagcgatggaaggagagaagcaattggaagaaactattgaagcggcgtttcagataatttcagccatgaatgatgagctttgtaatccgtctttgtggtctacttcagctaccccgagttccgccgcgacgacgacgggttctaatggttcggctctcgtttccgcc

SEQ ID NO: 61047 - DNA, 458 bp, Arabidopsis thaliana landsberg
cctgcaaatttgaatcagatacaaatatattttctaactgaagatataaataagtcaaacttctagtccaaatgcttactttgttttgaattcttctacctctcaaatgttaggattttcatacattggaaaccaataaactacatgccgttaaagtcatcaagttaagatttctgacatattaataacattaaaaatgtttgaaagggtaggatatatgaacttttacctctatattcttagattcgatcagaaaatacatggtagaataacatgactgcaagtctgcaacatgcttaaagttaatagtatgttataagaggtaatgccatatatatagaacacatttattcatcttatcttatatttcagagatggaaaaaaaaatcttgttgggttcaagactaatttttttgcatctaatgtttcaaaaggactaatttaccatacaccatttt

SEQ ID NO: 61048 - DNA, 1730 bp, Arabidopsis thaliana landsberg
tatatatacgtatataactgttaatcgaaattacagaaagaaaagaaaaatgtgaattccactgctgtataaaataatcattcgatggtaatccgaatgttttagtatagaattaaatggcacatttgctttataaaatcttgcttaatgcggagagatatgggccggttgttcaactaatgattgaataactaggcagcaaaaaattccactaatgattttatatattctaaaggtgttggttgaaccagaaaataaacaacaaaatctttgtatatgtatctgttcttaaaaacacctacaaaagacaaatagttatccaatataatgtaccaaaatgtcattccaaacataaaattttcaaaatcacaagtttcaaaatttgctatgaaaactaaatacgtaaattacaattgtaatgattttggtgttaattttcatggttatcctcgagattatttggttattagtgaatgagtagttcatgtctcttgcatattacactacctcattttactttcgaattgaaacttctaaacatagataatgatattctcttatttctaagctctgcaatgtctcacgtaaaaacggatttattactttttgtactggttgactactaattgaacgagaatgctagcggaccgaaatgaatctacgatggaaggatttggtgtctttatataaaagtgagggtgttcatagtaagaaaaagttattcatacgtgttttttaacttaattcaataatgtgggttccattatcatattaaatttaatggaattataactcataatggaattctttgaaaagttattatttttttgggtagaagggtaacttattctgttttctgttaaaaggaaaaattaacttagtttctgttaaagaagaacattaatttactgtatgaaaatgttttaaaacttttagtttacggtgttgaaacagaaacacaaaacaacaaacgacattgattttatactttaaaataaaaaagtggtccagttcatgtagcgttggttgttcctcgtgtcgtctgtcttcgtcgtctcgcattacaagttttgcatggacgtaccaaagacacgtgcattatacgaatttttaatattattaaacaatacggtggcgaaaaatatccttaagtataactacttttaaggctatgtaatatgtatataacacctaaaaatacaaaacagctaatatttatggctaccaaataccaacgttgtttgtatgcataacaatatttcagtaatttagatgcaatttaaatttgcatatacaaaatgaaatatatgagcgtaaaactgatttcagagtttaacaactttaaggaccaaataaattttgggtcaatggcgagttctcggaccttctaaaaatttttaagtctttgaaatttccgacttataatataaactgatttatatccacacaaaagatgtattgatctttggcacataattcttcgcctcacgtacaaggggaaggagactttctatcagagtgatgggcacagacgggttgtgtcatttgtctgttatccgaataaaggcgtatgattgatctgaagtgtggtcttatgccacgcgagagtcatatcccataaagagatttgacaattgacgcagcgatgataggtgaaataataaataacataatacaaaatggcctctgttttgttgtttccgtgactcttgcatcagatggcatcgact

SEQ ID NO: 61049 - DNA, 1497 bp, Arabidopsis thaliana landsberg
ttccaccgccattgacgatgaagatgatcgccggaaagttttgacactgattgggtttcgaatttgaattcgattcgcgtaatttgtggatgacccttttaggggtaatctagggattgtatttgaatttttacctctagcgattaagattgttcctttacttgaacagatcataaaccaagaaaaatgaatcagaaatgaagaaacgattaaaaaaaacaatcgtttttctccaaaattagcgaaatgagaaaactttagaatagagaatccaaatttagggcttcctctgtttataaaacagggtaataaaaaacagagctttataatggccgatgaagaggaagaagaagaagaagaagaaggaaaagatgatagtgaaaggatttgagaggataatcgttgaacaaattaaataaacaacaaattcactgtatttgtagaatttgtgtttgattagtttattactttttgtgatatttgtttgcaacttgcaacagttgtcttcgtagctttgggttgaggtatgtaagagaagaggcgagtagattgttccagagtttacacgtgtaaggtcactattgtttctacactaatttttgaagtattttttaccctaaaagaccgtcctatcatatgatcctatctataaaaagctccaacaattatgaattttctaatcaccacctttatgtattccttaattttatacattttgtttaatgtacattttatagtttatagaataaataccctagaaaatttacccaacaaaattaataagaaaatcacataatcaaagttattaacaaatttgtattacatgtgtaagattaagaaagtctacttatttatatattggtggtataaattttagctattaaaataagaaaagaattaaaaacaaatgccacaagtattggataatatttttatccaaaaaaagtattggatattatctaaccatatgttagttatttttaaccttgtctcctacgtcacgtcatcattttttggacgattatataatagaggtttcgtgatatcaaatttcaatttgaattttattcatctttctaaaacaataaaaagtcttgttctcaacgagggccacaaataaattaaccacatgttttgaaataataaccacaaaaacaaaaatgacttgatcactccggattttggtaaccccatatactgatacaccatgtatgttcactccacactaatagagattttaagacataatcgaggatcatttataccaagtcggctatataggacaactcgataaaatctaaataagtcttcacaataagaaataaaagtgtactactaatctagtaataattcacctagtaacgcattattttcgcgactatagcataattagttttataatgacttgttgagttgttgtctagaatagtctgaaattccgacaaaaaggcacgtgaagaaacgcggcggcttatcgtcgtgaaagaaacaagagcc

SEQ ID NO: 61050 - DNA, 1037 bp, Arabidopsis thaliana landsberg
aggtctgtctcgaagacgaagagcttggattgtttatagcttaaggtatattttgctggagtagcggggttaggggggctgatattgttagcaaaattccatttgccggggacatttgttctgagatctgcagttttttcatctttgagtagactctgcttgatccgaggcattctaactacagtttctaggggtattcttgtttccacttttgctcgattgagtaacagtgattgtgatcacaaaactattctgtatgacggaattttgctcgaactttgtgatttatgcgagaaccccattgacagtcatttaaattttcacgcactaactgtgatgcagatttgcatgcaacagatcaagacatctatgttaactgatttatcagaaggttatgatccaatgccagacagcatggcagctcgagtactcagaattatatggaacaacttggaggaccctttgagccagacagtcaaacaagttcacctcatgtttgacctcttactagacatccaaaccactgttcatcagacagatgataaagtgggaatgagggaatctttgttgaaaattgtcaactatcttcttcgtttaggatcacgttgtaaaggaagatatgttccattagcatccttgacaaggcggttaggtgcgaagactttgatggatatgagtcctaacctgttgttcgagatggcaaatgcatatattgatgatgatgtctgctatgctgttacatcatttataaaatgtttccttgaactgttgcgtgatgaaagctgggggagcgaaggtgttgaccagggttatgcgcgttatcgagaacattgtttgcctcctttcctttacgggcttgcttctggcaagtcgaaactcaggtccaatctaaatacttatgcagtacaagttttgctagaactggatgtagagagtatatttcttttgcttgcgtatatatctattggaccgagtgaggaagaaaccaagctaaactatactgagttgagtaacatgagtatggaactgacagttga

SEQ ID NO: 61051 - DNA, 1722 bp, Arabidopsis thaliana landsberg
  unsure (1)..(1722): unsure at all n locations
gcacccatggtagtggagtcagaagtggatgatatatatgtggacacgtaagatatgcatatacgcacacacatacattagatgtgtgattgtgataagtgtaaagaacagtaatgattaaagtgtaatgtaagcgcaagaatgagaaagatattgacctagtccaaggcgcgtcgccctcgaggttgtacgtctacgtgcatgaaaaatgccatcctctttcatcaacatatatagccccatttgacataagcaaatagaactttctgttattagagattgtatctcaatcatcgtttcctggttattcagatttaaatgtattattaatgcggtaaacgagcataaatttgactgcgtgttgtaactaaatttgaatcactcagatatcataaacaaatgggacaagaaagagagaaaaattagggcaagcacttttatcttcttatccggtggacccttttagtggccattggtcaataaacatctggccgtttaaaattcataaaccaatattgatttttttttataacaacacttaatagcaacatattttacaattctcattacgactactactcaaatcgaaataatatatgtaagacccataaaatagagaagtcaactctgtttaatcatcaacgtaagtgagcctataatattcttttcatacattattgttatttatttattttgattgattgactaatgactactattcaatattcacaacgaaattgaagtctaaaacaaaattgattcaactattgaagagaagcaaaatttggtatgagttccctttcctcctaaaaacaacaacttttcttttgattgaccattcatttatattacaacaacaatactttttttaaggacccaaatattcacttttttaatctcattgacttcatatgtccacacaactcacaagtcttaccttttctccagacaaaacacagaggaataggagagagagagagaggtagagaaaaagatgaattcacacttcatacaagaagcttcagaagcttgcttcaatggctgctgttcatcaccattctcatcccattccatgtctgagaaaccagaagagctcgagttctcagtaaccacaacaggaacttggtttctgaccagaaacaccaaattcaccagccaagaatctctccctcgtctccgtacttctttctacgatctcatcacagcttttccagattacttgcagacgaatcaagccgatcatctccgttctacagagtaccaaaacctctcatcatcctctcacgtctttggtcaacaacaacccttgttctcttactctcagtttcgagaaatatccgaatcagaatccgatttgaatcattctctcttaaccttgtcttgcaagcaagtaagctctggtaaagaactgttatcattcgaagaagaatctcggtttcagtcaaggataaggaaaagaatcacgagttttatgaatctcgaagaatctgaatatcacatgattctaactcaagaccgttcctctgctttcaagattgtagcagaactttactctttcaaaacaaatcccaatcttctcacagtgtacaactacgaagacgaagcagttgaagaaatgatcagaatctcagagaaaagggtataaaaccccaatcagccgagttttcatggccgagcactgagattctctcggagaaactngagaggagaatcactagaagt

SEQ ID NO: 61052 - DNA, 220 bp, Arabidopsis thaliana landsberg
agaaatgaaccttacagggaggggtattcatataggggggtgaccacacaaagataggatatgattgaagagaggaaatggaaaccgccaagacgtctttaagaacggagctacttctgcctttggctacggaaccgcacgccgtgacggaagagcagagcggttccggtgtcttacggctcttcgtccttgcttacccatcgcggcctctccattgcta

SEQ ID NO: 61053 - DNA, 534 bp, Arabidopsis thaliana landsberg
tctaaatgaaaacttcttgttgtaaataagtaaacagtcattttttatcaatagaaaaagacaaaaaagaagtaaaagtccggcgccaaatatttattggttatggaaaccccttaacttagtcttgaattagttaatcgtaaatctagttgacaaatattaaagtccgtagaatttgaaagaatacagaagattcaaattgggacaaacataatatataattaaagctttataaaagtcaaatgtatccattattattattttgggattaatcaatcatctctgtctctcgttgacaactcttccttctcttgcctcaaccaaattccagctggccctctttctccattgtgtgtgaatgaatcattgacattatttttacttactttggtcatgcaaacttttttctacaccttttgcttaagctaagttgaatgatttttgttaagagtgttgttatttacagaaaaatctgtccatccattatctttttgggttgaaaaatatcttgaatttgaagtaacgataaaattc

SEQ ID NO: 61054 - DNA, 1630 bp, Arabidopsis thaliana landsberg
  unsure (1)..(1630): unsure at all n locations
aatttctgcttttccgatgccgcttttatagcttcctcggatctgttttcttcattatctggggaggcatcaaagagagtaatttggacaatgactctgttattacttggacgtttttcaaaccggaatggagcttcaagaactgctcaacgactggcaatggatcatcttccttcgccgttgacaaaagatcggagtacatactacaaaaaggaaaagcagaacaaagttcagaaaccaccaaggcagtaacaataacattcagatacaaaaaacatttatgttttgtccctcaaacatccaaagccggcctgaataaaacttggttaagatattacgcacatgaggcactgaagtaagctctcggaagcagaggcttcttgcagggcctctattgcgactacttgagcagcttctctatgcctcaatacttcctgcaaatattgatagcagcaatgactcaataagctgtcttaatatttaatcacgatgtcaaagaccaaaacataagatgcatatgctatactaagaggttctcttcaatcaccagagtaaatatgttagtttggatgatcgaatttctaaactgcttgttttgaagatgaattttcttaatcactagaaatgcttcaaagcctattaatgaagcaagcacatataaggatccaagagcagtcaaggccatacctgtcccatcctcgaaagagatggagggagtgaactccattggatattggccgccgctaatcttttaccattaacagagactttgaccaaattcccaggcaatccattctctgcaacagatttcttctcgacagatgtagatttaggcctactcgttttatctttggtgtccaacactgcagttggctcgactttcttggttgactgtatcttattgtgctccttcgatgatcttgcaaatacattagccctctcctgtttgcttggcaacttctcactcgatgtgcttctccgcggagcctagtaaccaaaaatatacaagctatattcagaaaatcgaaaacagtaaacactaataacattgtatgaagtaacagacgaattcagatggaaaaacatgagactgataggaaaacagacgaaagtataatacaaacttagattcagcagatagtaatgaatagaacaagtttaacaatgctctcaaacaagtggtctcagcttcaagtcaagtgctgatgaataggaaatgaccttacatgtttcttttgcaatataaagccaagaaagatacaattgaaaaagcttactgtaactccggaannnnnnnnnnnnnnnnnnnnnnnnnggctggatttctgttctatctaacccctgatatctaaattcccttcccagcttttcctcaacgccttagctccaaactcaatcccctgcacaaaattcttaatcatgggaagctttttcccaactttcggactctccgctttaagaagagaccggcccttctctgacaaccccattctaggagaacccttctccaataactttggcttcacagtctgttgctgcttaatcccattagcaaactttgcanaagaattaggcagtgagtaacaactcgtaggggaagaggaatagacttaaaacccgaagagtcttg

SEQ ID NO: 61055 - DNA, 390 bp, Arabidopsis thaliana landsberg
taaaatttaatctcatgacagaattgcccattatataagatgtcaaacattgtcgcaactacaaattggtcgacaatttaaaaatcgtattcaaaatcagtagaagacgtttttgtccaacaacaaaaaataattactgttttagctttctgataatttagagtaaattattttcatacaaaatctattaaaataaactgtattttttaaaaaatcggatttcaggccctgtgctcttttcttactatttttattaaaagagtcacattggttatcatgtcagcaacaatatatgacacattcggttgggctataggcttctgttgattttgaacttctggcccattagggttgcctatgagcttttctacgagatggggctggattttc

SEQ ID NO: 61056 - DNA, 360 bp, Arabidopsis thaliana landsberg
atatatgctcgttggagcctcatatatattatttgggatgttattccgggatgatatacatattccatgtaatatctataaaattttactttccttgtatttcgaccccaaatctttggatgcatggctcgaccacttattatccatcttccatcgcggtaacacgtatgagttggtccatcgggcattggcttcctgctatgtggtatggagtacgttgctccaatgcacgttggttggagcatgtcgcttctggcctcttcatctttttccattgggttttttggccttggactagtcgaaaattcaatggattgggtcgcatttaagtattagggggcctttgcaactctcttaggg

SEQ ID NO: 61057 - DNA, 567 bp, Arabidopsis thaliana landsberg
  unsure (1)..(567): unsure at all n locations
cgccggtacccactttaaacagtaaccgttacattaatcaatttttccctatcttcccatggattctcctcgtcacagattctcaggttctttatataaatcctttaaaatctctagggtttcttcaattcaattctcacccttttcattgactccttacaatttttttctcttaactctagaatcatcgaaatggattcagctccttctctatcatctctggactttgaattatctcctccggtattggttacaatgacttcaacctcatcttcggcttctgataacgtcgaaggagctgatgatgatgctaatactcatgggattttcaattggagagatttttcctcttgttggagagtttcagagtcgaacttgtactgcttcagtttagctcttcttatctggttctttggtttgtttctcaacttaaaaattcgattttgatttgttctgcttttgaaagtttttgtctttgactatattgaatctgactaattctcgattgactcagcttcgtttattctgattgagaatctttacggaccaanaaatgtctggcttgga

SEQ ID NO: 61058 - DNA, 1351 bp, Arabidopsis thaliana landsberg
cttaccttgtttagattatacccacaagtctgtccaaaaaagcaaaaataaaagacaccattaagatattctttttcaaagtaataaattgacagtgaaatggacatatatacatccgcacttcataccacaaaatgaatgttgtccagcgaaatgttttttgctctaatactgccaagaaggtcaccaaagccctcagagcccagatctgcctcaaaagaacgactaatcagctgaatatatcacaattcttcattttacacatgctaatagttcactagtgccactaatgcattaccttttttctcaataaaagtatcataaccttgatttaaatccgctccaatctcttcaccaatatgacgtttgaaaagcctctgggaaacaagaacaaagtggatacatataagctgtgatagttggtatgtttaaaggtctgcatataccccatcaattaaatagttcaatgggatgacaaaagaagaaaagagagaatctaaaggaactataacaccaaacgcctcaccaatccttggtcatcgtagattacttctccaccttctactcgactgtagcaagtaagctcacatggctgttaacatcaagcaattcgaaacgcgttaccataaccataaaaatgtagtagttaaaacagcattccttgatatatattacctcctgaaagttggtttgttttctagccaacgtttctttgcttttcgaaagcttaagctcagaaacaaaacgttcatcacgctgataattctggtatctcccgccaaaaccaccacgattaccaccacgtgcagggtaaggtccaggccgaggaagaagcccaggtgctcctgtgccatttgaccaacgaccacgtcccattccccctctcccaccatggttatcattgctccatcccgcaggcaaaactgtcattatttcataacagaaaatacttagcagccagagaaacccaaaagccaattcagtctcaagcaaattcgaactaacctggaattgagtaagtgctaattgcaggtgtcttagtatactcttcattatcagacccaaaaagatctttctcatcttcttcttcttcttcctcctcttcataaggataaactccactttctccattatcattgcttctatagctctctactttatcatctccatgctcctctttcccgccgctacttccacttccgctatcgcttgcgctgccagaatccgcaccacctccatctccctctccatctcctcccgctgcagaagacgaagacgaagaagacgaggaggaggaagaagacgaagaagcattaccggaagaagacgatttcgaacgcgaagatcgtga

SEQ ID NO: 61059 - DNA, 584 bp, Arabidopsis thaliana landsberg
  unsure (1)..(584): unsure at all n locations
gaataattaacttcggaatgaatnnnnnnnnnnnnnnnnnnnnnnnnnnnnnnnnnnnnnnnnnnnnnnnnnnnnnnnnnnnnnnnnnnnnnnnnnnnnnnnnnnnnnnnnnnnnnnnnnnnnnnnnnnnnnnnnnnnnnnnnnnnnnnnnnnnnnnnnnnnnnnnnnnnnnnnnnnnnnnnnnnnnnnnnnnnnnnnnnnnnnnnnnnnnnnnnnnnnnnnnnnnnnnnnnnnnnnnnnnnnnnnnnnnnnnnnnnnnnnnnnnnnnnnnnnnnnnnnnnnnnnnnnnnnnnnnnnnnnnnnnnnnnnnnnnnnnnnnnnnnnnnnnnnnnnnnnnnnnnnnnnnnnnnnnnnnnnnnnnnnnnnnnnnnnnnnnnnnnnnnnnnnnnnnnnnnnnnnnnnnnnnnnnnnnnnnnnnnnnnnnnnnnnnnnnnnnnnnnnnnncaaagtcctctccccccccaaaaaaaaaaaaaaaaagggggggggggggcgcccccttctttgtgtttttaccctttttatgggggccctttttttttttttctcgggggggttaaaaaaaaaaaaaaaaaaaacaaaaa

SEQ ID NO: 61060 - DNA, 473 bp, Arabidopsis thaliana landsberg
  unsure (1)..(473): unsure at all n locations
tggaaaaaggtattcatcttacatatcatctcaagtctattttaccagatcactagcacgatttacatagtttttacccatagtgttatgttgtttagtacccttggcatgcatcagctcacttgtctcactgaccaactttagagctgtgcaatagtatctagaatttagtgatgtttcttctggctagtccatgtacttatattgcttgcagtattattattgatatgaatttcaatatggaaagatcaaatttatgtttatatatcaacaaggatacttattcaaagagtaggaaaatatttctctcataattgcaaatcatgataggtaggtggcctcattgcaatgctggtagctctttttttcttgtctcaaggatgggcgacatcatctctctcccctttttatatcctttttcgcaagttccttcttcttatctcgatctcgaactctatgnatatataatctgc

SEQ ID NO: 61061 - DNA, 491 bp, Arabidopsis thaliana landsberg
  unsure (1)..(491): unsure at all n locations
tttttgacttctaattcagatacagataactaggggggtctgggtcttgtccatacgataaaaaatgctacagccatgcatctataaaaaattctacgattcaaattatggcccagaaaaaaacaattctatcacctggacactacttaggctatttccaccggcctgcccatcccacctcctaacacagtcactatttttaacgatactatattgacgtctacgaatttagatgaatcaattgtgataacaataaatattgcatagagaacccaataaactaatcaaatgttgttgatattggtattttttttctaaaacttggccatagttagaaagatttaacttatatataggacaaattcaaagtgacataaacgtcatgcttttttacagctttaacttatatataggacaaattcaaagtgacatatacgtcatgctgatcttgcttcttnccacagcactaatttctaatgaaacacaccctc

SEQ ID NO: 61062 - DNA, 111 bp, Arabidopsis thaliana landsberg
cagatgaagtatagggcagacttgaacttttcccaggccgacatgattcacacaccttgctggtacttcacttgactagaattgccttattcgtggatagaagctggagaa

SEQ ID NO: 61063 - DNA, 411 bp, Arabidopsis thaliana landsberg
tttgccttactaccaattcagatgttgctttgctttgaaaggtataaattaatctacattggagcgccatctgccaaccatccagcattcgctactacatctctattcatttcattcaataaattcgtttctttaacataattaaattctaaaaaagcgaaaaataaggtcccaatattaatatcgtattaacacgcttcacaatatagtccttatttgacttttaaatgaaaaaaatctaacgtgatgattcacattgatcaatgctattattgatatataaactttgttagctcatatgcaaatgacttccaaaccttctcactctctattttctcaaaatggaagctgataatttgatgaatcttttctcttcttcaacgcatatactgcgccgtttcacaaacccta

SEQ ID NO: 61064 - DNA, 1749 bp, Arabidopsis thaliana landsberg
gttcatgcatttctagtttcttgcaatttgaagtatcaaagtctaacctttgcgttactatcatggttttcatgctggacttgaagattgaatatagtttccttaagactctgattctgctctagaagattactcttagatttttccaactccgtaacctgccaaaactttgttttaatcttcatatcagactaaatctatgcagtattatgcgtagtagcttcctgttttacacgagtaaatcactaaacattcacttaggaggctacagtgacgtgttcagatgcaatttccttggaaatgagaaaatcagttaagtttaatgagacacatacctgtgctcgcagccttgcaatttcattgttaaggctagatatcatttctctggatgacttctgcaggattaaatgtgtatgatgagtaaaacatgcccatcttattctaactcttaagagactcaacttaaaatgagtaccaagatttttatagtgtaagatagagttacctcctcagccaccaaggattcttcatcgtgttgaagttgttgaactttcttttctagactcgcctgattgaaatcatgcaatttttacaaggagaatgcattataacagaagaagatggaacccttatctccaatgaatgaagacatacctctttctgagtgaaggtagatctttcatctagcaattgtctcatctgggcttctgtgctagactgtcaaatttctataaatgtcagaactacacagcatcttcaggcataatgaaatgtaatgtaacatctatagcgatctgaaatgtcctgacaacatgacattctttcacgttagctaagaccaagtcctagtctagaatgctaaataccggtagtaggtcctaatctacatactggggagataattaagaaacaaaccaagttgaacagataaaaggaactttcatatgatcacacaaaggagaaactgtagtactaaaaaaatgatcccagtgttgaagatctctcaccatttcacgaagaagcatgtcgttcttgtttttatactgcacaagtctttcctccaacttttcctgcataaaatacaatgttattttgacctccaacttgcagatgatcctaaaaaaataagaaagctatggacacggctttatgcaattttcttcactaacttcgttttgtttgtgagcttcattttcagttctcaaatgtaagagcctttcttccaacagtgcctgtgaaaaaccatgtaattttgaccttcagcttgcagataatccagcaaaatagtaaagttaggggtatggctttatgctatttcttcactaacctcattttgtatgtgagcttcattctctgttctcaaatgcaagagcttttcttctaacagtgcctgtaatacatcatgtaattttgaccttcagcttgcagataatgcagcaaaatagtaaagttagggataggctttatgatatttcttcgctaacctcattctgtatgtgatcttcattctctgttctcaaatgcaagagctttccttctaacagtgcctgtaatacatcatgttattttgacctttagcttgcagataatgcagcaaaatagtaaagttagggatacagcctcattatttatgttatttcttcaccaacctcattatgtacgtgagcttcattctcttgtttcaaatgtacaagcctttcttctaacaatgcctgtgaaacatcatattattttgatttttcagctttg

SEQ ID NO: 61065 - DNA, 269 bp, Arabidopsis thaliana landsberg
  unsure (1)..(269): unsure at all n locations
cattaacactctcttatttgaaatagtctttcccacttatgtgtttcaatgataatgatcaaatgctttgggatgaagacccgcatgagtatgtaaggaagggttatggtatgttgttaatgtcttcctagtcttgtttggataatccgaaaacatatatttttataacaacattacctgttctacagatataattgaagatttatacagtcccaggactgcgtctatggactntgtgactgagctggtcagaaagcgtggaaaaagaa

SEQ ID NO: 61066 - DNA, 1186 bp, Arabidopsis thaliana landsberg
atattctctggtctgtcacaagaaaaatgggtaagcaaattgtaatcttctacttcgatatcctctatgtttgatcatctttttgcttcttcgaaattttatttgagatttcaacgttttgtttattgcgattgatgatcatagttcatagtaggtgagaattttttgagctgcatgttcatttttgttaaatgcaagaagcatctgtggttgaacaactaaaatttgagttttcttatatcttaaatttgtttatcatgttcttgttttgcttaattgtgtatattgaggaaaatattaacaaatgaaagtcttaaagtatttatgttggtccaaattcatgatgatttatgcgtttaacaaagtgtcttttcttcgttgattcttgactatgcaaaaaaagatttttcttttggttttgtctaatgcaaaaagatttggtcgtgtgtacagtttcatttatctttttagagaaattgatagttgattattattatatttgtatgtttgattatgtttagaatatactatattattttttcctttaaacaagctgtttttgtctttgatgtccctacatttggttagcctaatggttttaagataataatttagatggttagttgaattcttggtcatcatttgtaactaagtatactttagttattatactaataaggaacttgagttgtggttataaggaggcatagtatagtttctctgttgagtatacccaatatatcataatattgaatcgtgtcgtaaacgtgcatgcaaagtaagttgtcttggtttcacggattttgtgtaatatgatcaatattagactttctttttttactttggtgattggtgttgtgacagatatctgtatggacaaggagccagatggtgtggtggtctatgcgaacggtgattcgtgtaatccaaaccaagaaaatgtttctgagcctctcttagattcagtatcacgcgatgatgctaatgtacatacagagcttcgatatggggaagagaacatcgaagtaaacgaatatgatgttaaagagtgtactagtgagatcacccgttggtaagccgataggagatgattttgagtctaaagatgtcactaagtcaagtttacatgcaaagcatgcttcaaaatcaggtagaggggaataacaaaaacaagggaacacccgtt

SEQ ID NO: 61067 - DNA, 967 bp, Arabidopsis thaliana landsberg
actgctattcctacttcgatgcttcaattaaacaaggtcaagaatatgaatcaagatgcaaacggagatgaaaatgagcagtgtatcagcgatggtgatcttgataacattgttggtgttggggacagttctggattaaaggtattctcattttcaagacttcttgcttacttatatccaacattggaaatttcctttggaaaattgcatgaaaatttttgcaacaggaaatggaaactccacatacacttctgtgtgagcttcgtccataccaaaagcaggcacttcattggatgacccaactggagaaaggaaattgcactgatgaggcagcaacaatgcttcacccgtgttgggaagcatactgtttagcagacaagtgagtgatatttctattgccttcgaactttagtgcgagtcagataagatatttactatctgttttatgtcaataggagggaactggttgtctacctgaattcttttaccggtgatgctacaatacacttccctagcacacttcaaatggcaagaggaggagtatgatctcaataccccacctataaaaatttctttcatttattgtttagattttgtcactttattatatagctgttttgtaataatattatatcctaaaacttttgtagatattagcagacgcaatgggtcttggaaagactgtaatgaccatatcccttttgcttgcccattcttggaaagctgcatcaactgggtttctatgccccaactatgaaggagacaaagtgatcagcagttctgtagatgatctcactagtcccccggtgaaggcaaccaaatttctaggctttgataagaggcttcttgaacaaaaaagtgtacttcaaaatggtggtaacctgattgtatgtccgatgacacttttaggacagtggaaggtattccatgcttaatgcacgtgcacactatagtttggttatcccgc

SEQ ID NO: 61068 - DNA, 471 bp, Arabidopsis thaliana landsberg
agcccggcctttacacacgagaggggctcttagtggtaagaattccagacgatgctaataaacgcaaccaacacactgtacagatggacgttgacgaacaaaaccgacaaagccacccgatcctttgtgacacgttttcttttgctaacatcataacatacatgcttctttttaccatcctacctgtgctaaattcactttcccgttaggggtcatgacacttaatcattcaggactatagacatatcatcctctgagcaaaattacatcattcttgtaagcattggcttataacctaaaacgacattatgtaagagttatacgaggaacgtgaaacacgtgccgagccgtgtctattggtgacgcgaaaacatgctgagtcagcagcgcttatggaactaggtgaggaccccataaccagacaggatcgaaaagtgggaaagcccaaatctacgcaacatagacaacaca

SEQ ID NO: 61069 - DNA, 1109 bp, Arabidopsis thaliana landsberg
tgggaggcgcaatgaaaatgacatgcttgccaagataaatgcctccttctcaagggaccgcagggtatcccgcaatatattccgtgccctaaggcatccttctatatcgacacctataccccaaagctccatgtctgcaaggacattaacctgaaacacagaaggaaagcattatgctgccgcaaaacaacaaacttagcagagttagaaatttctttaattgactgcctccctggccattatctacctctatcacataggatattcgtcaggaagctgtatggtagcaaaaacttaccatcacaaattcacaatacaaaatttctaaaaggaaaaccaaccacagatggctgcttgagcaaatatataaatatttaactttgagcatatcatccagcgggatgctggtgaagtttagaaaatcctcagtatctaaagcaagttaaaagaagatttaccagcggcatttcaatggttgtcagtgcttgaagaagttcttcggaaacaaggatcttccaaagtgctgaacaaagggctctcgtttgagcaacccttctgcagcaaccattgtgggcaacccttcggatctgattcctccacctgccactgcgattagcagcttcagctgcctctggggatagccttttctttacttcctttaacatcacatttacagttttagcaacttggcatcaacaactatactaaggaagtacctataagctaaatctgtgtgatgatagagactaaccaacaaatgataaaaatatatttatacattgttgcttttcttgttcaacaccgtcatcaggagacatatgaaatatattgtatgatttcgctaatagtcaatctggaattaccttatcgatgtttggatttgagtgtctttcctcatctggccaaagaatccatatcacaatgctcatgtcaatggtgtggcttgtgtgaagaggaggcatcattaaccaagatccatcgaccaactcatccctgatcccttctggaagattcaagcgagtgcatctttggattgaaatggcgggactcttaagcacctgaatctggactttcaaattccacgtgaactttctcgtatttacattccc

SEQ ID NO: 61070 - DNA, 1511 bp, Arabidopsis thaliana landsberg
gaatttcttaggaataggaagtaatgcatgtctgtcttgagatatttatctgcataagtttacagatgtactcgttctaactataaaatgtcaggaaagaaattgatgtaaattctgtttttttttttttttttctttatctgaatgatttcttcttttgtcttgtacttcccttttatttattacccttccctatgtttctaaatccacaatagtgcagtcgatattcagtcttttttggatggtaggtttttgaagggagcttcaagcattgatcagcatttccagtccacaccgttcgagaagaatatacctgtgagtgctttattttgataatcactaagagtaacctgaagtcatcatttaacaaagaattactcttccaagaagttgcttatactcaggatagcaagcatttacattaactctccatagggatttctgtaagttagtttaattagtgtagtcacgccagagtgagaggttgatttggtgacttttgacgatttcaggtgcttttagggttgttgagtgtatggaatgtatcatttcttggatatcctgctagggtaagaatcgactcctttatcagaaagctgaagttttcatctcagtttaagatattcagcctccatcaacatcttttttgttttctcaggccatcttaccttattcgcaagcccttgagaaatttgctccacacattcaacaggtatgtgaactgggtttcccttttgtctccttaatctttgcttcttcatatctatttttgacataaaagtcttaaaattgtttacgggaatattaacggagcaattggttgatctcaggttagtatggagagtaatggaaagggagtctcaattgatggtctacctctcccgttcgagactggtgagattgattttggtgaacctggaacaaatggtcaacacagcttttaccaactcattcaccaggtacttgctacctataatttgagtttactggaaatttggatctagattttagcaagttctcatcacatgataagctaatgaggaaagcactaaatcttttgaaatgatgttttagggacgcgtaatcccttgtgatttcattggcattgtgaagagtcagcaacctgtgtaccttaagggtaggcttccattcctgctactgttaatttgacttgagctgttttatgcattctctttcgaaaataagataagttctgcattggattaacaggagaggtggtcagtaaccacgacgagctcatgtcaaacttttttgcacagcctgatgctcttgcatatggaaaagtaagacattacatttggtcatggcagtaaagagactgatgcatttactaaggttccatgctgaaacaaactctttgttcttttaccttctgtagactcctgaacagctgcagaaagagaatgtttcaaaaaatctcattccccataaggtaaaaactagtcttggatcgatgttgaaaaaacaaaacttctatgtttttcagtata

SEQ ID NO: 61071 - DNA, 1400 bp, Arabidopsis thaliana landsberg
tgataagatcctctgaaacgtttagacaaaataattttgagccatcagtatgattctaacacacacacacggaacacactcacactatatagttaaacctactatactacagctctttcctcaaaaaatgttttatcaagagagactctgtgtctgattcagaaggattcagtccaaccccatgcattcgccgaatgttgctgaaacccgcctctgcttctccctctcccattcctccatcgacaatcctccactcgttctcctccatgtcgcccttctcctctctttctccaccctctgctctctcttccttgatccctaccattccaattctcaaccttcttgtagttgaagctgttgttgttgcagttcttctgatcccaagtttcagctttgaagttgttgttatgatcccaagaatcagtgttggtgttgttgttgttatgatcccaagtttcagttttctcctttatcccccaagaatcttcattccatccatcatatttctgatcaccccatgagttttctggtttaccctttccaacattctcctcgttaatcccttcagcgtcaccccaacgagttccccaaccaagcccgccatactgtccagataaaaccaaagcatcgagtatcacaacatgctcttgttcttctgttaaagggtctggaccacgttcaaggtcaagtatcaactcattgtcaacttcagcatcccaatcaacatcatcaatgtaaacatcaggatcaggcaaagataagtcacaagttaaaccatttatctctgcccagaaacgagatttagcgttcttgaatgcgtcttcaccagctgagtcgtcccattggaccactctatcgtatatgtgcataaaccgcttggcctctacaactttccaccatggaactgaaccaatcacagcacaaaaatccttctcccacgctggaacagagatcttgcaattagctgcaagaaaacataagaatccaagagttagaaattctgatcacaggatgaagaataacttacagatcaagcaaaagctacaaacaataaacttgtcaagaatcagagggttaagaatcaaaagttcattaacctaaaatacatagaagagattaaagttcatatatttctactgtacatgcaggaattagtatatagaaggaaacataagtcaattaagattaaaaaaaactcacaaacctaacaaagatggagtcaattagtattacaaattctctaatttcactaacctaaaatacatagaggagattaaaagacccgaacattgcttaacgaacacaaaccctaattaagaacacaaaagaggaaaacccaatgagacacacattcaggaactcgatttgcaagcaacaaaagttatacataattgaacaac

SEQ ID NO: 61072 - DNA, 106 bp, Arabidopsis thaliana landsberg
gacattaattaccattctacccttccttccattaccccataacctctttatctccttgcaatccttggttcttctaacccatgaccgtacaacaacggccagaggc

SEQ ID NO: 61073 - DNA, 281 bp, Arabidopsis thaliana landsberg
aaatcctcatgagtcactagctactctccactgccgacattccatagcagagcgacagaggtcgacatgattcaagaacgagaatacctgaaagaaagaaaatttttaaaaaaacaaaaaaaaggatacttacatgtatttatcttaaaatgcaagaaagaaaaaaagaataccatatgtaagaggtcatcagtcaaatcaatatgaacttcaaaatcttctgtgtctgaagaaccattatcatctccatcatcctttttcccatctttccgattgtaatt

SEQ ID NO: 61074 - DNA, 1209 bp, Arabidopsis thaliana landsberg
ggctttacctttgttgactcatcttggccaaaaatagatgtttaattgtttattatgattttgccaaaaataaaattgtttattatgatttcagttactttttcagtcaagtgtaataataattatacattttgtggataaaaagaaacagactcatcggagacagacaaaacgtcaggtcgatggcaacaatatttatgtaaggagaaaaaaacgttgtatatatatatatatatatatatattttacaaattttattacttcttcacaatttttatttgtataatttgtctttgggaacaccagcggaatcttagccagtcttctgccactaaaattggatccactttaatcattttataaatactcgtctaataaatgtccgcccaatgagaatataaataaacaagcaagcaacattttgatcacagaaaagaaaaagcaagcaacattatatatttattcagacgaaagattttcgattttcaactttatatttttcagcagaatgattaaacttttagcgccaaaaccactggccacatgaaggcaaccattttaggtcaatgtgatcttttcaatcttataatttcgttatatatacacatataattgtgtagtcaatgataattttataggatgagactgtgaactaaactatcctcaaaatttagttcacagtttctataaaataaaagagagttgtctacttattatattgatatattttgtatttaaattcatcgaacaatgaactaaactggagtcaaattttctggttagtgtttacaaggccatgaagaaataggaaacaaaaaaaatgtaaagatattctacgcatttgggcattctatttaacattttaatattatctttcaggaaaatttaaagcatttgactaaatcttattgatgtttgcgtctatttacaattttaatattattgttttagtacttcaaagccttttccatctttcaatatagaagacccacggatctcgcggtcaacggcaaccataaggtccatccgtgacacattaagattctatgaaataaatcgatgcttgtattttcttaacagttacatgaaaaatgaattctaataacgatttttgtttagtataattttgtcataatcaaacatttgtataagtttaattcagattttgttattcatcattcaataccgccataaacccgaagatacgaa

SEQ ID NO: 61075 - DNA, 894 bp, Arabidopsis thaliana landsberg
taatggatgatgtagagaggatcaaggacgcaggaaaggtacgtgtagatgtaacagtgggaagtgccttagacattttcggtggaaatcttccatacaaagacgtcgtcgcttggcatcacaagcagcactcactccattgatatcgccattttcacctttgctcatcttttttatttgcattaccccgaaccttaagcttcaatattagcaacattaatcttcagctttaaacttttgtgcttctttctaaactcttcaagaatttgtcaattttgaatattttttcgattaatcaagtttatggtttggtttgactactactcatcaaggaaaatcgcattccaacaacacgtaaacagaaacaaatacattttgtttgacaatagcatatacagataaaataacatttaaactgaactatttacaacggaaactagaagaatacaaaaacagtgcggtgggtgtgaaatcaccgctttcgcgttgccgtgtttctttctgaataaaaacgttgatcagctgccacgtcatcaccaacgactattcaaaacgagttccactcaaaaaaatcagacaagacaactaaagtactatttcttctactttccccctgggacttaaaacactatataactggaccccacatgtattacacttgtcatccgccgcgtcaacatcctccaccacccaacaaatccgctcttctaccagatgcgaaacgcgtcatcccacccaaaccgggtaccaccggttctccgccgtcgaataccgatttctcaacagcttccgcaggaagtcggctcctgatgtcgtgtgtgtttctcgtcgacgtgtgagtctcacgcgctgacacgtctttgcagccgcctttgatcctgaaaatagctctga

SEQ ID NO: 61076 - DNA, 1469 bp, Arabidopsis thaliana landsberg
caaatataattaatgttaattccaaatgacatatactactatttcttttggcaaactagccttcatactttgactcaatcttttaataagatagtaattgttccaagtttataaatttaccatctaaaagaattttatatttgactaatgttgttagacatgcacaattttgttttagtaattaatttcacattttgaaaataaaatttcaaatctttgttagggtgtgataatcacgtgttcgcattaaacttttcctaaccagttcaaagatacatattttccattttgactattttgattaattagtatttctaagttagcttgatataatcatcagaatatataattatgtagattatgaatgtaattttcgtagttaagtatcccccatgttgataatttcttgttattttgattgtatattgaaccacgtacccttgtttgtcaaagttccatattgattgtgtttctatgaaatgttagatccgttgattgtggacacggtacgttgtcaagtgtaatttcagagaaatgtgttgaatatattgaatgacaatgcaacttaaactaacttttgtcataccttgtaactataatttgtaagtttcttgctttttaaagagtactttaatatgtgatttaaacaaatagaaataaacttttcatccgaaaaaaaatacaagtagggaaattatgaactaaccatttctgttaccatactaaaataaaagttggcagaccaaaagcaaaattatacaataatatgattgggatatgttttgggagtggagagaagaagtacagaacgaatcatatcttcactaacttaactaaccaaagccaaaacgaatacgtaactcaatatagattagcaattttctttttaatttgagcatttgaaaaatgtttttaaatataagatttattaccatttatgatctatgcaatgtattttcttaacattgttgagttttaggagtgatggtccacaacagactttacatggagcacaagtttagagtggagaacaatattctcggatatgaaatatacacatataggagatttgattaacatatctaattgtctggattttgagtaattgtcacataattttcagtgcgactgcagattttttttttttttttatcacaactgcagatttagtcttttaacaggttttctttataaattacaaattaatatagtatgttatttcttaattaattaataaatatatagataagttcaattgtagtctagtttgggtcacaggatacttaagctttctcacctgagagtccatgaaaggccttgaaagacattaataaagcccaacgtagcccagatagacccataaataaatctgtcacgtttaccacgctttaacggtcaacagccactagttactaaattgttttttttttttttaaactcatcaaaacaaagtccactagttatattcg

SEQ ID NO: 61077 - DNA, 531 bp, Arabidopsis thaliana landsberg
ttagccctaaaacttaattctgcgcttttgacatcacattcaatcccgttgttgttgtttttgtatgtgacacatatcaattgattgataacacgtgtcacgattgtgagccaaatttgatataataaatatgaatttataattttttttccttttttacctttccaacctaattttagtcctaatttttgtaaattttcaaaattttcattcattcaaataatttattttctattaaaattttgtttttattttttggtatagaaaatgacttttaaagttaaaacaaaaacctcaaaaaaacaaaaaacaaaaaaaaactttgttaactttcaaatttttcattcatcatatcatttgtttttccactaaaatttctgattttctttgtctttgtatacaaaaatgacttttaaggttaaattaaaaaaccttaaaaaaccttaaaaaaactttgtaaatttcatttaaagcaaaatttaacgataaaaaactctttaaaaataggtaaaagttgaaaaaagaacaaac

SEQ ID NO: 61078 - DNA, 260 bp, Arabidopsis thaliana landsberg
cgacatggggcggcctctctgggggccggggctataggggcactgtcccactcacaactaccttgtctcgaatgcaagcagacagcataggatactacccgacgctcggtggttaacataattcaggggggcgcgaacgacactttggacaaacggacttagactacgacacgtgcctctgggagcccaagctaccactgtgggtcctcgacaggccggggggcgcatgcgtgcattctagcccggaccttgacttaaag

SEQ ID NO: 61079 - DNA, 1534 bp, Arabidopsis thaliana landsberg
tattaccaacttcttaatctggtggcaacataatggaaattggactgcgagagtgcaaagaggatgagctcatttatattcatccctaatttcaccgtaactaattatattatacctttacaatattgccatccattaattttgaacctaaaaatagtttttttttctttcctttttgtaaatttaacattaagttgttaattggctggttgcctttcaacatttggagcatttgagattactttgtgacaaaaaactgaacatgacatgaatataatctagggtggaccttcactgaaattgatgaaaatgacattatacttaaaattaggctacctaccaaattcaccctagatttaatatatttctattggttacatctttactttaagatataaaaactaagaatgataatttacttctattacaagctaagaatcctagatatctcagtcgctcacttttgcagttgtttccctttacgattagcgtgctacaatcgtatcaagtcacattcacacactcttgtttattttgttcaaaaaatgaagaagaacaaaatagtaaaccgaaaataatgctatttgaaatataaatgcgaccgtattgatgcgggccaaatacaaatccggttaaaccggttaaagcgaaattggaaagtaataggaagtgattaaggtaaattaattaagtagtattaattagcgtaacattagctgggggattagacgactttgccaccgttgttaataccttccttgccttctttctttcgttaccatttgcgtgatccctatcttctttatcttcgccctccggattcttcaatattactaaatctgccattatctcctcgatttcgatgacgagagagccgacgcaatcgccgtcttcggagccggaggttcactctggagaggacttcgttcacatcgatgaccctaggcctaccggcgatatctctttaagcgacagcatagttaatgtggagaaggatgaactgctcgacgaagcggcggaggaagaatttagaggctccgattctgtgtttagcggcggcgatggcggtggagcggatgatgatggcggcgagtgttcatcggaggctactaaagtggagctaccggaggaattggcgaaaagtgttgtgattctgacgtgcgagtcaacagcggatggtggatcttgcgatgtgtacttggttggtactgctcatgtatcaaaggtaatcctcgttcttcgatttcatttggttctaagtttgcaaaggagctgtcttggaattgaactaatattttggtaactagtgaacggttcagagagtctcgttcttggaatctttggagaaagctgaaaattgcatgtggaattcaagaaatttatcaaacctttttggggaaataacgtgtttttggctgtgtcagaacagttgccagaaatggagttagggtttttgatttagtaataatctttattttctggaaacaaaattgctaaattcagcaagattgggttttgtttgattgtataggct

SEQ ID NO: 61080 - DNA, 534 bp, Arabidopsis thaliana landsberg
tagaaacctagttgcaggtacgaaatattcccaaacgcagaggaaccacagatattggcaagcatagcatgttcacagtaacgaaaaacatctaatcaatcagtcaaggtctcattcccaacattccacatgccagtgtttattccttatcttttcgaagctccaaacaacgtagagaagttacatagaaagaacatggtaaaagatctagaaactacaaagtaaggtaagaagattagtagattacattcatccacaaccacaagttcactgtttcaaacaattagattgctcacagatgatctcaacctcaggtaacaatgacatcaatgtgaaaggtttagcctttcagttttcaagcctagctcgattacgatgcaagtgaataagatctctcattattcacactaacgattatgtaacacaacaagagccttgtagtgaaacaaaaggaacaatctttgattcatgaacaatacaattcttcttctcaatgtaatcgaaacaaacattacagaacaatctgtaaaaaca

SEQ ID NO: 61081 - DNA, 157 bp, Arabidopsis thaliana landsberg
cgtctggtccacgggggggggctttaatagtatgagttccgcctactacttatcgtaacaggggcacctgctagctccagatctagcaacggagcgtggcgttttcaccgctgcgacgctgacgcttgaacttgaaatcggagtctttcagtcctca

SEQ ID NO: 61082 - DNA, 818 bp, Arabidopsis thaliana landsberg
aacaaaaggtaacaggactagtaacacttcgatttaaaatgtggtaggaacgctacgatgtgaaaaaatctaggccagaattttacaattcacaatgtggtagtttagccggggaagttactttgatatgtcgacaatgcttctctgcaccaatgttgattatcaactttgggattcaaaagaaataaggtgttttatctatggtgtgttgctccaaaggatagaccggttgtattcaatcgactgtagagcaatcttggcaatctgatctagtacttggaggctttagctagtcttcccgattattattcctccaaactccttggctctaactccttcttacctcttttcttcacgttttttttcttcatattttagctccaaaagcggtcatattatatataaatagagaaaacttgaaaaatatgcaaatatttttaaaatgagttaagaccaaataaaaatgccaaaaacacggaaatgaaacgatcaaaaacgtgacagacccatgccattacattatgctactattgctcctccttagagtaagcctcgagtataattgtacaagctgggcaagcttatgcttgcagcctacaaatctatataaatatattcggtcatcaaattatgtaaaagttttgtagtctagtggtaatgtttcgtctgttttgcatcacctctactgttcgggtcttgcacaaggaaaaaaaattatctctgatgaaaaaaccttattgatctctgatgctttaatttttttacgattttgttaacaaattaattaaattctgttgatgaatttttttgaataatat

SEQ ID NO: 61083 - DNA, 145 bp, Arabidopsis thaliana landsberg
  unsure (1)..(145): unsure at all n locations
cgttccgacaatgggggtgagttttattaatatgactcccgccatccccctatcggatcagcgtccactcctctctcgagatctnnnnnnnnnnnnnnnnnccttcactgcgtctatgctgacgcttaaacttaaaatagggatc

SEQ ID NO: 61084 - DNA, 275 bp, Arabidopsis thaliana landsberg
acctcgctttatttgttaggaatacatgaatgctaattatagcatgtcataacaacaaactttcctacccgcatttggatagagcaggaaattctgaatttacagacaccacctagagaacatctcacttcagacttctcggagccccatcttgagtactctatattgacctttactttcaaagcatattcaacgacaactacttctaagagaggtactgctgtcaaatgcctgacccaagttaaactagccactaccaactttatacctaccaa

SEQ ID NO: 61085 - DNA, 1464 bp, Arabidopsis thaliana landsberg
  unsure (1)..(1464): unsure at all n locations
aattgtaatgactcagttcaacttccgcggcacaatcattttcatagattttgatgaattcaatagtgggcggttttttctatacatcttacattcgcaagaatttgaatgatattagcccatatgacgagaagaagaataattcattacttatgtggttaatgcggagtggaaacgaatatctcatggccaactacaaatccaaatacgtcttttgaatccctgtagttttatactatatgatctagagttttttttggattttgtctcccaaattagaaattattatagtatcaactatccatcacatttatagaaaaaaaaaaaaaaaaaaaactttccatcacagcttggatcttgcggtgggccaggaaaaaacacatgagcatcggatctgtggaaaacaactgtcttatcgggtcaaacctttgagtcaattacacgttactgtgcatgtcataaaccatcaccaaaaaggaaaacaaaataacaaaccatgcatcttactaacccagtaacacaatgcatccataatgtacatagtatttgtgaattttttgaggaaagtattagtgaatattattactatgaaataccatgtaattacttctgaattatcttacttaagaaaattcaagtttagtcaatcaacattaaaactatagagaacccccaacgtgtaataatgcattgggagttgggactttcataaaatctcgaataaattaattcaaattgtctaattcgtccaaaattatcctgcatgggttttagctaagccagcctagctacatgtactgatttatacagagataaatatagacatgatatatatcaataaattaggaacaaatcagagtttttagatctaaaaacacggtgccttctcatttcctccggtgagttatccaaatcttgtgtttcttatcatatatcctatactttatctacataaaaattgataagtattcgttgaattcaaagggcattttacgaagaaaatggagacaagaaaagacgacatggagaaaaggaacgacaaatccgagccgttgctgctgccggagaatggatccgacgtctcagaagaagcgtcatggatggtttatctaagcacgatcattgccgtttgcggttcctacgagtttggaacatgcgtaagattcttttacgacacctattactttggaaataaaagatgatgagaacctaggaatttgtgacgattaatctttttgatacgagaaaatctgtgtttgttttttaataggtgggatactccgctccaacacagtttgggattatggaagagcttaatttatcatattcccaggtttatattaaattgattaagtcttctacgtttatagatgcatgtttaacaatattttgcttaatcttttttttttttttctctattggaatctagttttcggtttntcggatcgatattgaatatgggag

SEQ ID NO: 61086 - DNA, 1150 bp, Arabidopsis thaliana landsberg
gtttatcctaattatccctttttcataagaaaatccttacacaaagatgttaaatgtagtaatgtatttctttggataaagtacaaaggtactaaaccagaaatttagcaactgaagttttctctgcaaacaacaatgttttggcagagcaaattcctctccatcatttgttcttcaatcgaataatgagcggtggtggtacccactaagctatatctttgttcccataatttgaagcattctaacttgttaagttgtttctcttagaactatgaactaagaagtcacgtattcttacccaatcacatttagagctgtcaaaaatgtataactccgggggccaaactcaatccattagtttaagtgtgtgcatctttttttctttgataaaacagtcggtgcatcttgaaattatatatatatcgtgtcgctctctgtataatttttttttaatgatttccatttataaaaatacgatttttgtttcaattctatagcacacctctgtaattgaaattcatctaagaaatagacagaagcaaaatgaattaaatttggcactaaaatacgtgcatgcaagcaaaatatacattagttatgaaatttactataatcttggaaattaaattaaaaaaatatgtcgtgtttcagtgagcgcaaccgaaatccaactgtatttcaacctttacataagaaaagtcaaatttgtcataattattagatttaatcgcatattaacaaaactatagtacgaatattttgacaagtaaatgtgaataaaataaaataaaaaaccaatttaggagccacctgttcactctgagtctctctctctttcgacctataatttaataacaaggacgcgccaccgagagaagcagagatttgcctacaccgagactcgatcatctccaagttgtctccatttataatccacacattcatacggacaagggattacaaatcgagacaaaaactctggagaaaatcgaatcttcttattgcaattaagaactctaatttctcctgcaatcccaaaaagcattggtctttctcctgtttcatactcaaggtacgaacaaacatgggttcttgtttgttttggcttattcccattgataccttttttcattatcgatttgtgtgttac

SEQ ID NO: 61087 - DNA, 1373 bp, Arabidopsis thaliana landsberg
ggcagtctaccggttgacttccttgatgcaactattcctgaaatccaacgaacttctcttgccgggagtgttctatacttgaaatcattggatcttcctgatattgacattctcaagttcgattttcttgatgctccttcatgtaagaacttatttctatccggagtttaatgtctcttataaagctttctacaaaatcagtggactgatggtttgtcatgcacaaactgctgtttttcttttttttgcttgtgatactttgaattttccagtgatataatatatctctggtttttgtcctgcatataatattcagctgagtcattagaagatgcgttgaagcaattgtatttcattgatgcaattgatgagaatggagcaataacaaggattggaccgacaatgtctggtatgtttagcgcagctttcttctgtttgattttttctagtttgagctgctatctcatactgaccatatttgtggttcaacagatcttcgggtagagcgcatcattgtcaagaacattgatagaagcgaatgaaaccggttgcttatctcaagctctaacagtcgttgctatgctgtcagcagagacaactcttcttcctgctaggaggttagtttttacgatatacaataacctgggtcagattgtgaaatgtttaaaatcacattgactagatacagatgcgtcaactcttgtctttatggtttttgcttgcatgatagtaaacccagtgaaaagaagaggaaacatgatgatgattctaatcttcctaatggatccggatatggtgatcacattcaactgctacagattttcgaatcttgggaccgtactaattatgatcctgtatggtgcaaagagaacggcatgcaggtaattgttccattttcttccttccttccttatctattctcgagtattccaagtgaaaagcatggtgacatcaaaagccttactgcattgttacttcagaaggtggtcagttatatgctgtctctgcagttaatacaatctatatagcatagaaaatcccttcattgttgagacctgactccgatgggcgtcaatgtttgtattttctgcttcatacagttttataaccaacaattatgggagttactgaaatttactacctttgtttagatagtctatttcggtacattattacgtgggttccttatgccaataagaaagataacttttgttgaaaaataatttgcaggtgcgagggatggtgtttgtcaaagatgttagaagacagttatgtcagattatgcagaaaatatccaaaggttagatggtttcatgacaacaagattccgtgaaagaatatttaattatttctctatggctttcaccctaaat

SEQ ID NO: 61088 - DNA, 253 bp, Arabidopsis thaliana landsberg
tgcaattgcctatcatagggaggagaggaccgaccggacggtcgccaggattatcgccgctaaaccagtgcggacacgtaatcccgcgagcggatgcgatgactcaatactaaaacactatataattgtatgtcagatgcagttgcttcatcgcagctaacgggcatgcctcgggtgtgctgacagatgtattttaaggcgacagggtggcagatgattcaaagatggactgatgaaaataggatgcttatga

SEQ ID NO: 61089 - DNA, 480 bp, Arabidopsis thaliana landsberg
agagccttaatacatgattcccaatgtcttgaactttgtatcatgaaagaatattgcatttgcagaaggcagctgttgatcaaagttcagaatctttgatcgaaaagctaggatctttatactgaaagttaagaatatagaatatataagagaaagtgtcactcacagttagagttttggaagaagaaaggcaaagagatgctgcaaccctgtagtagttgctagtagtagcatccaacggaatcttcaaaacgccggaccatcgttccatgatcaaacaaccctgaaatcaattcttcaaaacaaaaagcaagttaatcgattaaagttgttactttgagaacattcatttgggaactttgacgaacactggtgtgcatgccaagcgacaaaggctgcgctaaaattagagggggcgaaaagtgagactacagagagaaaacgtgatcatttaccttacagttgagaaacactcacgat

SEQ ID NO: 61090 - DNA, 527 bp, Arabidopsis thaliana landsberg
tcctggactgggcgcaccgtgtagggagagagtccagggagttctgtgtaaattttaggaccttacagtaagggtctttacacaagttaggacggtgggttaaataagaaaaagagtaaggactcttttgaggttttacggggccaaaagggtatcggacaaggtgatccgttcgatcgacagtcgcaggctcggatcagatctctccttacaatacatagtattaggtagcgaccgttagatcctagattaacggctagatggatttctacgctaccctacactctcggccatccgttcgaggatcaagggccacagtttaacacagcgaacagacacctcacctcaaatcgtggccgccaaagtgaatctaacagccacagagtccgttgcggcaacagccgccacctccgtcgtcggtacctcgactggcgcgcgcatccagagcaaagaactccgccttgcggcttgtcctggcgaaggtgtccaagatggccacaccaccggagggctggcgtcgctagaat

SEQ ID NO: 61091 - DNA, 249 bp, Arabidopsis thaliana landsberg
cgacaggagcacgaacgggggggggaaacgtaaaacatacgcctcctactaaccgaaccagcgtcaccagctcgatggacatcaagaaaatgagcgacaagactgcaacacattcgcgctgtcgcatgaactgcactttgggaccttccgggccgcaaaaccaatgtgcgcatcgtaacagccgagatcatagcgagttcgcaccaagattccgaactatacgatatatctgagcggatcgaccagata

SEQ ID NO: 61092 - DNA, 251 bp, Arabidopsis thaliana landsberg
taacacgagcacgagcgggggtgtgtccattaacacatgagcctgctactttccgatccaacgactccacatctatcgacatctctcaaaggagcgatacgatttcacaacttcgatgctgtctcataacctgcactctgaggtcttcctattcgcaaaccgaatagccggtgagataccgctcacaccggactgagctggcacccagattccgagctgcatcatgcatccgcgcgcatcgaccagctatc

SEQ ID NO: 61093 - DNA, 793 bp, Arabidopsis thaliana landsberg
tcaagagggcaattcagtgctgatattttgctcgagtcgaaaaggatgtgaatcaactgctaggcatatttcaaagctcattaaaaatgttcccgtaaacgttgatggtgaaaatagtgagtttatggatatcagatctgctattgatgccctgcgaaggtctccgtctggagtagatcctgtactagaagaaactcttccctctggggttgcctatcaccatgctggtcttacagtatgtttacacattcatcatagatcttttcttgaactggctaaattataatactgggactgtgattctttcctatttacatgggcgacggtgaattttacgcaaagtgaatattccattcattggcacactgggcaactaactctttgtattacaggtagaagaaagagagatagttgagacctgttaccgtaagggtcttgtacgtgtcttaacagctacatccactttggcggctggggttaacctgcctgcaaggagggttatttttcgacaaccaatgattggccgtgattttattgatggaacaaggtacaagcaaatgtctggtcgagctgggcggactgggattgatacaaaaggagatagtgtatgtctaattctgtgaccctggaaactttatatcagaatttctgtcttgctaaagatgcatcgtgccattactttagacagaatgttcacatacattttttttttgtttggagtggtcaatggtctacgccttttgattcttgttctatggtttattttctttccaggttttggatttgcaaacct

SEQ ID NO: 61094 - DNA, 299 bp, Arabidopsis thaliana landsberg
tgtctcgaccatgatcgggggggggactaataagagtgcagcctacaacaaatcggttcaccgtctcctgctggctggggctcttgcaaaggagcgtgatgagatcactcatttgaagcggacgctttcagtgcacataggaatcttccagggctcaaaccctctggccgttatgataacagctgaggtctgactcatcaccctccatatgtcccgagctatcaccataaatcagagcgcatcgcccacgacattcggccttgaaccatgacatgcactatgcattatgggcgatcgac

SEQ ID NO: 61095 - DNA, 493 bp, Arabidopsis thaliana landsberg
  unsure (1)..(493): unsure at all n locations
gacactgttgcgtggaaagcaataaatttgagacagctaaccttgagacattattcaacggctgcgtaactaaactaatcaaacccatgtagcttaggtttattatacaagtttctaattatatctacaattattatttgattatgccgaaggttcaagtccaatcagctaactttttccataaataatgggtgaacttaattattaggtatttgaccagatcactagttattttacctaaacataacaaaaactaatttttttggacggcgaaatttacgtttctatgattcattcaattttttttcatgctatttattttagttatacacgcctactttataatctgttaactactaagaaatgtactaattagaagacggtgcgatatgataacattaacatggtgtgtgntgtgttttaattagtctcatgttctttttcagtatttgttctattacaaaaacatagattgttcccacatttccatcca

SEQ ID NO: 61096 - DNA, 420 bp, Arabidopsis thaliana landsberg
ttgctgggacaccctttcacgcgtgtgctcgcgcagcgcgtgggcaatttcgtgttctatcacagccgccagctcgtcatctgtcagcttgagcttttcgagcagggccgtgtacacagcgatctttccgccagccatgcaccaggcattcagctctggcgatgtcagcacattgacctcccacttccagccaggcgcgtccgcccgaaaagcaccggtctgcgcgatcaggcggcgagccaccgccctcacccgttcaacctcctggggattgcggttcagctttccttccgcagcggccttggccaacacctgggcgtaagccttctgtgcactggcatcgacctcctgcgaacttaccagcacgaactgctggcgggtgacaccgacttcaccggcgttggtggtttgcgtggtcag

SEQ ID NO: 61097 - DNA, 277 bp, Arabidopsis thaliana landsberg
cgtccagaccagggacgggggggggacaagtatgagttcagcctgcaacaaatcgaagcagtggcatctgcaggattgtcatctagaaatagagcgtggtgacatcactgagtagacgcgggcgcttcacgtgaacttaggactgtgccggggatcaaaacgtatggcggttccgtagcagcggaggtctggctgatctgcacccagatgtgggagctttaccatcaatcagagcgaaatcgccagacattcagtcttgaaaattgacatgcactat

SEQ ID NO: 61098 - DNA, 345 bp, Arabidopsis thaliana landsberg
tgctctctcatgcaggcggggcgttgcgcttaatgcacactcatcagacacaacacccacagtgccaaaacaataactgaatatctccacgaggggacgaaggcaagcttggatctggctcaacactacgcttccattgtcactaactcaatagggcttaacaatcctctgctgatggcttaaaaactctcagtctaaagactgaatacaagagatcacacatgatcacggggtttcgcaagaacaaccacttataccatatgccagataacagccaggagacttagatacgcctaaatgttatctaaataacatagactccgaccctcttacaagcatcacaaa

SEQ ID NO: 61099 - DNA, 197 bp, Arabidopsis thaliana landsberg
  unsure (1)..(197): unsure at all n locations
aaaaacagaaagggccccccccccaaanacaccgacaacaaaccaacnaagaacacacaccccaacacgacacaacacacaccgaaaacacaacaacaacaccgaacacaaacagaaccccacacgaaagccgacacaacacaagcacagacacagaaacaaaagcaanggacgacaaacataaacaagcaacaacc

SEQ ID NO: 61100 - DNA, 1118 bp, Arabidopsis thaliana landsberg
tttcattacttttagagaaaaaaatacagttgaaacttgaaccacaactactcctcacgtttttgccttgaggaatatttcaccttattagggccaaatttgtgtctctgatcttcttgtactccgatgtctaacgacatcgttatgtattcacaatacataaaatttccaacaaaaagaaaagtagttgatctcaatatctcatcattaattttcaatcaaatctttgtgggggatgggatttattctaagctcaattataacttatataagaaatgaaaacaaccaaacacaaggttaaagagaaagtctctttattgacaattctttagtcgcacacttataatagattcatctgctattttcctaaactccagccttcaatctcggtcctagacattcggcaatcatttacacacatatattaatacattaactctattcttatttttccgattttcttactttaataagaacaactacaatctcaaacacatagcaagagaagagatacacaaaacaaagactctgtttgttattcttctttctttttgttttcaagaatggagggaaagaaattgaatttgtatgctccattaccatcaataaggcgaattccgtctatgatagagcgttcaagtgagttagagaacaagaagacgacgattacaagaccagagcttcgatcatgtccgagcacaaaacaagaaacgccggtttttgtattaccagaccagagctttgatcatctcacagaaccagcttcaattccttttatgtgggaacaaatccctggaaaaccaaaagatgacatggctacattgattcaagagtcaggtctactagaaaccgatgatgaagaagaagacgaagtagatgaagatttggatacggtttcttcaaatgcaagcttctctgttaactgcagcacaagtggagttagcgaaatcgagaagaccggtgagagatctgattgtgatgagaagtctagagaaagtcttgatctaatgatgtcaagattcttaccagctgctaaagcaatggctcttcagacacatcagaaacatcaatcttcttataactcttcagagcagaagctaatcactcaaaacagagaa

SEQ ID NO: 61101 - DNA, 2109 bp, Arabidopsis thaliana landsberg
  unsure (1)..(2109): unsure at all n locations
ccttctggcaaaagcactgtggacgcaattggatatccctggcgaattccgcaatggtgcagtaagtgtttgccaaccttctcaaatcccattaaagtagtagtagcgtttcaagaatcatggactcgagaaaacttcaagactcaagaattcttgataataatactcatatgatctatactacctgtggtttcttcagcttccagggctcatatcgatatccgcaaagtttgttcccacagtaatgaaccttatcaagaaccttgcagcgcaaggcgaacgcctcactgcagctaatccagagaaccgtcgttcgagcaacaacacttcttcatcagaaaatccaccagatcacaaaagctcctcaaaagaggactaaagaggagagaaacaaagaatcttcttactctccaaaggtttgatctccagttcttgacgtttttttctccttattccctcactcatgagtccaaaacgctgcgtttatagggaccttttgctctgttttattagaacttctcattatacacacgagtgaattagaacttgaaaacgttgtggcatcatttgaatatttttccttcaaataaacaaaaaaaaaagatgaagatgaaaaacaataataaatatatgtacgttctataataactcgtttcatgaaagtggaagcatgggatgagatgccaatcccatgaaaagtgagcaaaaattaatatttacattaactgctgagtgggtaaagtttaataaccattttctaaaaataacttttattcagaatccaactcatggattggtgtgtgtatttattatcatcatttctatacacatatccacccccaataactctgtcaattatacacctcaaaatcactgtaagttaaaaaaaaatgaatttctacaattaatcaaagaccgtccaaagccttcgtggctaattggtgtttaactattcacatttttagtcaagtatttttgcatattatatgagattaattttgccacacaagatcgttaataaactcgacatgatgattctgtttatgtggcttctattaactaggaaatgaaacaagggagttatggttgtgactgatttgaagtcagagaaaatggctacgtaatcttatatgaccagaccaacgtacgtgatgcgatgtgacatttttcattcaacactaaagttaaaaccttgattgtttttgtattacatttggcaactaatccaatatgttttgttagttgttagtactaagtactgactgatgatcacattcacgctcaaccaaataaaacggatgatattgtttttggttaggtgaaagaacaattaaattagttgccaaaaacataacccgtgaagatttatgttagtaaccaacctacagtcataattaataagtttatgactaatagtaattaaatgacttgccaaaaacatggctctgtatagtatagtttttagattttggttaggtgaagatgattaattgatacactatgaatctatgaagacttgatccaacggctaccagatctccgacttcaactgttttgatatcgccattaatgatacagacaagctgtactactatcctttttatctctttattgttttatatgattttacagtaatactattactaagtactaacaaattgtttttctttgcagctggtcccaaaagtcaaaatcatgggacaaaaaaacgagttattattcttattatcatcaccaaggtaaaaaaatgtgaaaggaaatccttttaaggcttagtttcaatataaatacaaagatgttatttgatagtgattgttctttgtaacgaagtacttatcattaatttcaatttgcaacaaacaattctgtaacaataagtctaatgtgaggaaagttactagctagtaaaataaattagtaggtaactattttttatgagtaaatgagggaactattaattgagtaagatgattcatatgtccttttcatttgctatattcgacagaatgggacacacctaaaatcaaatttacgttttagtgtagaccaccccaacatctctttattacacaaactgngttttttttactatatgattttttaccgaat

SEQ ID NO: 61102 - DNA, 642 bp, Arabidopsis thaliana landsberg
cctattgtattatgtcattatgtgtgtagaactagaatcgtctcctttgcccgtaaacatagccaaaatattgttagtaccaagaaacgttaatttggccatgcatatatatataatttactccatttgttactacagttttttggatttgtttggtgactttaaaaatgttttcatgttcgtgacctcatgatgatgattgatcgattgtgaaaaaaggacagcttttgtaaggaaataccgatctaatactacagtgacgcgactgcttacgtagacttctttgcctcctcttgtcgtagctttgttttgtttttttcctttaacaaatccttattcacaaccacaaacccctttgttgttcatatgatcatataaaatagaaatatgcatacatttcttttttatctttaaatgtcatttgcagatttatatctatttttttctacaattatttaattaaaatttaaatgccaaattggtatcaaccactaatttgggtttaaaaacaaatacatatctttgttggatcagaagaatagttgtggtattgaaccgttggattgaaccagaatgtaaagattaaacgagacttcacaaacagaacaaataatatttgttcgggggaattctctaatatat

SEQ ID NO: 61103 - DNA, 1700 bp, Arabidopsis thaliana landsberg
taaagaatagactgaacagaaataaaatttcattttctctaccctgtcattttcctattaaattaacggtgcctagaaacaaaaaagaagaaggaaaaatagtaattgactaactatcaataatattcaatactagtatttactatcaaggataactgagacacacatacaatatataattatatactaatacatagtataaatcttttaaaattagcaatagtatttgtttaggtttaaaggttaattaatgaattaatttagatgtcatggattaaggtcccgtttaagatattcagtattttagttttaagccttaattgtaatttagagttagaattaaattaaaaaaaaaaaaaagagttagaatctaagattcaacaacgtggtgaagtatgaacagtatgagaaaggcaccattcacacgcgatttggccgccattatgagctaaaacgcgttatgatgtcagccgtttatgtgtggactatggactcgcatatatcattcggctaccatttaattacattataattaagtgttgattaatattatcattcatgaccatttatttccaatagcacacaactatcggggtatttttgaattgaattatcgtctctcttatctcatcagttcactacaacttgttacagctattattgccactgtattaattcgtttggaccaattgtgacatctctaattgtctagtaaagaaacatgtcaacttccatcagtattttattgttagagattgatttatactagttgactagttgtaattgactgataatagttggtatcggatagtatctcgttataattttcttagcttccagcatttcgaattttagaatattgaaattcaaccatttatgatgattcaataatatttttcatatgttttttgatctttaaattgtaagttacagtcaagggttagaaatcagcatgttagtttttttcttttttgatctattctgtcatctgtatatataataaatatttatggacaaacactatttaaaacaagatccagtgtttggtgtcctaaaaagaacaacatccttttcaattaattcatttttgactcgttggagattctagaaccaagagacagttgagataatcgtgtaaaggtcaaatttagctctttacatattgatatgtattattattattttttgctaaaaaaaacatatagtaatatattttaaataacaaacacaaaaacagtagagaattagagatattcgtaccgtccaagtccacgcggacaaaaattgtgacacgaggccacacacacacacaagaatctctagtccacacccacatgaccggccacatcgcctataatccctatccatcctataactactacttaccttcttcaatatccattacccaaaaaaaatcacccatccgaatattcagcgatccctgaatactttttccacaagaactttttgatactctacattattcctctgattagtttttctaaacaatgtttgcaatagtgatatttgctgagctacttggccagtacacggctgctctcgccaaaattgtctccggaatccttccccggcgtccccatgatcggagtgttatttacattggtggtttctccttacctcgtccttcttcttctccggttccggacttctcttcttatctcgttgacttttaagttcta

SEQ ID NO: 61104 - DNA, 447 bp, Arabidopsis thaliana landsberg
  unsure (1)..(447): unsure at all n locations
tttccttgctgtttccttagtttagcccattggttgtggctcgttctttatggtcacaacgatagcgattacggtgtatgtcggtgggtggctgatggccacgaagaccactgaataccgcaagtagaaagcaactagggctgcgggcctaagaatccgcaccctctaactttccagttcttttcactttggctaggttacgaagctattgcaggtgtctttgcatgtgcgcctacaactcttacgcaccgaaaagaggcccagtgccctattaagttagggattacttgccttctgccaatcatcttatgattcgccgcccagctctcccgcggggtatccagtatgtgacgttaacatcgggcgtcccggcgagtctccacttttgagcgattcaggaaatcgcctccggccccggatgaccgnctcgtcgaaaagtaggtcgct

SEQ ID NO: 61105 - DNA, 1241 bp, Arabidopsis thaliana landsberg
ttttgtaaaattgtaaagttgcgtttgtcttgttgaatcgcccgtcactaaaatcctctccgagaatcctcctccgatctgccactagctatggcggtaagcatcgccggatctccaccgtatttcaccggccaagattcgaatcctagtttacctttcttccattttcacttttacaggaatcgtctggtaccacgctaatggatctgatctcggcggatccaaccccggttcctgcacaatctacttcttcgtccgcatcctccacggcgtctcagccgacttctgcttccgcatcgtcttcttcgcatctgcaccatccaatgtcgacgaagacgactctaggagagaagaaatcgaagagagccactttgatgcagatccaaaacgacactatatctgttgctaaagctgcactgaatcctgttaaggccaatatcatgcctcaaaggcagagacagaaaaagaaggttcgatctactaattgaattttgtttggcacatttctctgtgtttgaactaaaccctggatcattggagctaagataactagattgtggttgtagatttgaattgttaataggaggtatcagtgtatatagggtctctgttgtaaatagagtcttggtgagtcaatatacctatgtcttgtttcgatgtagttaacacgactttatgttgcaaatgacttcacagccggtttcctattcgcaacttgcaaggagcattcatgaattagctgccactttggatcaggtttaagtttgtgttcttatgctctgcctttatacctctcttcttctgctgaaaatagtatctgaattttcttactgtttttctcgcgagtgagcagaaaagttctcagaaacaactagtgaatcacgtgttccctaagcttgctgtgtacaactccgttgatccttctctggccccatctcttcttatggtatgtgtcactggttactcatttgacgaccagatagtgtcagatcaagtacagtttcttgtatcgttttttataactttatgatggagcatctaaaatgatttgttctattagagttttttttttctctacccattaaattatcatggatcttcacaaattcgcattttcaaaaacaatatccgtcaaagagaggcatcaggtttttagcattctttttctcttgtgattgatacagcttaatcagcaatgtgaagacaggaatgtgctacgatatgttcattattacctagct

SEQ ID NO: 61106 - DNA, 489 bp, Arabidopsis thaliana landsberg
gtctttctttgcccgttccggccggcggtaccagagcttgagatagatcagcgtcttgcccttggcccttaacggcgcaatgtagaagcgattccagcttcgtgaattcggcagtgattgtccgttggattcatgctcgaagccgccgtccgcgccccagtggttgaagcggacggggtccggcatccagcggtagaacacctccgggttgtagtcggtttcgtagaacggcgaggagtccttcttgttgtaggcctgccagaacgatttctgcgtataggcgaagtagaaattggtgtggaacagcttctgcttggcgctgatctggaatgccacctcggtcttgctgccgttgtactgcgggctgtaggtgtagggcatcaggtacattggccggtgcgtcgacagcccggtgccgacgctgacaatcgagtaggcgttggggtcctgatggaaattgtcgagatagccggtgccggtccgtggcgc

SEQ ID NO: 61107 - DNA, 471 bp, Arabidopsis thaliana landsberg
agccctggctgaagccgggcattctgaattgttttgatgatacgttccatcatgttgagtgacagataagcgtagcgaggtgctttgtcaaattagcacggatatctagagccagtttgagtggcgtaagaatgtacgtcagacagatggattgttgtttgtagtcggatttggtttaaaaatttgataatcaatatgttgtgatttctttagcggccttttttgagctaagctgaatgtgttttatccgtctgaatttggaagcttatgaggggttaaggagcaagtttaagataaattaatgagcatgtggaaaaaggaacgagctaaccggcttgcaagtttttttgtggttatcgctgtccaaggaaacttggacagcgtgaccagtctgcctggtttcaaaggaaaaatggtctgcttgagatttgacctgaccggaggtgctgcctacattccgctttctgtttt

SEQ ID NO: 61108 - DNA, 437 bp, Arabidopsis thaliana landsberg
cgaaatgatagagttagacattgacatttgatttctaaaaatatgtttttaacttttaaaagaagccaaatggaaaatgtgtcatgttactatgatcagttgatcttacctatcataggaaaaaataaaggaagttctttaaaagcaatcatcttctccattacaattgtggaataaaatgagcactgtttgggaacacacacaaaaaattccatgtaaagtttttttcttttttttttttttcttttttaactttaatattccatgtaaaattaattatgcccattgttttttgttttccatatagtattgtaagtttttttaaatatatattgtaatttagtttcattggactttggggtatttaaaagtattcttcactagaatgatacgtaattaacaaaatttgaaaaaagtataactctaaagcgatcgag

SEQ ID NO: 61109 - DNA, 665 bp, Arabidopsis thaliana landsberg
atagttcgattttcttttttcgtaaaaaaagccttttattataaataagagattttttttttatttaaaaaaaaagacttgacaaatggataaatttgctgcaaatgaactagaagagttaatattgataagaagttgaatgttttagttaaatttactaaaaacagttaataatttttaatatttctttaatattttaacagaaaacattttttagcattaacataaaggaagaaaggatgctttattgtaacatttacatttcttatagaaagttttttgcgtttttattatatatttatattattatatataattatttttaacaaaaacattcaatttaaataaatgttatgagtttattttagattagcatttggctatttatactggaataaataaaaatacttataatatatttagatatcttattaaaatatttgaattcatactatatcgttattctagatttatataaaacaatttacttttcgaaatgaaatatataaaatatgctcaataaatgatctttaaaaataaaccttgttaaatattaatacaactttttggcacccattactataaccattggtcaattgtcatgtatcaaatttggcattttccttcctatttgtaatttggatcttttcttcccattctattgt

SEQ ID NO: 61110 - DNA, 1415 bp, Arabidopsis thaliana landsberg
tgtagtcgattagctttatctacaaggatcttttgacaacccagttgctagcaatatagagcctaacctaacctgatttgctttcgtagacactcgttgcaaaagccattgcgggggaagctggtgtaccgttctaccaaatggcaggatctgaattcgtcgaagttcttgttggagttgggtcagctcgtatcagagatctgtttaaaagagctaaggtgattggacatatgtgtatttatacatttctgtgcagagatgttaaatagtatttgatgatgtctatgtccttgtgcaggtaaacaagccatccgttattttcatcgatgaaattgatgccttagcaactcggtatacaatattttcgtcccttgtatctagattttgatatactaccttccttgcataatttttcaacttgagacggagtttaactgatatcgctctttatattttggtattcgttagacgtcaagggattttcaaggaaaactcagaccagttgtacaatgcggccacacaagaaagagaaaccacattgaaccagctactcatcgagcttgatggttttgacacaggcaaaggtgtgattttcttgggtgccaccaatcgcagagatttgttagaccctgctcttctacgtccaggtcgatttgatcgaaaggtttgtgattaacaaaatctagacactaaatcttctgttctcaaatttttgatagcagttattcgaattaataaacaaccaaacgacaatcgcaagccatttgaatttatcttgcattaattttgtagacttaagagtaccggatagaccgttaaaaataatcttcttatcagataagagtccgtccccctaatgcgaaagggagattggatattctgaagattcatgccagcaaagtcaagatgtcggattctgttgacttatcatcttatgcaagtaacttaccaggtataaaatctacaattgatgttgcaaagaatatttgttatgctcatggtgtaccttttcccatagacaacttatgtgtttgaacgtattggcctgtataaaactttgattaaagtaattgtttatatcaattacaggatggtccggagcaaaactggcacagttggttcaagaggctgctcttgtagctgtcaggaaaacgcataactcgattcttcaatcagacatggacgacgctgtggaccgactcactgttggtccgacacgtattggtttagaattgggacatcaaggtcagtgtcgtagagccacaactgaagtcggagtggcaatcacttcacatcttttattgcggtatgagaatgcaaagattgagcggtgcgatcgcgtttctatcattcctcgaggtcagacactgtctcaagttgtgtttcatcggcttgatgatgagtcctacatgttt

SEQ ID NO: 61111 - DNA, 527 bp, Arabidopsis thaliana landsberg
taactcggtaaagcacaggttagttttaagaaacgaaataggaccgtcacataatttggttttcacgataaataaataaacatgagcatgcacttttaacatctagtagtgcgaatcatatcgatgatgtaggccacaaaagaatataaaaaaagttggatatctggttcatatctgtgcagtctaataatcaatcctaaaatattttttaaaatatattctatttggtgggggatgtaacaaaatttcataaagatatttgacgaacatgtatatatttgacagggatgtgacaaatatattatttacagctcatcatacaaatacaggttatctaagtcggattttctttcttgtataatcattaaaactttataaattataaataatcaagctattgtatatgtaccacacttggtttcgtatatagactttataaaatatatacctcttatatcgatatttcgttctgtcaaaaaataaaaaataatcgttaaagatatcatttggatgattgatcatcttat

SEQ ID NO: 61112 - DNA, 125 bp, Arabidopsis thaliana landsberg
gtgttgcgcaactaccgcagggatggcagcccgttctggaacgagctgtcgatcaccccggtacgcaatgaagccgaccagctgacctactacatcggtatccagcgcgatgtcaccgcccaggt

SEQ ID NO: 61113 - DNA, 1631 bp, Arabidopsis thaliana landsberg
ttttattgcctgagtttcttgtttggatcaaaggtccatttaacctaactcgtaagcaaaatcaaaatctctaatcttgagtttttcttgttcttgtttatggttttttgacatagttataactgtttttgcaggaagtccaaagagattgagatcaccatggatggcatttcctgtattgatcaaaacattgtccaagtttctacctccttctcaaatacttgtcattcagaaacattacaaagatcaacacgtaagtgttttttttttttttgtttcctcttccattatcttttgaggtgatttcatttcacattctaattgttgctttcctttggatttaacagaataggagaattacacggagcgaactaatccaacgagtcagaagcataaccggagacaagttactagttcacatcatcaaagcttgtggacataaagtacaacactaaatctccattgcagatcactttggcgtttttgtttcaaggacacaatcaccatggttgtatttgtctgtttaccaactccaaaatgatcaggactggtagagtccctttctattgttttcccatgatagtgatgaaaaaaaattgttcactagattatttaagatggattagattagggtcttagctacattattaatgaagagaacattaacaagttatcatcttgtttatcttttcactcttcttctttcaaaaacatttgtattattgtctggctttgagctgaagaaaattctggtggactgagttttacaatagttctctctctgtcttaatccctctaccccttgactaagtcaacgtcgttgaaaacttcatgtttcaagctcttattccctcacacggaaactactcgtagagataaaactacaaaactcatatttatttgatgcaacagcacactaagatcttagtttattaattattagtggacacaccacttctaagtagatggaggaagttcccaaccttgtggaaccggaccataatcgtagatgacttctctgtggcatgaccaaaccagctttatagcctctggtgtccctatcccggcccctctcgggtcccccgcaggtccaaacctgtgtttatatgatagtttaacttttcctcaaagaaatagaaatagatactttaatttgggagtgtgatttttcctctcaccagtgattctgaggagctccagttgttcttcctcttagtccagcatatgtagtcccattcactgagttccctattacctcctgcacagatttgttacatcaatatcgaagggaaagagaataagagattgattgatgataattgtgaaaggatttgcctgaagaaagatgggatcgtttgaaacaacagctgcagttagatgagcgtgcatcctctccaatgcgtccaacactagaggaagttgatcctttttgtattccgttacaatctggatatcatatacagaaacaacactatacgtttcagtaaaagaaacacacaagatcatttagacaaagcttataaagtcgatatcaaggtaacctgaaatggtccaaagatttctttggtgacgagttcctatgttttattatccttcaagatttcttcaatgggaacataaactgcagttgg

SEQ ID NO: 61114 - DNA, 378 bp, Arabidopsis thaliana landsberg
caagatagctggataggttttcactcctttctccgtgaattacttttcgcaaggaaatatgggccagtaaggataaaattttatgccagtggaattgaactattaatgaacttattatgcttacttgctccccaaagcccaaagcctgttaattcaaaactcgaaagtccaaactttgacataaaattcaaaaagacttttccactttactcaaatttccccaatttccctcactagaaacaaaaaaaaaactagccagtggaagacaactgacaattctatcgcatgtatcaaaacgacaaatcaataaacgtcaaacgatatcaacacgacttcgccggctcagctcatttcttaacttctgagagaagaccctac

SEQ ID NO: 61115 - DNA, 1427 bp, Arabidopsis thaliana landsberg
cacacatgatatccctgcttttgtagcagcctatatatatagattaaaagtcacgccattttaagattttttttccagaatagtgaggacaagcaaaagataagactttagacctgcaggccaatcacactgtcctatacgaccaaacagtctttcactgaaacacctagcttctgcaaataaccaacatatacagaatgtgaaacttgggctaattcttcttgttaagttatagtaactatcatattacttgggagttatattacctcggcagatgttatatatatcgatggatcgggttttttctccttaacattatcccctacaaagccaaatatacaaccaaagggattcaaactttagaaaagtgtttaacacataaaatgcaagtataagaagagagagaatgtgatgaaatcacctgcaaggaagcaatcaagtccttggaaccgctcctaaacgacataaagtataatcgataaagaaaaaactcgaaagaagcatggtagataagagattggcgaaagggaaacaacttacgatgtcgagtagattctcgagacataagattactgaactctttgtagctgcagaacaaacagctagttttttcccctggaagcatttcaagaacctattctcataaagagctaaaaatacagtttagacaattataaaaggctaaaaagaagatcttattacagcagcttttgcttcatccattagtcttattacaccaggtcttggttctacctgaaagtaaaaagcagagagagttagtttctctcagagtaagtaatcccaaaactaagatttggctacttacacttcctgattttatgatttctttatacctctcagttttccaatcctgcaaaagataagaatccaatcttttaacatcaacattgcagtaaattatagatttggttcttcttcaggcaagtgacctgaagagtatcgattaacttggctcgatcatcgtcattctgaggaggagagtcaaaaatggtggaagttggccatccattttctttgaaataccaacgcattttcggtttcccacctccgactagattctgaaacttatcgtagaactcgaggctccaatcgagagacgcagaggaagaaggaggacatcgaacatcgaaatgcgagaaagcatcgttgtaagcttgacggtgtagattctcggattcgagaatcacgccgtcgcaatcgaaaatcagagcttctagagaacgtaaaggcaatgccgagacaggagaagaagctctagatttcgaataaactcttctggatttgaaacgcagcgtttggaaacgaggaaagccgatgagcgacgaggaagaagtaacggaggaggaaccagcggtggatgatggagagaagagaatcgcagagtggttgcaagaaaccgccatatc

SEQ ID NO: 61116 - DNA, 669 bp, Arabidopsis thaliana landsberg
tcaagaggtcaggttaagaacctaaccttacttacttaccaatagaagtttttccttggagattgccatttgacattagaaaaagaaaaccttcattgattcgaccacaaaacagaagcgaagaattatgtttttgtctttgattttaccattaaagaaacatataaactttttggtttctgtgagcgtttttttgccttgctatcttctcacattatgtgtttttgttgtaatggccataacttctgtgattggtctaaactctctcactttggtgcattaacaaaactttgatttggtttggtttggcttatgtttaaaagtggttcttgttgatatagtgtaactcaattcatgtctatgttactttaccgttgacaagtgatccgtggaatcgtagaatgatgatgttttgtagaaccattctcgtccttataaccggactcactatgcataataaagacagcctcgtactctcaccaacaaccttcgttcgataagggacaataatgctgacgatcaatgtatggcaaagatcatcttatcatataaagaaaaaaatgagtacactcttaagttcttccctaaagggggattgagaaccaagtaaaaatgaatacaatgtgatgcaaaatcgtattccttgttgtgttcatctcaatatccttt

SEQ ID NO: 61117 - DNA, 327 bp, Arabidopsis thaliana landsberg
gtaatgattttgtataaattaaagagacatatttccaggcatcttataattacgaaatcacgtttaaccttcttaaaagattgatcataccgcaggatgtgaaagtattttgaacatatcataatttgaatcatatatgaaatgttgctgccaagagcattcatatttgatccaccagaatgtcataattgatcaaatctgatatttgatccgccaagaccctgagcattcatttgatccaccaaattaaaaagtcctagtggattataacttagaattatttacttttattaaatcaactaatctatgaaccagtcaaccacatac

SEQ ID NO: 61118 - DNA, 256 bp, Arabidopsis thaliana landsberg
aggaagagcaggatcagtgcgacccgcatcgaggtgagctgccgccagaaccagcggatccagcctacgacgcccagcaccggcaggttgacgagcgcctcctcgcggggggcggtggacagctgggagcccgcggcgcccagggcctcggcgtccgcggcctcacgctgggctgcggtctcggaccctgccgccgtgtcccggccgttccgggcggcgtccgcgtccttgcgggcgccgtgccggggcccgactg

SEQ ID NO: 61119 - DNA, 1497 bp, Arabidopsis thaliana landsberg
gcgagtaaggtattccaatcctttcttattcttatcatgatttccttcgtcatgcaaaccctcagatgaaagagctgtaacaaccttatcgtgcacagaccagtcgacaacatccacataggtgctcaagccagacggtggatgactgctttttctaacagaattgttattaccaagcctatccgtacccttatccagcaccttttcattttcagaaatcttgaagacacaaggagaaagtgaaagagcaggaatttctttgtcttcattcacattgcatccccttaagtaaacccctacatacaagtgataactcttgctcagacatttatttttctgtggtaacaatgctcgattgagaatggaaaatgcaaaatgatgctttttattcaacctgcacgataacttccaaaataccttacaagtttacttcctgatggtcacaacaataaaaataaaataaaaaaatcctagtgtcgcatactgcaaataaccagtcaaattaacttcagctcagtctctccatacatttcaatgatattgctgaacagatatttttacacaaacatcaaaatactggaggtacataaaacaaaagcatctgaatgtttaagcaaaaattactcacatgagtgtaggcctgctcctagatagagacgaagagactcgaccatcattagatgtcctttagcagctaaatctgaaaagacaagacgaagaattgcttgacggggctctttcttggcgcttgaagtaccattctcggccacctttgaagcttcactgtttttcatatttaaggcttcatccttctttgcactacctttcaaaggtattctaggggatacagaaatcaactgaagagattctagagagtgtttcttggcagtttctggatgaatataggcaatagacgtgagggctacccttagctcaaatcctttgacatcagcttcatgaaaggctgatctatcagtctcttgtacacgtagtagagccttcacattgttacattctttttcctgactcttttttgctttgagatttctgtcacgtctctttggagccacagccacttcagttcctggcacaagttgtactgaaaacgagccaccagtcaagaaaactctgtcattaatcaacttataatgattgtaagtataagagacaagtcataatggtaaccccttgttgtatcccagggaacataagttgaagaataagaagaagaaacttgaaaagtatggtatagacaacgggaatacaacacaagtgcggattaaagatagtcttacccaccccttttgatggaaatgttgaaaccacagaaaatcttatcacagttcggtcatgcaaccacaaagggaatttcatggtctcatgtagtatcctcacctgaacacacatgtttcgaaaattcttcagcagaacattcgcaaactgattagggccatgtcacaaactagaagcactaacctgactaaatatagctgcctc

SEQ ID NO: 61120 - DNA, 1237 bp, Arabidopsis thaliana landsberg
agccatcggtcaagaatcactaattgcggttttctcttgccatatatgttcctcttaccagaaggatctgtacgaacattcaaattggcagcgtgtgggtcacagtgcacaaacccatgtttaaacatcatttctgcaaatgtttgactcacctgcaacaaaagagtttaaagcatatcaaagtttgtttcttcatagtagtctacaaggtattataaagataagtctttgaaattaccaaactcttacttgaacggcaactactatttagctaaattcaagaaatgcatgatattttaaggaacatagatgaaagagcttacgagctttgatacttcatagggctgaatcccaagctttctgatcttatcaacatcgttcacttgagcaccatccatgaactccattgtcaacaacttagaggtactcaaattccaatagattgttggcgcataaacatactctgcaatatggggagacagcttcctaaaattatccagacatttctcattgtttttcgcctcaaccaaaaaatctagttcctgatgaaaattacattaataaaaacaagagcaatgaaaatatcaaaccagtgacagcaaaagctcaatggcgaccatacaaaaatgcttcagaacagaaaccttaatattcagataaacatatacaagactgaagactgtataaacctattaaagaaaatcttcatatgttatgacttatgaatcaactaaagacaccaacctttggtaagctttcactcatttcgtcgagcaaccacctgcatacatgagccggtataagctatttgctagaggctcacacaatatgaattgtctacagaaaaagagaaagtggctgcacctatagtcaaatgatgggaatattcggtgcaaggtattcactaaaactccaacagctgcagtgtccgcagctgcagtgtctgtcatgtgcgcatgttgaacctgcagaaaaaagatttaagaacataatagaataaatacaaacttactcttaacaagtccaagatctttaattatccgcaacatgtaaagtaaacgagtaccttgacagcaaccttgcttccatcatgagtgcgagcagcatgaacttgagcaatggaagcacttgcaattggaacagggtcaaattcagcgaatatctgcagatctgatacgatagcctagtgagatgcaatcataactcaagcgtgtaaaactctggttatatagatgaa

SEQ ID NO: 61121 - DNA, 531 bp, Arabidopsis thaliana landsberg
taaaccctcaaatgtgatagccaattagattctccactctttctgataaaatttattcaaccattcgttttcttttctccgcattgtgatagatctctcgaaatttcaaaaccagaattaatacattccttatatcattgaccatatgatataacaatacataataaatcaacggtgataaaacttgatttaattaatttgactaagacttatagcctaacggcctaatggttcttatttgtataacgcattgtcataactgtggtacgataaaaaaagtttaatttcatatatatatatatatatatatatatgaataaaatacactcttttttggcaatgtatatgctaattctttttaaaaatgtatatactattttcttggataagatagacctagcaagcattgacttatatggcatttctttgagtatgtctacacatactttcggatgttgtcaattactagtggatgtatcgcctgtaccacggcatttccacttggctaaaagatgaatctatgaacgattc

SEQ ID NO: 61122 - DNA, 250 bp, Arabidopsis thaliana landsberg
gcaggggacatataaattgaaattgtaagcgctgaacttatttgattttataatataatgagtaaatctaactcaattattccaagattcacgaaagctctaaagaattcgatgaatatgcttcttttctattgtttaacaagaaaaatactaataaggctgctttcacattgttttagcttaagaagtttttttaccacatcaacatgtgtattggaatcaatgaacaccatattttatgagaagacag

SEQ ID NO: 61123 - DNA, 293 bp, Arabidopsis thaliana landsberg
ttaatatgtctcccttactaagtcttttggctggtattttttcctttccttaaattccctaatttggtgattgagtggaggtggctggattaattataaaccaaaaggtcatgatggctttgccttattggtagcccttaaccatttcaaccagaaaatcttggtccttttaaaaccccttaccattaattttggccataactttcacagtatttaaaaccggcctaccccttaataagtaaagaaaccatttcctcctaataggtattgagaccgtatccccattatcagtt

SEQ ID NO: 61124 - DNA, 391 bp, Arabidopsis thaliana landsberg
atcgattatattcacatcacaatgatgaaatgtctagagagggtattattgacatcacaaaacatatcgtccatttccatggcgaaatggttctgctagtaaactacagtaacattaaatacactggtgagtgagttaccatgcatatatttttctaaaacatggaatcttcaaaatctcgatccgagaaaatatcctttctataatatgattagcaaacattctaaagaagtacgacaagcgaacaagaggaggattaacatcaccatttattcaaaaagttcttcatcaaccgtatttcaagactgatcttgttgcaagactagtaagacagtcgtacaccacgatggacgctctgtttccagtgaaggtggcggatgctgatgcatac

SEQ ID NO: 61125 - DNA, 2186 bp, Arabidopsis thaliana landsberg
tctgctagtcaaatgaacaagtgctaaaccttagtttaatgacttttattgctgctctgtagactaataggtgggggcggaaagttaatgactaaatatagcaactgattaaccaatcatctaatctaaagatcaactaaatgattgttaactatataattaactcaaaatgacttaatacttcggccatttccattttcatttgcttgtttgttttctattctttgtatcacatatttgtcaaatctcaccaaattttgattggttcttgttgaatctctctaactagtcaattaattatgaaaacttttgtctcgattcagaatccttcagatatctactaatccaatagaaacattataacgggtacttgttcctctcgtatatagacattaacatgatcaacacaaaagatctgtggacaaagattcatgaatacaaaacctgaagtttcattctgatacacaaatcatgaaaacatctaatgaaaataaaactagaacaatggcaaaagaacacaagaaagcaaccaaatctcaacgagaagcaagcattgagatgacacacacaagaagaataagaacacccaaaatcgaaacccaaagaacccaactcttagtcttcttcttcatctgattagcatagtacaaactattagtacctccactcacaaagctccctgcattagccacattagcttcaatgtcatcaatacgatctccttgagtctcaacaagaacagccatgtcaagaaacacttgatgaagcctattaagacttctcttgatatcattcactgcttcatgtctctctttagtcttcaaatccatctctggcttcacttcaaatgttttaaccaaatcagaacaagaccctgatccagagatcatcttctccatatcttcattacttggttcttcaccagtcgctaaaaaatacttccttttgagatcttctctgtaatcagcaaagattctctccctcaatcgatgaaactcactcatcgtatctctaagtttctttctaactccattagtgatcgaagttcttgtcctgtccacgcaagatccttccttgaaactcgtacgattcgcaacgtttctcttctccagagtctcgattagggttttgactgtgttggccttacgagagatggtgacgatgtttgattccattctgtctcgcaacccacgtaagatcttggtgctgtgagttgatttggtctcttcgtttaggttttggagatcgagtaagagatgagtgatctcttcgattagggttttgatggtttcgatttcttgaaagaaaccagagaggttttcttcatctgcgggactgaaatcgaagttaaagtcttcacctttctccaaatctcgatcagattccatatctgtcctcgcttgtttcttcaattccacataacttaagaacgattttgtcatcagatcattcatcttgtgaaaccctataacaagaatcagaggacgaaaaagtaagaatcacgaaattgaattgaatattgaaacgaaagagaaggagataagaagaacagagcattacggtgttgggtttgtgaaacagagtaaagatcttcgttatctctgaaacgggatgtttcagttttccgggagaaagaactgcaaaagagagagagtataagcgagtcaacaatggatgaaattaagaaaccctagagatcaaagaggaagaagaagagatcattacccaagaaatgcttgttaaacaaggaaccgtttctctcacaacttcgcttctttctctctctgctctcgctctctgtgttttcagaagaatggttcaaaatttaaaagagaaggagagagatatggggaagttataaagaaggtctacaagaatccgattattcagtttcaaagattttgtttttcaaaatttgctcttttattaatcacaaaagagccgttgctttgataacgtttctgttccgattaggcctcatttctcctttgtatacaaacaaaaacgacatcgtttatgtcaaacgtatgcaaaagtctcgacctttattgtgcaaaaagtcttgacctttattgaccaaaagttgattgtacaggactagttcatattccgagttaaagaatgcaaagcttggacctttattgatctattgcatccaatttacagcattttgagtatacaaaaga

SEQ ID NO: 61126 - DNA, 1741 bp, Arabidopsis thaliana landsberg
tgaaggcatccaccgcctctgtagcagacgaaggtcaatcgtcgtatgacgccaaggagtctaaaaattcgcaattaacgcacaaagtagagaagttcaagagatcttgcgagtctgagagtttccggcaagtccatggactatacagtgcgtttatccgccgtctcagggaagcaaagaagttctcaacgatcgacgaagttcttcaataccagaagaagttcgatgacataaagtcgcaggatttcgttatccgtataatgcttctttatggatactcaggaatggcggaacatgcgcacaaactgttcgatgaaatgcctgagctaacctgtgaaagaactgtgaagtcgttcaatgcgcttctatcggcttatgtttattcaaagaagcttgacgaggctatgaagaccttcaaggagttaccagagtagctaggtattactcctgatttggttacttataataccatgatcaaggcactttgccgtaaaggctctatggatgatatattatctatctttgaggaactggagaagaacgggttcgagcctgacttgatctctttcaacactctgttagaagagttttataggagggagttgtttgttgaaggtgataggatttgggatttgatgaaatccaagaatctttctcctaacattaggagttataactcgagagtgagaggtcttactcggaacaagaagttcactgatgcacttaacttgattgatgttatgaaaactgaagggatttccccagatgttcatacatacaatgctttaatcacggcttaccgtgttgataacaacctcgaggaggttatgaaatgttacaatgagatgaaggagaagggtctgactcctgatacagtgacttactgtatgttaatccctcttctctgcaagaaaggtgatcttgatagagcggttgaggtatccgaagaggccatcagacacaagctcctgtctcgcccgaacatgtacaaacccgtggttgagcgtttgatgggtgctttctagattgatgaagcaacacagctagtgaagaatggcaagctacagagttactttcggtacctgccagacttgtccgctggtaagaaaaagaccacttccagtccagtctcttcaagtgcgaagaccacttccactccggtctcttcaagtccggatacctcttcctttctgctctctttaagtctggcggcggactcttccagctccgtctcttcgagtccagactcttccagctccgtctcttcgagtccagactcttacagctcgttctcttcgagtccagactcttccagctctgtctcttcgagtctgttctcttcaagtcgggagaactcttcaagtccggactattccagctcggtctcttcgagtttggactattccggctcggtctcttcgagttcggactattccagctcggtctttccgagtgcgaactcttccagctcttcctctgggttgttggacgattaagagtgcttgatctgtgtttagcaactggttaactgtctgcgttattatgttggacctcgtatcttgatatcacttgtctaagtttggtaaccagtgagtccacttgcaaggaaacatggttatattggtctctcttgtgattatattctcaactttatgttattcggaactttgccttcctttctaaatgttagagactttatgtcttgcataaagctgaggctatcatattgtcaagctgaatc

SEQ ID NO: 61127 - DNA, 384 bp, Arabidopsis thaliana landsberg
aatttccgactgcacgggcttattatataagactcacctaacattaacctatttcataaaatatctgcggcttcaaatctgtttcaacacaacaaactattttgactgaaagcaacgccatctatatacttgactacacctgtcgattgccaaaccaaagaaacatacgaaatcaacccagaaacaacactgtgcatccaacatttcacaaacttctaccctgtcctataaaggcaacgcatttcacccacgatcactctaactaccatctacacaaaaacattcgcggcgccgcgtccacatcgatctacactgctccatagcgctccgttcatactaaacaaaatcgaccatacgtctcctcaaacatccgtccacactgct

SEQ ID NO: 61128 - DNA, 444 bp, Arabidopsis thaliana landsberg
gaggatatggttctgcaccatatcgcgcagggcgcctgcctgttcgtaatagccgccacgtcctttcacacctacggtttccgccgcggtaatctgcacatgatctatatagttacggttccagatgggttcaaagagcgcattggcaaaacgcagtgccaggatattttgcacggtttccttacccaggtagtggtcgatgcggtagatctgctcctcatcgaacatggtcgacaggagtttattcagttcgtgggcgctattcaaattatgtccgaaaggtttctcaataacgatgcgggtgcattttgtatcggagcaaatattaagcggtcccagttttttcgcaatatcgggcaccagctggggcgccacggccaggtaaaagatcacattcggatgttcgccaaactcagcctcttttttcttcactatctctgctat

SEQ ID NO: 61129 - DNA, 378 bp, Arabidopsis thaliana landsberg
ccacactgacaaaaggggggttgaggaacgcgttaacaccgcaaagcgcgcattaccccgtgaactgtatcatcaaaccacatagaccaataaaacaatcactatacaaacttttaatacgcaaagctaattaacaaatagaccaaaggaggcactaaatgagacagcgtttttaagctaatgaatcaaacataacaaggtttctacaaagaaaaaatcttgctgtacagaaatacgcgaattctgatgagaatcaatctgtacgagtacgcatactcaacttgcacaataaaataaaatgaggggcaaatctgtggaaccatgtcactgttccactcacagtaacggacccaacagagacttcagtgagactaccgt

SEQ ID NO: 61130 - DNA, 426 bp, Arabidopsis thaliana landsberg
ggatgcaagcgcgatacagagcgttacgaatttctttgtatgtatgccggatgaaattaacggtcttttgctggcgacacgaaatatattcactataacctcaagtagtggttatatataagagtcagtattcagagaaaaacaaggtcattatcaaacattacatgggccaaataggatgccatatgggtagagcatttatgagataggtgaggcccaatatgaacattttgatcagtatttgggacatagcaattgggatcaatactctcattaactggactaactcaagctgctaaatgcgtcattgtctgattgattatctagagcaattttgacgaatagtttgggcccattatagtctactaaatgacatgtttgagcccactgagatggcgaaaaaaactaacatactccttttttttc

SEQ ID NO: 61131 - DNA, 857 bp, Arabidopsis thaliana landsberg
  unsure (1)..(857): unsure at all n locations
aagtataacttcctatcagattggttcattttcttactcttcgcagctgtggatgttttctttctcttgtatagcagtttaaatgttttggtcacttttataattttggtcccaggcctgtcccctggaactgacgagcactccttgaaggacgctttctctagcttcaatggagtgacagagggtatgccctggatcttactatctttcttttcactgttctacaatagaacgtggttttgtttgtgctagttaatgtataaaccattcaaggatgtgtggttggattgaagccgtcctattcatcattataccatgaatgatnnnnnnnnnnnnnnnnnnttagtatggtatttgtgttttgctttggtttgcctcgggacttaagtctcttgttgagtacagttaatatattcagtcatttcattacttgcgtatttaaccagaaccttgccgtatcttttttctgtgcagcaagagtcatgacaaacaaagtgaccgggaggtctagaggttatggatttgttaacttcataagcgaggattctgccaactctgctatttcagcaatgaatggacaggttagaattctaaagaatcattgatctatctatttacctatcatgtcaattgctgtgttgtatggttaatcttccccttttgttggttttgggatggtgaaataggagctgaatgggtttaacataagtgtgaacgttgcaaaagattggccaagtttgccattgtcgttggatgagagtatagaagaagctgagaagaaagaaaataagatgatgagccgatctgtatggaaagatccattcgttgatgcgttcctgatgaagaagaagaatcag

SEQ ID NO: 61132 - DNA, 122 bp, Arabidopsis thaliana landsberg
cacctagatagccgtcggggtgaggggccacattacaactacatgatccacctcctccgacagaactagctccatggctaccaccttaaccagcacatacactacactcatgcattcaaaga

SEQ ID NO: 61133 - DNA, 1313 bp, Arabidopsis thaliana landsberg
tggacaagtgttggttttgctcttacacaatatatcctggtcatggtattcaatttgtccgtaacgattccaaggtaattaattcggcataaatcttaatcaacctgctttaattcacagtaaatagtttgcttgagttttatattacatagtactcttagattctatatatgtgaatgtctccttgctcgtattctctagcttaaatgaacaatttttgatatatgtcgttatttgtgtgagtctttagctaaaaaaatgaccattttgtatattcttacaatatgtttatgtgtctttagctaggagtttagtatataagaggtttacaaatgttctgataaaaatttgagcataaatgttaatcaaaacaccttattgtttgtatgtcttgttatcgattagctttgtttcttatgcgttattgtaattcacttacaagcatggtatcttctcctttgcagatattccggttctgtaggtcgaagtgtcacaagaacttcaagatgaagagaaacccacgtaaagtgaaatggactaaagcattcagagctgcacacgggaaggacatgactaaggtacgtgttcatttgagcaaaagtttttctttgtttccttggggttgtctagttgatgctgaccctcctgcttgtctttctttgtttactttaccctaaaaggatacaacatttgagtttgagaagaagagaaacagacctgagagatacgacaggaacgttacagagaatacactcatggccattaagaagattgctaagatcagaaccgcaagggaagccaaacatatcgaaaataggtatacattccttcttcttcttcttctagtctcctgcaaatccttgataacactgcttgtatgattttaaaactagactctgtttttgattatgattgtttttgttttttgtatgggacttaggttgaagccaaacaagcagaagaaactcaatgacgatatgaaagaacttgatcagaacattcatatggtccaggctcccggggcacagaagatcaaagttgatgtttccgaaaagaagtctgttcaaaacgaagccatggaagagtgattctgtggtaacaatatgatccgtctaaaagcctctcacttactctgatgctggtgtcatcttaaagaacaagtcttctttagtttctcttaccatttgtttttggaagtctttaaaaaaaaaaaagttttgggtttttgtactgataaaacggctttaagttgctatcattttgcaatgtattattattactttctgatagaaaacaaactgagttaagagtaa

SEQ ID NO: 61134 - DNA, 1728 bp, Arabidopsis thaliana landsberg
tgatttttttatggagaagctcaagaatatgtatcctaaacgcaacttccctgaaaggtaagaagagtaagaacaaacgcttgatttcaaactttgagatttcggtctgatctgatggaatgtttattggcagtttcacggaggtaaaagagaaggaagtgaggcctctaagtgcagagaagttgaaaaacttggggtggaagtttaggccattagaagaaaccattgatgattctgttgtgagctttgaagcagctggtgatcttccaaaggcataagcttacagagtcgtcacagtgactgtttcttcacttttatcactcctgaaataaagtggtttttgttagaatcatttcattctcaaatccattatctattactatcatattagtgttgttctttgtaacagtcagttatttgtcactttcaccaacatgaataatttgatggaacatgtcagattctcacggtttctttttcacaaaacaaaactggttttgaatccgaccactagactaaagtgtccatagtccgcggcaaaatgaaaaccaatttaaatgtcgttatacaagctttgtagtctagtagagatatacaaatttaattgtcgttgttagttttgtagtctagtagatatgattagtcattagttacggtttcttaataacattgacatttagaccacaatgtggacttgtggggttaaatgagtcacgagctcatgaacccctagccatttatttgggattttccgaggacgaggcttaatctacaccgtccgaattcgttaatgacggcaaattgcttccatgagtagatttttctttgtctcattagtcattatacaatttcaattctaaggataaaataatcaacaaagtttgatttcagttttttacattatttgtgtaacgttactacaacggatagatttgattcagacaaaacaaaaagatcgatgattacgacgttaattacagaattagaggtataaatatatgggtcccacgtcatttacaatggccagaaacaaaagtatctctttctctctctcttcatcttcaacaaatcacgcaccatcataatcatcatcatcttcatcgtcatcaccaacttcttcatcatcaccatcaatggaatttcccaaaccaaaccaccctttaccctaaaaatcgtttcatcttttttccttcttctaattttttttaggtttttaattaacttttgcttcaagttttcttctatagatttcttactcagaaaagtttcgaattcgaccctgtagcttagttgttgtttataatttcttgtgatcattcacagtacaaaaaaactaattcacccaccgacttcttcttcttcttctcttctctgtggcccatccttaaacccacactgcttttgcttttcctttttttttccgggaaatttgatctctttacctttcgtcattattagtagggaatgatcttttagttttttttttgtttcccccaaatctcactttttctcacttcctctccatctcaaatttcacacaaccgagtaaaccctagaatctccgcttctcattcaattggtttcatcactggtcttaatcattgctagggtttactcggttacctttatcatcatcaattgatccttgttcataattcatccacttttctttctgtctttggcataaagtttcaatttttcttcttcttctctttctcactcaatcat

SEQ ID NO: 61135 - DNA, 289 bp, Arabidopsis thaliana landsberg
cctggttgcatctctgtcccgtatatacctgttgacgaaattggagcgggacgatagaccctcacgggtggcctagggcttttcaacccgatccaccaatgcgaattgtggaagtcggacaggactaatatccggtggtctagccatttaactagaagaaactcgaggcttatcacatctatatcggacggaaaaagggtaccaaatggcatatcgttgtcggatcctatctgcaacccattcatagtatgcttagtaggcacttgcaaagggccatatgaacctacat

SEQ ID NO: 61136 - DNA, 1430 bp, Arabidopsis thaliana landsberg
gaataattagctatttttatttatgaaaggttattttctctataaatcttataatttgagaattgatattaaaaaaaaaacatcttctttttatagttacaaacaagtttttttttttttatttttttctgtcaaagacttgagagttgataaaaaaaagagttgataatttcttgatttttcttctggaacattttaatattatcttctgaataatcaaatgacctttcgtttaatggaagagacttcgaccataatcaaaaccccatccgcctcttaaaaggccaacgcttttctgccctatgtgctttgctagtttcctacacgtacgtatatatctatagaatcatttttcatatatatatggtttaatgcatccatagtttatacatattttatatttaaaccctaccctatacgatacactatatacatatatcgtatagtagtaattgattatataaaattttacatagatgtacaagagcattgatatcgatagaagttagaaccttttgaagatattcgtaactcttgaaaaattcgattcttagtgacatagtgagcaataactacagattatggagattaatttgaattttagtctattttccctcttataaaagaacaattaccaaggaaatcctaattctgaattaatcatttacaaagtagtagtatatatatataaaaaaaagttgtagtatatagtattaacaaactaacacaatttttttcaactttgattgtaacctttttcaaaccaatatatagtagtgttttaaagtacgccattatcttgtataatatgcatggtgtattgatagtattttatatgtatataaaatgaaaactaaaaggtgactactagcataaaaaataaatgatgaaatttaacaaattttgtaattttaaaggcaatatactataggtaaaattttcaaatatttgtgttgaccaaataaatggcaagatcataatattttgcataattttctatattttaaagccgattttcattgctaaaatatattgtataagtatatgctaatacacatatttgcgtgtgtgtatataaataaaaacatgcatacatgtatcatttgtctgtctcctattggctaagaaaacagagagaatcggtatttttagcctttgctaagatattttgatcaaaaatcccacttttgagcggtcttatctttattctccacctcaaaggaccatttctcatggcttctgttccggtgagacctctacctcttcttcgccggaacatcacctcgacgacggcttcgaaatcatctccaatgctcgccaacgtttcgagccggcattctctcgggatctctacgtatgatgaatttttgaagcaaataaaaactccggcaactgtgaaccaccggcggcgagtaagtacggtggtggcg

SEQ ID NO: 61137 - DNA, 463 bp, Arabidopsis thaliana landsberg
gattctgattgattgaaatcatttgttaatatcaaacttctatatgtgtttgccgaacatttccaaactgtatatacacatgcgaactgactgattcatttcctataattaaatctttccagtttctataaaaggcagcgctttcaaacttgctagcttaattccagtaatcaacaattaaagacagccgacactatatatatacctaaaacacacacatgatcctatactgcaaaacattactccattcttaaacaaatctcgtaatcgattatttcaatcattttctaagtaagactcgaacttagatagaaggagaaacttaaggttacaactcacaagacatgaagatgaagctcactacattagttcccgttgcgtttgttctctcgtcaatggctcccaccaaagcagaggacaaagcggcctgcgtcgtgacagatcttaaagcatgcctaccaca

SEQ ID NO: 61138 - DNA, 473 bp, Arabidopsis thaliana landsberg
ttttgacaaacatttgccattttttatcgtttgcttttgcatttacttgaattgaatgaaaaattataagttttgaatttgaacaaaaacagctaaagcgtagagaagaacagagtttctttttttgggtgcatgtgattgtttcaggggtagaattgtccagtagtgtctactttgttgattccttttgtcttcctgaaagttttctgaacataggatgtgagagagaaatactattttacccttctctgtctctatatttctcacacaacaacacccatccccatgattttgcagaaagagtcattgttctcttgagtgggaaaccttgaaaccattcctatgggaaatagcagcgaggaaccaaagcctcctaccaaatcagataaaccatcttcacctccggtggtatgttgaacagtttcaaaccataattccaaagtcaatttaagttttcttaaattccttatgcg

SEQ ID NO: 61139 - DNA, 864 bp, Arabidopsis thaliana landsberg
tgctggtgcctttgtaacattctgattggtaaaacaaataaagtcaacggtagaagtaatattgtgaggttaatatttttatttttgatagtaaaaaaataaaagagaacataacaaaattaatagtaaaaattaataaatgaagtatacgtctaagaaaattctgtagaattttttccaagcaattaatttgagaaaatctgtgtttaatgcatgcaagcatagcaaaaccttaataaaacgaggacgacatagatgagagtatttgtaagttgtaacttttatattttcttgggtaaaatatattcatgtaacatatgcattttgtttctcttttacgggctaaagatattgtggatagttgtgattctatttattagaaagaattacaaaattgttcatatatagaatctctatttgggtaccttagtcgtggctgccttggttttgtcatgggctctttctttgagtggttccactttggtctacaattagattaagtagggattcaattatgctacgataactatactaacatactgtagtatttatgtacaaactacgaaacaccatactttttcttactcattatttacaaacttttactgagaagttcacgagtactttgatttaccatttcttgaattacagaacaatgtttttataaaaatacatacttacacttctggcattgtgaaaactgtagaaattgttgggacattaggatatatatcaaatggtaactatataatgctggaattggcaaatgacgttacatagtttgagttttttttttttttttttttttttttgaattgaagattaatgtgatggacattaggataaaattttggcaaatgacgt

SEQ ID NO: 61140 - DNA, 465 bp, Arabidopsis thaliana landsberg
aaaccaaaccaaaaccgtgttaaaaatcctggcacatttcatttattatgataccaaccaccaacctaccttgttattaatttattgttatttatttttaacaatcatcattagatactataataaactaatttatcaatttgaaagaacccaataattgtctctctttttttgtattaattctaatcattcttgttagttatatgacaaatggaagtaaagtatttcaaacctcaaaatgatttgccgtaattcaaaataaagtattatgccaagcatttgtaaatatgaagtcttcaacgaaaataaaactgcaaccttattgcaatgtggtaccccaatcattaaaaaaattcagaatccaaaacttaatatttatattagtttttagaattggatttaaaaattatcagataatgatttagttataataaatcggcttctaaatactataataaacctttc

SEQ ID NO: 61141 - DNA, 1433 bp, Arabidopsis thaliana landsberg
aaaatctctgtctgtagtttccttcacaaatgagctcctaagatagtttcttcatccaccaagttcctcaaatgtttcgctccactgttgaatcctacgtattgcttcttcgccgccaaatacattacaccgtatggcggtctcaggcactgtctccacaacaaagccatcacaaccatcattataaccgggaacaaccactgaggaactacggagagaaggattaaaaaaaactaaccttctttatgagagaatatagtttcttcagagaagtaatagagtaagggatttcggtcattagtataacatcatatccatattctccttcttgaccagtctcgttggctctttcccacgctctgcttcctgagagcttccttgatcgcctcgaggagaaatctggctgtcctgtaatgcttccgtcttggctgctacatccatccatgaaatcttcctctgaaaagctcaagttcattgcggggatagatggttcaaggacatctgttctaatgatggatagaacggtagagagctcttcccattctcctgcatagaaacggacagatgcagagatagcttgtcttgatggtgtgagtgggctttctggctgacggctttgcctgtcttgtgcttgctccaggtttgcaagaacgtttgggatggttgtgcatcttatcgtttctgcgctgaggtcttgaaagtggactgaggaagcaccctttagaaaaagcaatcaagattcaacaataagacttttttttctagaaatgtgaaagtaacagcaatcttgcagcgttagtttacttactttcaaacaggcaaatatcccaggaactccaaagttgcaacctatctgttcaagtcaccttacaaaggaaaaataaagagtcaagtcagaacacaaggaattggagtttgttctcaaaatggaacatccatgacatctttaccatactacaaattcatagttaaaacacaacaacaagaatgaaaaatgtatcaggccacctaaccattgcctggaaatggaaaatgaaagtaaaacgtttgaacgaatttgtaaacaattttgccaaagctacagagatatgatttgtagattactgctgatctacagacattggaatatatcagtgacactctacatttttggtgcaattatgttcagtgagataagaagttcagaagaggaggaagtacctcgaggacccttttgcccctgaagctaagctgtccatcacggatctcgtttttaaggacattaacaagaacaacagagctttcccaacttttcaaagaacctacacaatgtttagttaacttgatacaactaattatgatacataaataaaagaagatatccgatgctagtgcatgtgaagcacataccttcatttcttaaatgagcagtttctgacccagagagcccaatg

SEQ ID NO: 61142 - DNA, 482 bp, Arabidopsis thaliana landsberg
acctaagcatacattcatcctctatttgtatttatctcgtcttttacatgcctccatttttttttcttatcctcctttttttttttggtaaaactcttatcctccctttcttacggtacaagccatcacgctcggttctgattttcttcttctctctgtttcagtttcgtttcatgcggcatacatgtaaattactaaattgtagagatcataacgttcaatttatcgagttttatttctgaaaatattatattttcttttttgtaccgaggtttcaaaatattcatgtttttttatgtgtggaaagaatagcacatatcgatagccatatttgttgcctgatttcttttgaccaagttgattgaattagcctatggatattttgttgttcttttcaaatatatggcaatttttctttgtactatatttttaatatgtattttttgagtttacgagattcctgcatgtacatactatttaaa

SEQ ID NO: 61143 - DNA, 461 bp, Arabidopsis thaliana landsberg
caaacaacaatcgttcgtagataaaaacaaaaatctttttcttttatcctgaatttgtttgatgattatagttttggaatgctttagtagaagactaaatattatgagcattcctctaactgggaaactatggcattttggttattactcgcatctttccaaccaaattttgcaaaatcactaaaaagtcatactgagaagaaaaaaagtgtactagttaaattcaatagttgtgtggaagtgtttgttagccaagttatggcaatagactaaagggttacaatcttgaatatatattgctaaatatcgtgaatttgagtagtctacatagattttataatgacgcagtttgaatagtttcttatggttctttactgtacaaggcgtgatgttactttacatatgtgtgtatttttaacgttgagtacaaaaaaaatcgtttgttagatttttaagttgta

SEQ ID NO: 61144 - DNA, 140 bp, Arabidopsis thaliana landsberg
agaaaaaaaaataaaaaaaaaaaaaaaaaagaagaaaaaaagacaatggaaaaaaacaattgtaatgaataaatagtaggaaggatgtatttagactttaagaaaagatgtaacaagaacagtacggcctacagctgtaa

SEQ ID NO: 61145 - DNA, 1701 bp, Arabidopsis thaliana landsberg
gacgtagcacttaagttcactgaaaatattcataagaaatctttagtaaagagacaaacccaacagagccgccgccagatccaatcatgcagtggtcgtgacaatgaaatttgttaagtttttcaagtaaggtcctcattttctgtgaaggtaatccctctggggttatgtttttgtggtcatacggcataaataaagcctgaaaacataagaaatgagaatcaagcttctgaacaaatacataacaaagccaagatcaagataagtttgttacacaatttacaaaatgtaaacatccgtaaatccactattcacatgtttactcatactccaacagaagtttaaagctgtattcccaacattgtatgtatacatgataatactaaagcagaagagaaacattacctccattccagaatgcacatttatccatatgtgaggatcaaatgatatggctagcttccgcattatttgagtttcgggctcactaaacggagcagttcctggattctcttcagatggatcataatcctggaaatgccgagaaaaaaacaaggaccaaggttcgtgacacattaacaagggatattgaagggaaaggaaagtgcagtgaagttaagaagtaccttttctttcttgccccagtcaacaccccaatttcggttcaggtcaactcctcttcctgtgatttacagatatgttaaaagataaaatacaaaacaaaaacacagtcataatcatgtaatggagaaacaaatatggttaccatttcttcgttcacaaagatcaccagattcaacacgtttgcgaccattcgggttttctataggaaccatctgacaaataatagcagtattttatgagtaagtgaatttatcaaacaccacaaagatgaaaataagactgcagggatcagactcacttacttttatgactagtttgtctagtgtgttgttcaggattcctccgtttttatttggtaagaactgttcttcgctcaaaatcgacaaaatccgaaaagcaagttcagaggtgataagctctctcccatgctgaccaaaagtctggaagaaaaggaatcatctgtcaaaaaaacaggtattaccaaaactatgaagaaacttcacctataaaaaagtattacaagttcaaccagaagacaggatttgtcaatttatttgatattccagtgaatagcttagacagagctatgaagggaacttacaagaagaatcctaaagtttgatctgtcatcactctctttaccaccgcgacaataagttaccacattgacctctgcattgtagcctttgtttcccgatttaatcaactcaatctgtgaaacaaatattcactcagtctgagctagaaatacaagaacctaaaaacgaaactaaaatggcactaaccgagagcttatctggatgtcgatgtaccaaagaatgtatctgctccattaaatcatcactgcaacggacatagaagacgatgatgataagaacagatcaatgcaattttcttacttatctattgcaccaggattacagtcaagaacactaacattctctaaatctcctctagacaaaaagggtctcactttaccatatggtaaagacctttattttaatccaacctctattaatctgcagctttatgagcataaaccgaagaagataacgaagctattgttacataaaattg

SEQ ID NO: 61146 - DNA, 121 bp, Arabidopsis thaliana landsberg
tttatcacctggggagccttcccaatcggagcgtgcgggagtactactaagtgcgcatcctggacactaccctacctgccaaccgcagtcaccataaccgacactcgcactccagcactgc

SEQ ID NO: 61147 - DNA, 217 bp, Arabidopsis thaliana landsberg
tgtctaatttttatcatcttaacataagtaacaagcgagggatcaggcggaactataacggacgactctcgccagccacaatgcctcacaacctctgtcagcattggcggcgctggactctaggactgcgagtgctcgggtcggttctatagtaacaagactcgagaacctatatatgacagatagcacatggtatgtactactctggtgaaacgac

SEQ ID NO: 61148 - DNA, 279 bp, Arabidopsis thaliana landsberg
ttctatttttaacatcttagagtaattctctctctgaattcgttttgtatacgttgaatttttaccagcatgtgtttgatagaacatacaattttggatttatttcctccacctattatatctataagtatgtctttatttgattgccaggaccatgcagttttggttcacttgataggagtattttatatattcaatcaatatcatgtatgtattcttgttgattctgaaaaaaacacggaataagaaaaaacaggagaagtaggacactttatatta

SEQ ID NO: 61149 - DNA, 406 bp, Arabidopsis thaliana landsberg
actcatcgatatggagtattcataagactcaatgaaatgtttttttcataactttatttatacctgtagggtgttttgcttctggtataatgcttggaacatcaaaagatccaccagtttcatcaattggtttcttctcattcacaggctccattaaatcacatgttttaggaggagaaaaccaccaaaccggcgaggattcaagatccgtttttttagttatcggagcatgttttatttcccaagagctcaggatacttcgagcagagattgtctgttttttcaataccagatgatcccaattcagagcaggtagacttacaagccccttgctttcccagttgagaagattcaggaaccggtttaaacattgttcacgattttcggaggcgacagcttcaagcaa

SEQ ID NO: 61150 - DNA, 971 bp, Arabidopsis thaliana landsberg
tattatatgattgattaatagagaaagaagatgaggagaaaaaaaattaaacttgcacaaaaaaaaaaagattctcaaatttttctcttatacaatttttcccaaatctcaagtagctaattgaatctcaccaagttcaagctgagaagcaatatcttcaagctgtttcttcacactcatatcaataagcttcgaaccggattcaccataccgaatcgtaaaaccagccacaagactcgcatcaataaccgtcttaacccgaacattcttagctccggttaacttctgaacctgtttcgcaatctgagctaattgcggcgcttccaatttcaccaccgacctaacctccgccaattgtgtatccgttagcttattgtaaaccaactcaaactccttaacgatctccgtcacgatattgatccgattcgcgtcgacgaggacgttgaggaagttagatgtgtgagattgaagagacgacgatttcactatgtcgtcgatgacttgacgtttcttctcgacggtgattgttggattcgcgaagaagtttagtacttgtggatctgagaagacttgttcgagcttctcgatgtctgtgactgttaattccattgtgtcgtttcttttcgcgacgtctgctaatgccatcgcgtagcttgatgctgcggtggctgacattcttgctccggcggcgtttccaccgttgttgattcggattgggaaggtttttcggagtgggagagatctggcgatttggaaggaggatggtgggagtttggattgaagagagaatagagtttgttgaagagacgccattgttgttgttgagagagtttgagagaaagagagatttgtggtttctcgaagacgatagaggagaggaagaagaagaagaaggtaaggttttttgggggagatgagaatggacggtggagattttggattgtggttagatggacggtggagattagaag

SEQ ID NO: 61151 - DNA, 532 bp, Arabidopsis thaliana landsberg
  unsure (1)..(532): unsure at all n locations
gctaaattactggaatcgagaataccagacttggtgttggccttcgctggtccaaacttccatacagatagaggaagacaatccctcagtgtcaccttgtttccattcgacatcctcctgcgatccggaagacgatgaacaaacaccttgtgacctattctgattctctatcccttcactctcgttctgtgaaaccctaacaggtgagtctaggacatcgatgtattccctggtttggcgttcggaatcttcttcctcctcttcctcctcgtcttcctcttgtacttcaccatagtcgacatatgcttcctcttcgtcttcctcttcttcgtcttcttcttctccatagtgtccaaatgcttccccaaattcaannnnnnnnnnnnnnnnnnnnnnnnnnnnnnngaaggggtaactccggcgaggcggcattaggttcgtttctgttactgtattagaattcggaagagaagaaggccaaaacgtctcggcagagtcgcagaggtattcgataagagagactcccggaatt

SEQ ID NO: 61152 - DNA, 116 bp, Arabidopsis thaliana landsberg
tatatcacataggcatgcagtcccaaataggagtgcaggggtactacgaaatagcgatacagcagaaagcaatgtaccggagccacatctaccgttaaagacattagacgaaaaga

SEQ ID NO: 61153 - DNA, 868 bp, Arabidopsis thaliana landsberg
  unsure (1)..(868): unsure at all n locations
gaagcaagctcaacggttacaaaaagaaaacaactttgtgattcttgatgtaagaccagaggcagagtacaaggcggtgagtgatgctatgctctctctctcgtcgtgtcatgatcgcttgtaattttaatggcaaattcatgtgagtgacatttgtcttgttgttttgtttttgaagggtcatcctccgggagctatcaatgtggagatgtacagactcataagggaatggacggcatgggacatagctcgccgtcttggctttgctttctttggtatcttctctggcacagaagagaaccctgagtttattcaaagtatgcactgaaatgagataataagctttggactgtttttacacaatgccgttgaatccagcggctgaatgttttgtttcggaaatgttgcaggtgtagaagctaaacttgacaaagaggcaaagatcatagtagcttgttcatccgcgggtacaatgaagccgacacaaaatcttcccgaaggccaacaatcgaggtaatgccaaaagtctacaactttgtgcgaagaaagcatttgtttcggtgctcatataattagggttcttgcaggtctctcatagctgcttatcttctggtccttaacggctataagaacgtatttcacctagaaggtggaatctacacatggggcaaggaaggtcttcctgttgaaacaattgaagaagactaaccaacttctttactctagagttgtccagttntgtatatctgtccatttcagttagttgcatttagagatttggcttttcagagagtngtttgaggtttgtaaaacttcagactttaccatgaaatcagcaaactcgaccggaatcagagaaaggacttgt

SEQ ID NO: 61154 - DNA, 700 bp, Arabidopsis thaliana landsberg
aatcgacttcagctaaaccctccaagagacacaaacagaagaacgagaggttaatctatcttaactttaccattcacaagatcgatacacaagatcgctctcgctctacaagttgtatacctgcaggtttggcaggtttggttgaagtgcattgaatcttaagcgttttgtgaccggaaaccattgctgccgatcgaactccggcagagaaaagagtgtttccggaggatttcagacgcaaagcctgcgatgaagatgggtaaggcgtggctattgaagtaagtgaagccatctcttgatcgaagctgcttctgttaagtttctgttttttcagatattttcttgaaaatgagagaatttaattgcacgataatggaagaaagacgatgaaactgcgacttcttttcttcttgttaggaaaaaatctgaacatgtggtgcttattttattttcccgattttctatcttttgtattcaaacgatcaaaagttgacacaacataatcttctcttatcttcttttcgaccaaaacataaaataaaatatttctcttatcttctttagttttctcattgcgccattcttgagtttttgattggatcgcttagatttggttaacatggtattttacgttttcggttataccggtttacctctttttgattaattttctttcacaattacaaaaccaatgggccca

SEQ ID NO: 61155 - DNA, 464 bp, Arabidopsis thaliana landsberg
acttcggggttctgagagcgtcagatctgggatccgtgtctctcatgtatctccatcttctgttctaggtttcaagtgttgttcttaaggcatggctcaaaattttccaaatggattgggttcattctacatcggaatgtataaactagtggaagatccttcatcggatccagtaatcccgtggagcaaaagcaacaatggtttcgtcatgtgtaatgaggaagcgcgaatccgcagtaagatacttttgagattcaattgcggcaaactctcagagtttctctccgagctcaagtattacgtgagttttctatatatcctccgaatcgagttttggaatcatgtcactctgtcgtcgtgcgtgttatgattctgtgttatattttgggggtagggctttacaagagttaagaagacggactctgggaaaatggaatttagaaatgaagatttcgttagaggcc

SEQ ID NO: 61156 - DNA, 471 bp, Arabidopsis thaliana landsberg
ggatattatttatgatagtttcatttaataagagtcaaaatagaaacaaaactttttcttggtctctttttttattacaaaactactatagcaagagatgaatgatgaattaacaaaatcaattattagatataatccttcccagatattcttttactaactcaaacaacattacatagtttttttataggttgataataagattatttgataggttgatcaaaataagagaataattgaatttgccatcctctcttgaccgtctttcaaacctttgtaccatttgactttgactctctctttctgaaatctctctctcattctctttcttttgggctccttcttctctctacttttctccactttaatattttcctttattttttgaaataagaaaacaaaaatatggaacgaatacttttccctccctccatctctccctctttttctggcttaacacagcaatgaagc

SEQ ID NO: 61157 - DNA, 118 bp, Arabidopsis thaliana landsberg
tttatcacatacacatgcagcaccagcggtgaccggggggagactataaaatacggttaccgcacaaagcctcgaaacacaactacctttaccattacactcacatgaggcaaggact

SEQ ID NO: 61158 - DNA, 256 bp, Arabidopsis thaliana landsberg
ccctaccttaaatcgcaaaaaacctccaaaaaatctcctctcatacctaacaaaaccacgacaccatcccaaccccctaacaacacattaaaccttttcaatcaagccaccaaaaaaaaacactttgcacacacacacccaatctacctcttacgaacatttcataacacaaacaaaacaatcctaaaaccaaatacccccttacaaaaaatccccaaaaataataagactacaaaccaattcacacaactggtat

SEQ ID NO: 61159 - DNA, 581 bp, Arabidopsis thaliana landsberg
atccaatcccgcttaagaagtcctcggccaacttgcatttttattttttacaaatacatacatggttagttgatagtgatacatacttgtatagtaattatttttattagtacttgtactagtaactattattacagaaaattgtatttgtaactatcactttttttaacatctgactttgtaactatcactttatcacatgtgattatataaaactaaaatagattaaacaaaacaagttaacaaataataatcaaaacataagcaaaatataagcaatataagagacaagtgataaaatgttcaattgtacgttaaaatttgagatattaaaacaaaaatatgattattaaatgtgaattcaactaactaataagatgtaacaatacaaaaatgaaacaactgttgtattctaattatgccaaattgaggcacgaaaaccgattggaaaattaaacatttttttcaatcttgccatgagaagagcaataaaaaaagtatcaatgaagtgtgttctacagagtggttttattgcaatgttatatggatacctcattgatccagtggattgggttcatgga

SEQ ID NO: 61160 - DNA, 440 bp, Arabidopsis thaliana landsberg
cctcgcgaaggcttatgaggaagatacagtagaagcgtattgagcagttctgtgttcgcaacggaggccatagagatagacgaagctgcggcgggaggcggagaatcgccggtttagcgtgagataagagtcgaggaatccgattctcccgcctactgacacgtgtccaaggtacgttaaagcaagtacgatacttttcagtaataaaaaaaaagtaagaagtcaaaaaagaaagaaacttttttaaaaaactaaaacgacgccgatttgttcgtcgttatgcatcattatgcagtgtagactggtacagatgttttgtggaaaaacgtgagccaaccccacgtcccaataaaaacaacacaaaaccgcatcaacgtcttttaacactctctctctttttaaatctgcttaaaagcgtttattaactactctttattttt

SEQ ID NO: 61161 - DNA, 424 bp, Arabidopsis thaliana landsberg
ccggcccatggcattggatgggaagaggtgcgttattctttgcatttatttttttttagctctagtagggcacatggagatctttgagattttgtttatgccatagtggttctgaatcatattataatactgatttatatatgtacctaaaactattctgaccttgttactcatcacagataattgccgatccttctttatccttgaagcaacgagcccttgttgctgatgctgcccgttcactggacaaagctaacatgatgaggttcgatgagaaaagtggaaacttttactgtaccaagccttggacgggttgcaagccacttctatattcaatattctagtggtgaaacatacaacgaaatgttgaagcggcacatgaatgaaagcgagggtttcaataatcatcttgtttttctgatat

SEQ ID NO: 61162 - DNA, 1456 bp, Arabidopsis thaliana landsberg
ttcaatttagatgggttttagagttcttcttcgtctggttcgggggcttacatttcttcggactcgtaagcttccttttcaacatctttcaagttccaaaattgggttagaggagaagaagaagattgatttgattattacggcggcaatagaaggagagtgtatgagaaaccttaaaccctaccggtggttgagtcggtgataaacaaatcgacggcgactgtttttttttttttttggtttttgtctgttaatggattcattgaaaaaagcccattgggccattacaagtgatgaaagttcagaaagtaacattgttattgataaactcttttcaaaagtcaacacttatttcatatctacaaagatgttaacatgttaaaaatgtgatcaacttgagtttatttagtatggtgtttggataatcaacactgtaaagactttttgtaagaaacactcttgttagacttataacatttgacccccaaaaaatgaaattattacagttacctcaataaaaggtcttgtgtgttatcattggtcaacaaattataaatggttgagtgttaaaattggataatggttagttattatatcatattatcactgttttggggacttacatataatatattttcgataatacatgtttctacattacctattatgtaatatcatctggtccatctctaaatataaagaactagttacatcatcaataagacaatatgaaaagtcgtctatcaaagtttatagttacaagttgacccaaaaaaaaggcatatcgtattatggttactagaaagtggccaactcgttcaaaacaaatctgtttttattattttaccgaataatgaaagacattgacttattgatccgtattagacacggatttcaaatttaatttgtatatagtcaaataattaaacatatgttgagtatacggtataaccttctcaatacggcatttgtagccctttttctaattaaccaattaactaacttctttttgtttttcttttaaatcttacacggccacaatgtatatacatatctttgttcaacggtaaacttgtataactttgttgcaaaataaacatctatatacactacaattacgatgttgagagataaactataatgaattttgatatattatatttaattttgatgatttcatattgttaagaaaatatgtgatagatttacaaacttgaattttagcccaagtatattttcaagttagtaatttcactacaatatcttattgggagtgaaggaaaaattattagtggatgcagagaacgataaactatttgtggatcattttgaagatgtcattgaaagcatgtatggttaggtttcatttgcatttggtggaatctggcatatcttaattcttaaccgaactttttgcatgggatcgttatgcacttgtttggttttgaaagatttt

SEQ ID NO: 61163 - DNA, 1522 bp, Arabidopsis thaliana landsberg
tagtatctatttattctatttcgtgataattgcattgtcttaaagatcatagcagcctagataactttatccccaaactttcatggatctgccacgggaccaggaaaaaaaaaacttaggaatagttgaccaaaaactccaactacttaaaattacagatgttagttgacagttttcaaatactacactcggaagtttcgttcgactatgctacatattctcagttcttttttgatgattcatggaagataaatttgaatatgaattctcctgttcgttataaaattattgtaataaagacttaaaagagtgatccagcttcatctctttatccacaaatgctattcccgtcacataaaaatgccaaataaagaaaaaaaagagtgataatctaagtgaaaacagatcacgagcgtgttagataagaatagagagacgcaaaaataaaatagatatttgcgagacgccacgtaagcaaccaaaaggttacggtaggacccacctcgctaatgtctatataaccagaaatgtgccaaagcctttcttcttcaaactaccaaacctacagaaatctctcttcttcttcttctctacaaaagttcaatggaagctgttcttgtcgcaatgtccgtccccgccacaacggaagacgacggattttcgttaatcaccgataaactttcatataatctatcgccgacgtcggacgttgagatcgttacctccgataaccgtcggattccggcacactccggcgttctggtaagttgttatttattttggtttacggtttacatttttctggtttggtttttagctaaaatttgtggataatgcaggcttcagcttcaccggtactgatgaacatcatgaagaaaccgatgagacgttacagaggctgtggatctaaaagagtcatcaagattcttggcgttccatgcgacgtcgtttcggtttttatcaaattcctctactcttctaggttggtttggttcggttattcttattgaattttccaaatgtagaaacttcaaaccgatggttatttccggtactacacaattttcccagtttttctttttcatacacggatttgaagaaactctgtttgtttttgggctattttcttgggaaacaatagctgtcaggaaatgactaaactacccttgtgcgtctctgttttagtttgacggaggatgagatggagagatatggaatccatcttttagcgttgtctcacgtctacatggtcacccagctgaagcaacggtgctcaaaaggcgttgtacaacgtttaactacagagaacgtagtcgacgtcctccagctagctcggctctgcgacgcacccgatgtttgccttcgatctatgcgtctgatccattcgcagtttaagaccgttgagcagactgaaggatggaagtttattcgagaacatgatcctttcctcgagctcgacattctccagttcatcgatgacgccgaatcggtaaacttacttatatgttttgaaaacacagca

SEQ ID NO: 61164 - DNA, 1159 bp, Arabidopsis thaliana landsberg
tgatgaaacctttaaccaaaaataatacagtgggataaaatataatactatttttttagaggaaaaaatatgatactgcatttggaacccatgcttcattgcccctccattccgataatggcaaatatattttttgtcggattgttactcatttcaaatataatacttctaaaagtgaaagttgaaatattaaaatataagtttatcttattatccaaccgtatttgtatcgtagccaaaatccaatactaaaaaatgaaaagaatactaataaaccggacagaaccaagaaaaaaagtgatgaaaatcaactagcacgatccagtgatcagtttttccttccaaaatcgtttgcatcattgcatgacttctttttttttgtttttttgcatgacttctttcttttccttttaaaataaaactaaaaatcataaggtgtttttattactatttttgtttttttgtgagaacacaaaatccattaatttggggagtttgcttgatgaataactgtttttggaaatttctttttctttcttgttttcaacaacttattgggagatatatgaacagaaaaataattatattagacagttgaatatttttttcaagaatggttctaggatttaaatattattgcgtcatttgttcttaacaaaaattaaggatttattgcatcactgaaagaaatattctagctaaaaaagttaaatattgttgaattggaaattaattatacgtacacgtatcttggactttccgtatgatctttgttcatactgatatcaacggtccaaacaatggaataggccaggataaaaaaaaatcaacaacaatgaaagggagatttaatcgcaagtggaataaaaaggttttctcaattaagttagaaagtggaaatcatcgattatctcttaagtggagcttttaattattacatacacagcacaccagtctatttttatatattttatgtaatgttattgcaacggaaaatcaaaaattgctgaatttaatctgtcttaatctacaattatatattgtgcgtataatattttgttttacgttttattaccattccatatagctaaatttagaaatgtattactaataattactagttaaccaccgaaaacctatcacgtactccccaaaataa

SEQ ID NO: 61165 - DNA, 1430 bp, Arabidopsis thaliana landsberg
acgtgttaaaaaccattaatgaagctctcttttctaattatgttatccaaacgtgtgacgggaacaataaaacatgaattattcttcgaacaatatatttttgcataatgttttgtctattttgcaaatgtcatatattgtggaggttatattccatcaatacattcacacattaatataaccaaacccatgcatgcatttgcaaaccaacaatcatgaccagaggacaacttcactaaaagaaacatcaaacatcaactaaatatttcaaaaacagaaaaatatataaagaattaattaatcatttggaaaacaaatggaaagagttgttagaagaaccggcgcttccatggaacacgattgttctttctcacgcaacagccacacgagtaaagaaaaacgacgagaaggataagaaggagattgacgacaataagtatcctccatctttttcttatcccttttaaaactccaatcttacacgactcgcacgcgtaacataactgtctctgcgtgttactccatgccttacaatcccctataatcgccgtagtcgctgtggcaggaactgtccaccacgtggcattctttgattcgaacccacattctacgggaggtcgacaacaaccaaactaaaagaaaagaaacataaaacaaaaaaccacttttattactacattgttagtgaaacaatctgaatcctatagatgtatactataaacacatacctgtacattagagagatgtttggagtcaaagtcaatgtcacgtggaccaaaccttttacaaaccctagaatcagacaaacatttggtgatcccttcccaattcttcccacgaaggaaatggttcccgatccagttctgataatctccggtcttgacattgcctattcctctaccggataacgcttttccggcggtgggattcgtgacgaggaagataaagacagagaggacaagaagcagaagaatggagaggaaaaggaagaagagatagagtgtgatgatgatgtggctaccgtagagagcagcgataaggcctaaggacgagatgaagaagaggagagccgcagttacaatgagagggttttgaacgaaacgttgacactgtgatgggccttgaacgtagacggaaaaagatagagcggcgaggccgatcaatgcgagaattgcattggttgttattacggcggcgttgcttagccggagcattgtttatcggcggttatttgggagggggagagggaagagaagtacaaaagtggggttgtggagaaaaccagcgtcgtaagtgtgatagatattaaatacaggtctatcatctatgtgtgtatacgaggaggttaagaaaatattgaacttgtttgacataaagaatttataaaatgttttttaaataatagaataataaaatgtgagtattatatt

SEQ ID NO: 61166 - DNA, 570 bp, Arabidopsis thaliana landsberg
tcgccgggtatatgcatatacacatttatatggaaattgtgaattcattatttatgtgctacttacttactaaatactaatttattctgatctttagatacgagaaactgaatctccgagatataagaggcttagcaaagatcgcagggacgatcctatgtgtagcaggagcgatctccatgactcttcttcgtggaccaaagattctcaactcagaatccgctttaccgatcgctaaatcggtattaggacatcttaaagaccagaacacgtggttgattggctgtttgttcttgttttctagcactctttgttggtccttttggcttatacttcaggtaaacttcattaaataaatcaaaagtctaaactttttgatgatgttatgtttcttgtcttacaagaaaagtgagttttgtttcaacaaaaccctaggttccaatctctgcctactatccagataacctctctttatcagcatggatgtgtttattcggaacaatacaatgtgcagtcgtcactttcttccttgagagagacccaaacgcttggattctgcattcctactcc

SEQ ID NO: 61167 - DNA, 366 bp, Arabidopsis thaliana landsberg
  unsure (1)..(366): unsure at all n locations
catccaactgnatagcnnggtgttagtggtttgtaggaaatcgacaaacataaaagacaatgtggatggcacatcaaaaagataagggaaatgcattgggccatgggaaaaggctgttagttacatctacgctaagactattgccggaaactcggaatacactcaattaacctagctccacaaaaataaatgaaacacgtatacaaaagtaacctatatgtgttatcgctattcaaagaattaatatgctgctgataatgcgtcataaatgtgatgaaaagacatagcagacagatataacaatttgctacaatcactaccaagcttctcagaaaatacagatacactcaaacgtgacatcaaata

SEQ ID NO: 61168 - DNA, 798 bp, Arabidopsis thaliana landsberg
ttgctgaaataaaatataagattcacgtacgagagtcaaaacataaatagaatctaaaagactaaaactaagtcaggtggattgaaatctaacaacaaatttgaaaaataaagattgtttttgtttctgggtgcaagtagaagttatttaattattgtttttccacaaaaaattttgatgttagagaataaacaaacaagaataaaaattacctgattttgctagtagcccaatcagcccatgacttggctccttgagcagcctctccggcgctgcttttgaaactcgaagcggcagcctccgccgcaagagtcatctcattgcccgtcactttcaccggtaactcttccgccgaaaccattgtcataaccattgacaccgtaaagataattgcaaagaatttgactttctccatttttgcttgcagaatttgcacctattaagaatttagaaaattattactattgattaaagatttttgttttaagacaaaattttgctagattgatttgtcttctatatgacaaaagaagtgtactatttatagagtaataagagcgacttaaacggcaaaacgatcggaacacaattttttttttttaataataataacacagttttattgttaatgatatttttgatttcatttgaaatgtatgtatgttttcagtgatttatatcttcaattttctttttttgtcaatattgataggtgttcatgtcttgatcctaatatcaccatcaccactagtgtcccccccgttccccaatacgctaatctaattcgtaacaagcaaa

SEQ ID NO: 61169 - DNA, 626 bp, Arabidopsis thaliana landsberg
tcgcatgggctttatcttgtaccaagcagtttatcggagaagttaggccctattaaatgattttttagctaaaaataaaagtagttgcaagaacaagaacttaactaagaagagagcacaaatgctgatgagaacacgctagtacgccacgttctttggcatattgggcattagggaacgtctgattattaagttaatactcgttctgctgcctccaaatgcactatatggaagcttaaaatacgatcaaaagagatgatgaagtacaaataacacattggtaattgttgtttgtatgaccgttaaatgaaatgagtttggttcaaagttctgatttttctatccgccgcagcattggcgcattgcttttttgtataccatgatctaattttgatcataaatatgctttttatctggttcgttgatttttgataaaacaaaaaatcttgttcgctgataatttttcgatgctgtttatcttttcatattccaattgttcggttttaatacatacacacacacacatacatatatgtgctaaaatttaataagttaaaattctaacaactggaaattgcccctttgggatgctatataggccaacccaatgtgtatctatattttag

SEQ ID NO: 61170 - DNA, 1056 bp, Arabidopsis thaliana landsberg
gtgttcccaaatcgaaattaaatttaaagagaaaaaaaggccaaaaatctgatctttgttaattcctgaaaccatttcaacgacgaaaacataaccgacaggaaaagacttacaaagaaatattcaaactcgatgaaacataaaaccgatgaagaagagatcagaaaggaacaagtaatatgtacggaaattccatcaaggagatttatagattggattggacgttcttaccaaggtgaggagagagagagagagagatatgttcttgggacacaaattcaagatgaacaaataattgtctgaaaagacaactacgtgctttttcttctaaaatttaattttccaatcaactgtaaagttttgtaaagttgtaacgatgcaagaaaaaaaaaagaaaaaaaaaagttgtaacgttgccattgccaatgttaagggtcaaataccaaatacatttccttcgttgactcgtttctacccaaagtaatttctacatttttatcagcatttatttctattttgactagaatgaaattcggtttgattttatatataaaatttcatttcgattttatggccagcctatttcaaaattttgttagaccttttaactttccacaaacactcataaagtgtgaataattaagaaactcatgtgatctaatcatgagctaatcattatcttagttgatttggttcaacaaaaaagctaaggaaagagactcttgattactttttaagactaaactgagagagtatgtaaactctgaacttcttttgaatttgtctataaccataatctataagcaatactacaaaactgaaaatacgcataaaccaaaaaaagatccttcatagtgagttcttcttcttcaagcagatttcaacttgtttgatgctgatgcaagttgagatagtgttctgtgtcccacgaacaacagaaacactcccaacaaagaaagtgccttgagagtcgtgaatagatccaactgtagaatgcaaacaaacaaaacaaagaaattgtgatttgatgcaatgattcaactgtaggaatgcaaa

SEQ ID NO: 61171 - DNA, 582 bp, Arabidopsis thaliana landsberg
  unsure (1)..(582): unsure at all n locations
taaaaagcaaactagaacgtcggtgatttgagggtagtcgccggcatagatgctttcgcagaaatagtggaaaggacagttaataggagcaagtgtgtcctcgaattgccactttgtgcatttgaaaaatgttttctttctatcagaatccatttcccattctgaattcataatttgcttgttttttttgttttgatctatatgtttttggtttccttagaagctacacatatagtttataaggagtgtgtgtgacgtgacatcatcatatggttgattctctttcattgtctggttatagatgcttgaactaaaatggataatgaaactctatctgaaatctgaattctatcttcattttttgtttattaatacaaaaaatcaccctttgaatgaaactatgtattgagagaagccttgatcttcaagggaaataaaagtttggtgtgcagctgatgattgattggttctgtgtaattggtaaattgcatgattacgtaactgagaattcggtttaaccgtttaaattccggtctactgaaatngctacggaaataaaccgaattaaaccgaaccggatca

SEQ ID NO: 61172 - DNA, 258 bp, Arabidopsis thaliana landsberg
tacggaacaattaaaaacatcacacctcccaaataacaaatggaaaccaagacaccctccaaaagagcctacacacctcgtcccaaactctcaccacaaacaccacctcccataacaccaacaaaaacgacttctcctaaacaactcccaaatccaacaaatgacacacatgactaccacctgaaaaatcaccacaaaaccttactcccttccccccaacacccccaccaaaaacacacccacaaaagcaaacaaaac

SEQ ID NO: 61173 - DNA, 1252 bp, Arabidopsis thaliana landsberg
ctaactctgacgaatagaagaaccaacagacactgggatgcaagaaacatctatatactcaattcttttactttggtcaaatttaccagctgcattcttgataacaaaacgtatatgtactcccacttgtattttgaacaataattcatctcagaactttaagatttacaagaaatattccttaaggggctagttcatatatcattctagagcaatgttcacattcatttgccttaaacccacgtacctaacacgataagctgaatgaagtaccattctaaggaagaaaagacaaagaatcttcatgctctaatcccatcatgattcacgagtagtccctactctgttctttccagccatccaagctgaagtaagaggcaaaaagtgaaaaaaataatctgagcaagcacatataactatataagcgcccctcaataattaccattcgacataccttccaggcatacatagcaaagaaggcaaccgtgtcagcagaccagacaagagcaaatgatttccaaaagaagggaatagcaacattgagcaaggggacgatgagaaagaggtagttaagagcctctttctctttacttggacagtctcgtgcccgaagagaaggaatagctggaaagaaagtaaaggattaggggcaaaaatgcagccttggaataaataaagttagaagaaagtagagaaggagacatactgaacatccaaatggaccacatgcccatcaacctccataaatcaggttcgctggagggaaagaggaggttgaaagaaaggacacctccgaggaacatcgatgcatagccttgaacctcaaaaactttgtaaagagtagttccagggagagcagggtttttactggcggtggaagctctaggggcaaaggttgcagcagtcttgttaacaacctgcttgaattgaaaagtcataagcttgagcaactctttcaacaggttcaagcactagagaccaatctaacatggtgcattttcattttcatgtcttcctatggtttcaacagaaaaatcgtaaatgatatagaaaaaaggcggacctttttcaagtctttaccgagagcagaggatgaggaagggagaggagattccggcgggtcgtccttgggttctaatccgtcagaggtggcgaaaatacggaaggtggatcttcttctatggcgaaagccatagagtgagagctatggaagaggagaccccatgggtgctgcagagagaccaactcattc

SEQ ID NO: 61174 - DNA, 188 bp, Arabidopsis thaliana landsberg
  unsure (1)..(188): unsure at all n locations
aaccgcaacccggacncaagncaaacggncaaagaaaagaccacaaacaaagaccaagggaaaggacccacngcccccccaacacaagaacancccaaggagaaagaaacgaacagccaacaagaaagggacncacgaagaaacccacnggaaacggaacaagaaggaaaagcagaaggaccgaaagg

SEQ ID NO: 61175 - DNA, 502 bp, Arabidopsis thaliana landsberg
taaagccgacctcccggccttcgacgccgcgtacgccggctgaccgatctggccctataggccgcgacgctcgcggtgttgatgatgatgccgcgctcgtcgtccaccagttcggcgtcgtggatacgggcggcgaacttcgacagcacattgaagctgccgagcaggttgatcgtgacgatgcgcgagaaatcggccagcggcagcgccttgccgtcccggctgatgaccttgcccggcggaccgatgccggcgcagctgacaaggatgcgcgccttgccgtggacgccttcggcttcatcgagcgccgcttcgaccgcagcctcatcggtgacgttgacggcaacgaaatgcccgccgatctcggccgctttctgcttgcccagctcggcgttcatgtcaaagatcgtgaccttggcgcctgccttggccagacgtgcggcggtcgcgccgccaagccccgatgcaccgccggtgacaattgccgcgactcccttgatct

SEQ ID NO: 61176 - DNA, 467 bp, Arabidopsis thaliana landsberg
atacaacaaccaatcgttatgttaaagattttttcttatatcacaatcaaaataaaagtgggtggggtagtgagagacaagataatatattactattaaaaaaatataaacaaaattctagaaacatgaaaattgcctagatacacaaaggtgggccattacaaaagattagatttcaaataagacagctacgggaaattataacgtttcataaaatttaattttattagttagctaattggcatcttatagttaaaaagaccagtaattgtctattaatagttgtgaaatagagggttataaaatttggcattggtagttgagaaggatacgaaactgtcaagggaattatcaccggtcgtcgtcttcaatgcttaagtaccaccgtgaacatcaagttagtaacttatatatttttttcaatgaaaatctctccgtctttgtgtccgaatatgttttacacactt

SEQ ID NO: 61177 - DNA, 112 bp, Arabidopsis thaliana landsberg
acggggggggaaagcaacgccaccgaccaaaaacacaaccatttgatttatcccaccccacaaacaaaaacaacaccgggggggggaacaaaaaaagcggccaaccggacac

SEQ ID NO: 61178 - DNA, 1064 bp, Arabidopsis thaliana landsberg
acgcattcaagatgctttctaagtgaccctagaagctaaaagaaataaatagaaaaaaagttgagattttaacgcgtgtgtgagtgtgtgttagtaagtgtgtgagattcaatgtctttgaaagactgaaactaatattttatctgagaaacacaagaacagatgcacaaaacacaacagcacaggaaccaatagggtagtactctactctctctctcttaatagccaatccctagatctctctctctgtttcttgcagagaaatttcaaagcttttagtttgggtttgaagactttaagctccacgaaaatggtgtgagcattgctttgctgtagaaaacaagaaaaacttgctcatactttgtaaagtggggccaaaaagctgatgaagtaagtccgatttttggattttcagctactaatttcttcgacaaaatcagaggaatttggtagaagataaaagcaaatatccaaacaattaaaatataaacacagaaagatgacaaataagaagtattttggatttgtagctctgtttgaaggaagagacaatggtgtgttattattattattttattggtggtttttctttcttcttcttctgtctctctatgggtctctgtatttttttttgtattttaaataaattccaagaataataaaaagaataaagaaatattcacaaagtactctgctttattctaaagagagcaaaaagaaaccaagagagttgtgtcaaaggatgatacttgattctttttttggttcaaatttgttgattttatttttttagaattagtgaaagaataagactgttttctttcttcatggacaagttatggccaactttcttcttttataacaaaagaaccattatagaattggttctcataattcatttcaaaagaaaaagagtaaacattagcttagaatggctataatgaaggagttgaacgttgcacttgcatgcttttcatgttgctaattatatatttcagcggagaaagtgaaaaacatacgttgagaaaagatgatctgtactttattaaagcataagaggtgct

SEQ ID NO: 61179 - DNA, 1289 bp, Arabidopsis thaliana landsberg
gatgttaatgttggtgagagtttcttgcaagctcataatcagcctcaaccaccagctcaggtcaatacgagtaatgcaagtcttcaagctcagaatagtcatgttgctgctgaaccgaggatgggaattgtatctggaggtacagttgaagggaagtatcgaaatgatggggggcataatggaatcagtggaccagacacaagatcagatgtttatccacaagcatcttcttttggagcaaaagggttgaatattgatatccaatccaacaaaatcgctcaacaaggatcaacgactgttgtgttaaacaatcatggtttttcggggaatgcggtaaatgtgcctgagatgcctgtccataactcctatggtgctcctcctcaaggtgctcagcagattcctgttagccagatgagtgtgaatccaaatgttatgatgaacaaaagccctacgcagtcatttgttgtggacaatggaaacaccatgctttttgttggagagttacactggtggacgacggatgcagagattgagagtgttctttctcagtatggaagagtcaaagagatcaagtttttcgatgagagagttagtggcaagtctaaagggtattgtcaggttgaattctatgattcagctgctgcagccgcttgcaaagaaggaatgaatggtttcattttcaatggtaaagcatgtgttgtagcctttgcctctcctgaaacactgaagcagatgggagctaatttcacagggaggaaccaaggacaaaaccaaattcaaaatagaaggcctctgaatgaaggaatgggaagaggtaacaacaacaacaacaacatgaatacacaaaatggagatggtggaagaaattacggtagagggggatttgcgcgtggtggccaaggaatgggcaaccgtggaggtgcttggggtggtgcaatgagaggtagaggggtaaacaacatggctagtggttctggtgctggaccgtatgggcctggactagcgggtcctgcatttggtggtatgatgcatccacagggtatgatgggagctggtgggtttgatccaacgttcatgggtcggggtgctggttatggagggtattcaggtattgcctaccctgggatgcctcattcttatccaggtgttaatgcaatgggaatggttgggattgctcctcatgtcaatccagccttttttggcacgggaatgggaacaatgggtagctcagggatgaatggagttcatgcagcagcgatgtggagtgaggctaatggaggtggtggtga

SEQ ID NO: 61180 - DNA, 1625 bp, Arabidopsis thaliana landsberg
aatacaacaaattagtatgcaatgaaaatacaattttagaccagaaccacaaaattacaactactcaatatatcgagtattacaatatattgagctataattcaacttttcacctatagttagctagttttgaccataatttgtagtatagtagtatgtgttagtacgtcgatgtgtcaacattcatgttcaaacttgcatattacatgttattgacatgttcttccagtagtatacaaattacacattttcataacttcatatatgaatctcctgcaattttacctgcaaactattggtcaaagccttttaaatgggctagatcaagcccactaactgccaaaatattcacttcatttattcttggagacagtatacacattatcaaatgtacacacattttcatgatttgatcttagatattatttcatgcaattttagcctctattgctatgctttcctttaaaaacttaccgggctaatcaaaacctcttaaaaagcctccatatcaaaagcccatcaatgttacctcgaacttagtggaatcaaatacgctggcgtttgatgaaaatgacgaaactagccctttgaccgttcaggaaaaagtcttccgacatataaaaaaggagaagcgagaagacgtgtcggctgagaggtaagaggaagagagactcaaaacggcaatgagcgaaagtgggcgggaggattcttttccggcgactcttttatgtcttctcttcctcttcgctccggtgagaagatggaatcgccttccatctccgacgccgttccacttcacgcaccagaagacgcgaccgcggatttttcccaaccgcaatcgccgttacatgaagttgattcgtttccagttactgaatcctccgatgatgttgttgttaacgtctcggagataccgaatttatctccgtctgatgatgattttgaccacgagcgaaatagcggcgaggatcgcgatcaggatcacggcgagaatctggctgagaccgacgttgttgttgttgttccaatcgatgagttgaagaagaagatcatcagacaggcaagtgatcatcaatttctattgatgaattggctgattgatcgagcaattttggaattagttaactttgattcaatggcttcttgtgtatcaatgtcgattggttttaggttatggcacttcattaatcatattaacgagtagtttcacgaatatgcttaagatttgggatttattggtatgttcttcatcttaaggtttttgctgaatctagtgttgttctactttttgcaggttgaatactactttagtgatgagaatttgcctactgacaaatttcttctgaatgcaatgaagagaaacaaaaaaggctttggtgagtatacttttttttcttggaaataggcattagtttatgctattttctgtgaccaactttgaggaatcgctattggagttatgaacgtctttctgatacttgaaacatgtatctttgaaagtatgaaactttgtgaccgttgtctattgaatagagaaattgcaactgatatacgaaagtgggttctttcctgtaccaaacgtattcttgcagaaccatggaaagtagtatttaaggtggctaaac

SEQ ID NO: 61181 - DNA, 472 bp, Arabidopsis thaliana landsberg
tttagttaaatttcctataacgggatctagaaaaaagcagagaaaaagaatcttaaaagaaacggtaaattagagatgtaaagacaaaataatatttgacttgctcaataaaatgatcccttttgtgaaaaaaaagacaaaataattattctcattatttttttattaaaaatctgtgtaattaatactttaatagtctaaaaatttatataaaataaaagtcagtcaatataacttgcaaaaatgaatttaattacgtgtggtgtttcctaattgataatttaattagttgagcataaacacttcaaaacaatcaaaagagtattatctaattttaactaaagtaaccgtctgtcaccatagcagttggacgggcgagtagagattggttggtaggtacgaatccattctgtgagctgggggttggtaaaagacttatgtaaccgtccagtcactataacatcaggcccaa

SEQ ID NO: 61182 - DNA, 838 bp, Arabidopsis thaliana landsberg
gaaaccatcaagagagagaaatctcaccgaaaaccgttggaagagctttagtgactgctggaaagctcgagagagttgagactgaaccgattaggagggagggacgccggagaagcttcgccggccagggaatgccattctgaaattcttcaagcgacgcctcgtaagttgtgactgggagaaaactagggcgaacgcaacttgatttctatctccattctgaaattcttcaagcggcgcctcgtaagtctatagaaaagtatctaaggttggtcttgagtatttaaatctcactggttcactcgacgagaatactttgaactaatttcaccgacttaggattcttagagaatttttagtcaacctattttattacattaattgtaaaaaaattgtattttcaaaagttagttatttattaaaattctatacaatataatataataaaacaacagatctacaggaaaaaaaaatataacttaattttatgagtttgcgacaagaatttgttttttttcttgtagtatctgatttaacaaaaattagatatgattatagacaaatcatatctcaaatatagatacatgcatgccattcatatgcatattgcaagaaatatatgtgcatatcacattacatttatgcagatattacatgtatgacattaaatttggatctcattaagacaatatatacaactaagaaaaacaataaacttgattcatatagaagaacaatcttttataatctagtaatctgatataataaaaatttatgaacaataacttggaagaaaataaatgagaatatatctaaacataatataaatgagaaagga

SEQ ID NO: 61183 - DNA, 772 bp, Arabidopsis thaliana landsberg
  unsure (1)..(772): unsure at all n locations
catgcttgcttgacactctttatcgttctcctcctgcttttgctcagaaatgagactgttatctgaaagcaagaagtaacacataatcagaacatttcaacaaagtctaatatcaggtgtaaaaccgagaagtcaggtcttccaaagtacctttagaacccgagttacacttatggttcttcactatctcctcttgagtttcagattcttccaattttttctcaactttactatcactcctcggtttctcgctaccatctatcccacaaacaaacaaaaaacttacattttcactaaagcagagagtctagagactaaaccacagattaaacccaaatcttccactctcatcatgttcagcaacatacaatgaactttctcagaaacaattgcagataggatttcacaacaaacaagtttactttccttacaagcaagcaaagcattgaagccaaaacaaagacaatttgattacctctcttctcttctgcaacagacaatgccttaacatcacttgccaacttagcttcctcccgatgctcaacacgatcactgttaacgccattgaaattatgcccatttctcgccatcgaatcagctcctctgtaacccccaccaccaccatgatgcttgttaaacccaggccctgatctccttgctccaaatttcccaacttgatcagaattgtaatgcctttgaggtggcatttgctgttngcctttccaagcaatctgctgaagattgtaagaaacatctgcaactgggaaaaact

SEQ ID NO: 61184 - DNA, 632 bp, Arabidopsis thaliana landsberg
  unsure (1)..(632): unsure at all n locations
ataagtgatatggtcggttcccgggagtgagagacagcttagagagccttgtagtcgccgggattttcagagacaatgactcttccaaatgtataatcacattcagacaaggacaagacactgatgggtcgtccaaaccagggaacaaacatatgaggctgcgagtgatctccctatggttctcaataacagagaagacacaagaaaacttctactttgttaagaaaacagaaacagatagttttaggggttgcaaagaatttagcaatcagtttaacctcgctgaagaaatcaatgatgcatgcgtctggtttcacaggtatgatttgctttgagaccaaacgttcaatgatgtctgaaagagctgatgggattggctctattcttcgatctgcataaagcccatatctcatgttaaccaatacacagaaattataagtaaataacattttaaaggacttgcctttgatactatcatcatcaggcggcgtatcagctataggaagaccgagttggatcatctcacgtccatgtcctctatttggccgtttataacccacatatgcctcacctgtttcccattaaccaagggtttaatacctgactaaaacaagttanatcattattgtagg

SEQ ID NO: 61185 - DNA, 518 bp, Arabidopsis thaliana landsberg
aaccagacatataagtgaatttctgacgaaatttgatttatgatgactggtctctccaaaaatagaaaatggtgtggtagtatatttttccgaaggagttgtaatttgacttgccataaaccaactcgtttttcaagaccaagcagcttcgttgttccattgtacctaatatatttggaccgacatatgaacacatatgtatagtgtaatttacttattagaacttcaccaaacttagcttttagtatttgtcaacttcgtagtgtcaagtacaccactttctaatgtgtatgcgcgtatgcatatatatgtctgattcaaaatcgatgtacaagtggttatcaacttagctattataaaattatataatttatgtgctgtcaacaaaagaaaaaagtttaccttttgctgagaggtttgatgtatgtcgcatattttgattttaacctatgattttcacatgttcttgaaacaagatcaacttcatacatatgcatatactaattgagctaagatga

SEQ ID NO: 61186 - DNA, 582 bp, Arabidopsis thaliana landsberg
  unsure (1)..(582): unsure at all n locations
ttcctaaccttaccacatattagttttcttggattctactctgttaacaatcaaccaaatttcatgtatgtgtgtatatgtacacacaactggcaatgaatcagaacctttgtccattaacttattccaagaacagttttacataagcagttccagttaaaatctaaaacacaagctgtgcatcgttgttcaatcatcgttgctgtttggataattgtttttgagcttggaacatctcagcaatctgaaaattatgtagagaaaatcgaaaattaaaaaaaaaagcctagtcttagctttccaatgttaaaacataatgaattggctgctttcttattgtactaaagttccatttgcctgacattgttgtttgttttcattcagcaaaagaggctttctcttctctttggttctgctggtcttgaaggtgcttctcttggccccttgatcgaactggcactttattgttttgccattggatgctaattggtgatgttaattttcagtgagacgacgtttatatatttcttttggntctccagcatatcttttggaataataataagctactagttattactc

SEQ ID NO: 61187 - DNA, 1981 bp, Arabidopsis thaliana landsberg
  unsure (1)..(1981): unsure at all n locations
cactaagcaaataattataattttctttttgcatgtttgaagtgttgatatataacggtgctagccaacatttccaatgttgtaatgttttataaagcttgatgagaattaagaagatgtttataaaagaatcacatttccaatgatattcactcggtatagttatataactacgtactcatttgtactaatattaaaaaattctcgataataatctgttatatttttaaatgcaagatttgcaccaactttctctaaaatgaataaaaggtcgatgaatgatattttagggttgactaatttgtaatacgatatacaatcgagttttatccgattattactatggtagtaaataacgcggtcaaatgtggtcgaaccgaaccggtgacgatcataacatcaaatgtggtcgaccgagtgacgatcaaaatatcaacaaatgtggtcgaacgactgaaaaccaaactagccacaaacacacataactttttcggtttggcttagttaccctagaagattaccctcaaacaaacaaaacccaaaaaaattcaaatattaatgttaaaatagaagaaacatattttaagaaaaagtcatttcttttaattgttactttagttttggacactacaagctgaccgagtagtccaacattcgatatgaaagaaagtggctcactgcctatatagctctcgccactgggagaatacaaggttcgatcctagattttgatggaatgtcaaccaagattcataatttgtgcacttgtttttttcccataatttcttagttaaaggtacataaatataaattttaagtagtcaagtgtgtccaatcaacaaaaggtaaatctataaaaatttggaaatttatcaaaatgaatcaatgtaatgttgtataatatggaaaaatatgtagtttagatgtttttactttataatacttatcattgctgcatcaccattcatattaaaaatgactaaataaatactcaagtatgtgttaacctcataaaaatgaaatgaggttaaacttctgcaatttcacatatggtaaattgtttctagagccaaaagacctgcaacaaggtgattcaatcttcttcttcgacatttaacaagtcggaagttcatactacaaatatcagtacaaaaaatcatactctatccatttcaaattaaatttagttaaagtgtatacgtaaatttaaaaaataaacgcattttagattttcaaaatctgagatcaaatacctaatttaacctcatcaaaatcaagagtcatctagattgtaagggtataatagaaattataatgtttttaataattttttgtaaaaattttaaatgacacttatagtaaaacggagagaagataacttaacagccacgaaatcgcgacttgagatttcaaagagagaaagtattcatctatgtactttggcacatcaatactcttaaaatttaccaaaatatgtaatataacatccctaaccatcaacaacaatcaacataaattttaatatatatgtttttgtaattttcgtaaaaatattaaaacaacacttatagtaaaacaaagagaggataacttaacagccactgagatttgagatttcgaagagataagatattcatctatatatcttgacacatcagtactctaaaaatttaccaaaagatgtattttaaaatccctaaactcaacaactccacaaaaaatttcagaatcaatgattgtagaaacacatgatttctggttcagaatttcacacactccacccaaaaaaatacccttaaaaagttataattgtattgattagctgataaaatcaatttattggaaagaaatcctaataataacgctgtaatagaagagaagagaagagagagggagacgtgagatcgtgaattatgcgtgacgaagttgacttgagcttgaccattccctcgaagcttttgnggaagcgagacagagaaca

SEQ ID NO: 61188 - DNA, 345 bp, Arabidopsis thaliana landsberg
  unsure (1)..(345): unsure at all n locations
nnnnnnnnnnnnnnnnnnnnnnnnnnnnnnnnnnnnnnnnnnnnnnnnnnnnnnnnnnnnnnnnnnnnnnnnnnnnnnnnnnnnnnnnnnnnnnnnnnnnnnnnnnnnnnnnnnnnnnnnnnnnnnnnnnnnnnnnnnnnnnnnnnnnnnnnnnnnnnnnnnnnnnnnnnnnnnnnnnnnnnnnnnnnnnnnnnnnnnnnnnnnnnnnnnnnnnnnnnnnnnnnnnnnnnnnnnnnnnnnnnnnnnnnnnnctgagtcgacaaaacgtcaatctaaaagatacatagtcgttgctgattacgacggaggcttctctttggcctatccgaaaaggtattacatgcc

SEQ ID NO: 61189 - DNA, 514 bp, Arabidopsis thaliana landsberg
  unsure (1)..(514): unsure at all n locations
ggcagcaaggtcttgggccacggcggattacacacacacacacaactcactctgacttgcgctgcgtgcaaatggtaaccgtaaccgctgtctagcaggaaggaaggcagcgtggcaggcgccgatggatgcaggaaggcaggcaggaaggaagcgcgcggcaggcgggccgggccccgtcgcgaatatttgcacgttgttggccggcctgcccggccccgcttggcttcgcccgtatcctccaggctacctcatcatcttttggctgccgagcggggacacagcgtacgtatctgcgaccacctgacggaggaggcagctagcgttgatgcaagcacagcgaggacacaggggtgcctttgtgctagatctgctgctctgacatactcatcaggcgcctagctagctagctagctaggtaggtgggtccttgtattttatgcatagccaagtgaagtcccatttccatccatatatccacctcaacgtatatatatnatggcggatcaacatg

SEQ ID NO: 61190 - DNA, 102 bp, Arabidopsis thaliana landsberg
  unsure (1)..(102): unsure at all n locations
cccccccccccccccccccccccctccccccgcagcctcccacncctcactcactttcccccaacacgcacgtccctcatcccgctcccctgctcaggtccc

SEQ ID NO: 61191 - DNA, 502 bp, Arabidopsis thaliana landsberg
ttttaatttttatagtttctggagtttgttgaaaatatggttgttgagccactttagaatttcttgttttaatttgttattaagatatatcgagataatgcgtttatatcaccaatatttttgccaaactagtcctatacagtcatttttcaacagctatgttcactaatttaaaacccactgaaagtcaatcatgattcgtcatatttatatgctcgaattcagtaaaatccgtttgactatactatttatttcgtataagtatgtcattccattagatttccttaaactaaattatatatttacataattattttctttaaaagtctacaacagttattaagttataggaaattatttctttttttttgttttttttttttaggaaattatttcttttgcaacacatttgtcgtttgcaaacttttaaaagaaaataaatgattgttataattcgatacatttcagtttatgacagattttttttatctaacccttaatg

SEQ ID NO: 61192 - DNA, 491 bp, Arabidopsis thaliana landsberg
ataaaatagttgttggagggtcgacggattcagatcatgacatcagggaccaatttttcttcacaacgaaaaaaactgtcaacgtcggattgcgtcacgctaatgtcttttttccttttaacgtctgcgtcacgttggtgctatagttaaattattatgtccatattcgctagttgtttcttctttcttaattttaatagtgaccaggatttggtgttaaaaaataaaaaataaaaaatttaagatttcaaaaacatgcaaaacagaataatattaaacatgtaaacataaaaaattaaaaacatacataaacaacttttttagatagaaatttcttaattctcaacaaggtaatatatgaaatttgatcttcaaaaccattattttccctgctgtgaagagcacatcgttcgtcttttattttgttgggtctaacttctacataacttcagaccttcatttacagtggcatatattggatatatctatat

SEQ ID NO: 61193 - DNA, 1544 bp, Arabidopsis thaliana landsberg
gagagtggatgactaagctaatctcttgaacagaggaaatgcttcacgtagaagacatgatgaacatttctggtgaattaacacaaaaatatttagacaatcaaagaggaaactatccaaaaagggaatataatcaatcacaaaaggcacgccagaccaaaaccattatgattatgccaaaatcaaagtggacaaaactacaaaatatatcagatcataaacaggacaaagttgttcaccttttctcagcataatatggaatcaatttgagagttcgtatcacaaattctcattaacaaaaactcctacaggagaacaaaaacgaaaaaagaaagggtctgttatcaaaaagagtaaaaaatcaagtaaaataatgatgatattctggactatcttaagaaaagagctggaacgtattggtgaaataataatctttgaacgattaaagaacttaataagagcttaagttttttgcgtgggacatgtcttcttttttgttttgcggtttgacaagttcttgttaccaaattctaacctcttaaagaattgaaaaagaaaacaaaaagagagattcaagcttttcaacggctcattagagggccaagtattagctccggtgggacctaccgtggccgacttctttttcgccacgtgtcatagttgggtttgaggtttaacttggtgtcggtatacacacactacttatacagcgacagagattcagaagtacaattcaagccaggattgcaaatcttcaagatcacactaactttaagatgaatacaaaactctgtttgtgcagactgtattttaagatcttgttataatgaaacttataaacacattccacaccctcttccttaaacttgtctctcatcatctatcactaccttcctcaatttcttcgttgtagctcgcagaagaaaacatagcataccgtgcacagttccatattatactaaggccttgagaaaactgctattgattcccactccaagctacatatcacatcctgcacatttgtatgtaccagcttgagaaaacacataatgtaagtaactagtttgttgaaacagacttaggtgatgttttcacctgtggattttgcctgtcgatgtcaaaactgttaatggcacaaggttcagccagaagctcgattggttcttcccctgagcaaaatagccaggacaaaaataaatagaggaaacatcaatttggtaactcatacatgaaagaagaacaaatgtggtagaaaggcgtaaataccttgttctatgataccaaggattccatcttcagagcaggtcataacagggagaatccttgaggatgagacgttggattttgtgtatgagtcatactgaactttccatacctcactttcagacagaggattggttatattctcacttgctccaaccccataaagtacaatgggttgctgtagccaccgaagattccaagcaaattcagtgcctgtagaacctgcttgcttaacacacatcagttttctagatataaaagttattaaaatcattccttgg

SEQ ID NO: 61194 - DNA, 260 bp, Arabidopsis thaliana landsberg
ttgacgcccagaaaccaataacatgtgtttctttcaacaaatcttaacaattggagcctaattatgcgagagtgaacgtggcagctacttaacatggatcttagtcatacatataattgtgaaagctggtaacatatatcactgaatcacatatcctgagaacccatactcaagtagctcaagtgcgctataaatgaatagtctaaaatctattactaaacatgcatatgatccaaccactcatagtaatacaactgtgt

SEQ ID NO: 61195 - DNA, 1070 bp, Arabidopsis thaliana landsberg
gtgatcgcatgttgctattgccgtacttcctacaattagagtactcgtcacatttacaaagtttgaagagctagaagctatcgtagatgattttgttacaccgccatctagtccaacttcttcggtgaagaacagtcctagagaagaaacacagagctcatcaaacccatcctcctcatggtttcaatggatcaaaacaccaagccaacgtccatcaacaagctcgagctctggagggtttaatatcggtaaagccgaaaacgatcaagacccatttgcaattccaagaggatacaattggatcacagctgaagagaagaaaaagaaggtccaagagaagaataaagctaagaagggcaagtcatctcagaacagctgaagaaaaagaaaactcaagtaagaaaagagcttgctctgtctctgagaacataaaatactcaaattaggaaaaatctagcagataaaaaaaaaaacaaatggaaccttttttcctggttcatgtactaataaaccagggaaaaacaaattcaattaaatatagtgggggaaattgaggaatgatgtgggttaatgttgttgtgactttattttatatttgcttaattatgattctttcttcgtctttttgttttaatccttggagatgattattattactatatttctcaatcatcatcttgaaataagcagcaattgttggtattgaaatgataaaaattcgattataaactccgattctcgtaagattcgattccgcttatgttcaaatatctcaagtgtcttaaacttcagtgtttttactcgatatggatttacgaaaaactctctactagaatcaacacatttcagacacagtgctaagaaacaaaacacgtaaacaacaaggtaatagtgtcactggattttacagacaccacagtattttcttctagaattttctgcatgttctccgtcctccgatgcgctgcaaataaaatcccccaaacgcagattaatgtctttctaaggtaaaccggtaactaactaaaggtgttcctaataatcggtaccaaatattttttaagaaagta

SEQ ID NO: 61196 - DNA, 1483 bp, Arabidopsis thaliana landsberg
tatcagtagctttcttttacattccatccgctaacttctggacctcgtcaattgctgttactgcttgtttcaacttagctgcagcttccttcactttcttttgctgcaacatttttcatttcagtaacttatcatcagattctttctttttagttgaaatgaatccattttaattaactaatcaaatgaccattcaattccatcttctaggctatacgacataatctaacaattctgttgacttgctagtatcctttgtgctccacacaacataatgtctaaatcaaattgatgcagggatacagtaatgtttacgaaaaaccattatagaagctaagtggggatagttcacttactaagagtgcggttcttttcttgagatctccgacgtttgcagctaccggtgccactgaagtgctcttttgttcatgcatagaaaacccgactttgacataagtatacacacagttgtataagcatggttatgtcttacatgaactcttgtagatattgactcaaatgaaatgataatgactaaccaaatagatttcaagaaatacaccaaatccagatactatacacatcttttcaaaatattacgaatcatttcaaattctgcagaacctaaaattaaccagatttgagaccaccagagacaaataacatacaactctaaactttttccactatatatgcagaacaaacagtcaagaacaaccgtataattggtatataccttttgttaaaattatacattaagcattgttatgtctaacatgaactaaacacttgtgaaatttatttggactcaaattacatgataacttcttaccaaatagaccaatcactttcacttccacattatacaaaaaaagatttaatgaaatacaccaaaatccagataagatgcacatcttttcaaagaaattacgaataatatcagatacttcacactcacaatagaccacatttgagacaaataaagacattactctgaactttatctactatatgcagaagaaacagtcaagaagaacaatattaaataagacattttcccaaaatacaccaaaatccagataagatacacatttttctaaaaatacggggaatttcagatactgcaatcctaaaagtagaccacatttgagaccagagtcaaataagacattaccctgaattatttccacactatacagaacaaacagtcaagaacaatcatataattggtatcagaccatttctaaatttcttttgacattttgtgaataaagataatgaaattaaagagaaacataccttcctagtcctgcgcacaggctgtgcagctacttcgacagtaggtttccttccacgtctcttagctggagccaccacagtttctgctggaacagttgcagccgccacgtcatctttctttggcctccctcgttttctagaaccctctccagtagcagtagtaaccacagccgccgttacagtc

SEQ ID NO: 61197 - DNA, 284 bp, Arabidopsis thaliana landsberg
attttttttaaaggattgcatttgtttgttgtggttatattgagttatctatctatatatatttgatagttatgcgtttattacatataaaagaaaatttgtatgtttagatgaacaattgacaagtagaaaatttgtatgtggttgtatagttaagctcaattaatatgttaaataaaattttagtttgaatgtaatattttcatttatagtgttaggtattgtatgtctcgatctataaagttaatatgacaattatggctttagtagataatatcccaaaa

SEQ ID NO: 61198 - DNA, 1769 bp, Arabidopsis thaliana landsberg
cctgtcgaaggcatgtcagggggtattagatactgatatgaattcactaactctatgtagttagtttaacaaactgaagaatactacctcactaaaactgttccctgagaaacctcccagtgcagtagttggatcaagtggacccttaaatgcactcaaacatgattctgtcgaggtgaaatgctgaagaaaagtggtgagacagaattattcaaatggaacaatttagactaaaactgaggaatgcaagtatgaatctgtttcttatccaaaagaaggtatgaatctgttaaccgtgaaatgttacgtaacgaagttacctcaaaacaatatttaacatgatcaacgcctccatagtcgtcataattttctggtttcattttgaaatactgcttccaaaagcaagaaaaatccaccagatacgttagtgactatttgtcaaacgaggaaaagctaaaaacgggtggtaaaaaggaagtagtgcaacctgcagaacactctgtgtggcacaatcctctcccaggggtttcatgcagatatctgtcagagaaaccattgaacctgagtgatttgcccgaagtccatcgacctaccatattaaacaactttttacatgtccggtacataaaaacattatatgggtgattagatggatttgaaaatagttgggataccttcttttgtatgtcaaaaagtaacttaatattgtcatctgtcaaaatctctggcgccttttcgtgagaagatgtttgaactgttgctattattagctgcataaattttcataacattgtgaaaagtaccacttatacaaaagagaagcttaatgtttcgtcccccatatgaaaaaaaaaggctgcattatccagcacaagaactttaagttatagaaacaagctgatagaaatgtgaacctgttcaattctgtagaaaggagcaagatgagtgtcaaagaattgtttctcttcagcagctctgctacctgatcctacccacagctgcaacatacaatataaaaacatttacaaaggttgcatatagcaatagcttgtaacagcaataagaaaggggcaaagaaaccaagtacataccttatcaggccgtgtctcaactttgaaccggatcagacccacacaaaggagaagaactacagagactgacaaacacaaaacaagagtggggtgtcttgctacccaaatcccatacttcctgaaagcagataacacaacaatgtcaggaatcctctttttaaagctaagtgaagaaatgtagaaatttcaagtacccgtaaaagttggccaagtgtccttgtactgtcgatagctgaccccagtttctctgtggagtattttgtaacatctgagagaaccaaaagaacacataacaaagcaatgagcatcttacagcagctcaaacttcaaatgtcgtagtgctgagcattaagtacctgcgattgaatagtgtctggtttttgctgattaacagaatttcgttctccactagcttctgacaatgttcccatctgtgaggtctttttcttaccccttactcggtgaagtaaacctcctccaagaaacaatgaaaccaatacaatatacaaaatggctaatatgaaatcaacacatttcacctgcatgattaaccaaccaggaccatgttaagtaacacttcatttcacaagcattcgtaaaaaaagaaaaacaaaatccatactcacctcaagtgatccaatcttgatagagcaagaatgttttttctgagtaggcact

SEQ ID NO: 61199 - DNA, 437 bp, Arabidopsis thaliana landsberg
tgtgcgggggcatggtacctccacgtctatgtttcccgctgttaggttgctttgagccgtggtggatctctaggtgtgacgacacggggttggatctgggagctcttctcaaattcgggggctctcagtctgctcttctcaatttagtgtgatcttttcttttagaacaatgccaaagaaacatgacagactactttgcttgttcttgacatgatgcaaaagcaatggagtctttacttttaaacctttgttatttttgttttgattcaattgtgatactgctgaaatgtacagatatctattaacagcttttgtgatccaattattaaccctgctttgtatagaagagtttcttcagaatatatcaatttatgtatgctgattatggatattatgtggatattttctatctgtgaatggaccatgcactttgatcg

SEQ ID NO: 61200 - DNA, 414 bp, Arabidopsis thaliana landsberg
tctttttccccccttggattaagcctctctaattttcctaaaaatgccttgcttccaaaggggttttttttaagggaccggtccccagtaattaacctctatttttttgagaccaagaaaggaattccgatttcctttctatttacctccggggccaaaaaatcaaggcctacctatatttttcccttttccaggtccttctcccagtggcaggatacccccagggggtaacggtttttttcttcccaatggaagccttcctttaacaacttccttggggatggccgccagggtccatacctcctcttctacctccaggacgttaccctagccaccatttcaatccggttctccccaacctttcctggttaaccccaccatttcccactggtccgactgtggctgaccagtttt

SEQ ID NO: 61201 - DNA, 264 bp, Arabidopsis thaliana landsberg
gtctgtcgtctcggtgagtttcagcttaaacgatagactgatagacacatgtatcaaaatatctatttaatcatatattatattgaccaaaacaactttataatatcatctctttttatgatgaagaaggacactgaggtgtgatggtaaaaatcaaagtgaaatggtacaaatactttcccaagtagatcaatcaccagatggtgctggtgagctaaagacataaaccacatttataggtaaatggactatggctaataagta

SEQ ID NO: 61202 - DNA, 358 bp, Arabidopsis thaliana landsberg
  unsure (1)..(358): unsure at all n locations
tctcatgttcgttacactggggggagttggtgacaattaccttaaatgggcatctctcaccattactnnnnnnnnnnnnnnnnnnnnnnncgagtgcatggagtatagaaatcagaaaacggtaaggataaagtatggcgcgactaacatcatacgccatcacataacatannnnnnnnnnnnnnnnnnnnnnnnnnnnnnnnnnnnnnnnnnnnnnnnnnnnnnnnnnnnnnnnnnnnnnnnnnnnnnnnnnnnnnnnnnnnnnnnnnnnnnnnnnnnnnnnnnnnnnnnnnnnnnnatccacgattacatatctcgtggaggaatatcactgaccactctttaagattgactctat

SEQ ID NO: 61203 - DNA, 1205 bp, Arabidopsis thaliana landsberg
cattacttgagagtcagtgagtatgtaatgattcgtagacagttgtgtgatgtaatcttaaatcatttacagaaaaagaaagcaatacagagaaacagctttaaagtttgaggattgatttgacagctaaaaacaatctgttttaccaaccaattctaaaatgcaaagtgatggattcttctacaggcttttacggatctcggaaacgaacaaaagttttggtgaactacgacctatctcatatgatggaggatcttacaactcttgttaagaaacttctgatggaatagaagagttactcttcttcttgatcagcttctgtgtcgtcagtgtcctgaagatgagaaagagcaacttttggctttttcggtttcgaagaagcttcttcttcctcaccctcgtttccatcctcagagtcctttcttttcagatccttgacatctccttcattgctacaactctctggtttcactatttccgtctttttctcattgttcaccttagctttccttgcttgctcttcacattcttcaaggaaattttgcgtttctgcattacccgcaacatcagctggactcttcccagccttagtcgtagctctgacgcttactcctttcttaaccaagtacttgacgatttcaaagtgagaaccttgagcagcgtagtgaagaggagtgagtcccttgcgagtgatagacttcacagaaccaccggcagataataaagttctcacaacttccaaatgccccttttgagaagcaaagtgaatcgcacccatgtcatctcctgctgcagcaccaacatcagctttgttcttgcataagtagctcactacctcgttgtgccctgcccatgctgctaaatgtagtctatttccccaagagatcatgatgttaaggacaaaaaattgaacaacaaaagactgcaatgaacacgtaaagtacatcacatctatcattgctctagctgtaatctacaaaccatcattctcctagcaaccaaatcaagtgtgacgaatcaaaatgtaaaacctagaaataatgtttagcattgaataaagttgtataagctgatactaacgttttaagaaccctaattaaggccgtagcaaattacattcagcaaacatcggaaaatttgcagtcaaacagagaaaagcgagtcgagagaatttaaatttcatgatcaagcagaaactaacatcg

SEQ ID NO: 61204 - DNA, 2182 bp, Arabidopsis thaliana landsberg
gttttttattagaatttaagttcaatcagcttatttaatcataggccatttaagtaaatagtcatatgagaaaaggtcaaccatattcttatcgggctttatatgttaatgttaaaggttatgggccagtaaggtcccaaaaaagaaaaagagatgagatccattattgctctaatgaggcaacgagaatatttcgttcgggcaattcgtcgaacaacttgcgtgccatcttcacctgcggtgaatcaagctaatttccaagcttcgagatttctcactaccctaagatcttcgacgacatctccggaagagacatgtatcggatcggaggaagaagaagaggagcccaacaagtgtttgtctttgagaatcgagaagcttccgaagggcgtaactgttgggtctgctttacagagctggatgggtgatgggtttccagttcatggtggagatgtttatcacgccattaatcgattgaggaaactcggacgaaacaaacgtgcccttgaggttcgaattcttacttgcttctctcttttgaacgaagaatcagttttatgggtctgaatagtttagaaaaagttagatacttttttggtacaggcattgttgtatcaatgtgattttgccagtttgaattcagatgagtaatttgggaatgctacttgatagaaatgagtttcttttgatgaagatatctcttgaatgtgagctgaaacattttggtatgtttgattcagttgatggagtggataatcagggaaagaccttaccgtcttggtgagctagagtactcttacttgctcgaatttacagtcaaacttcatggcgtctcgcaaggagaaaagctatttacccgtgtccctcaagagtttcagaacgagcttctttacaacaaccttgtgattgcttgtttagaccaaggtgtcataaggcttgcgctagagtatatgaagaagatgagagaactcggttaccgtacttcccatttggtctacaaccgtcttataattcgcaactctgctcccggacgaagaaagctaatagcaaaagaccttgcgctcatgaaagctgacaaggcgactcctcatgtctcaacgtatcatatcttgatgaagcttgaggctaatgaacataacatcgatggggtgctgaaggcttttgatggtatgaagaaagcgggagttgagccaaatgaggtgtcttactgtatattggctatggcacatgctgttgcgagattgtatacagttgcagaagcctataccgaggaaatagaaaaatctatcacaggggataattggtcgaccttggatatattgatgattctatatgggcgtttagggaaagaaaaagagctagcgagaacgtggaatgtcataagagggtttcatcatgttagatccaagagttacttactggcaaccgaagcgtttgctcgagtagggaaccttgatagagcggaagagctctggttagagatgaaaaacgtaaaaggacttaaagaaactgagcaattcaactctctgctctcggtatactgcaaggacggtttgatagagaaggcaattggtgtattccgcgagatgacaggaaacgggtttaagcctaattccataacgtatagacatcttgctcttggatgtgctaaagccaaactgatgaaggaagctctcaaaaacattgagatgggtttgaatctaaagacgagcaaaagcataggaagctcaacgccgtggctggagacgactctatcgatcatagagtgttttgcagagaaaggtgatgtagagaactcagagaaactgtttgaagaggtgaagaatgcaaagtataataggtatgcgtttgtgtacaacgctctgttcaaagcttatgtgaaggctaaagtgtatgaccctaatctgttcaagaggatggttctaggtggagctaggcctgatgctgagtcatacagtttgttgaaacttgtcgaacaatataagccctgacacaatcaagtctgctccaatttttttgattgattggatagttagtgacttgtgggtttaagaagttgttcgtaaaagtatagcttaagaagttgttcgtaaccttacaattcaaaatcatacttgaaaaaagcaaaagtcttatttggtaacccaacatctcccgcacgaagttgagcaacccttttaag

SEQ ID NO: 61205 - DNA, 560 bp, Arabidopsis thaliana landsberg
  unsure (1)..(560): unsure at all n locations
ggacagattccgtaaaatgcgcctttaaccactggatttttcaacatgtttgttagcagcctaggtcgtttgtttgtcgtcagcaacttcggtgaaagtcatggccccgccattggttgcgtggtggatggctgcccacccggtttgcccttgtgcgaggccgatcttcaggctgatcttgatcgacgaaagccgggtacatcccggcatgtcacccagcgtcaagaaggtgaccaggtagaaattctctctggggtctttgagggggtcactacaggggcacccatcggtttgctgattcgtaaccaggaccagcgaagcaaagactatggcaacatcatggacagctttcgccccggtcatgccgactacacctactggcacaaatacggcattcgtgatcatcggggaggtggcaggtcttcggcccggatgacggctcccatggtggctgccggcgccattgacaagaaatggctggcgacgcagtttggtgtccttgttcgcggttgcatgacccagatcgnngaggttgaaattccattccagtcctgggatga

SEQ ID NO: 61206 - DNA, 1599 bp, Arabidopsis thaliana landsberg
cctaagcttgagcacaaataaagaactgaaatggattcgaagaccaaccgagaacgacattgacgccgagtagatatttctgtataagccaagagacaccttcgacttggtgaggctttagagtcgccgcgaccccaaattcactacaacccggaggtgaggggctaaatttcgcctccttctcgagtataatttccgccgccgcttcaagacgccgttcatactccatcaacatggaagggacttttggcggtgaactctcttttgacattttttcttcgtcatacgctgccgtttcgaggaaaagaaccgagaccggttgaaccgggaattaactaagaccggaaaaggaaaatagaagctcaataaacgacgtcgtttattttcgtctctcgtttttttattgactttagatttttgttttaaacaataatttagattgaccaaatatattgatttatttataaaaaaaaataaaaaaaattgataaacgacttatatttattttattttactcgagaaattactaaaatggatttccgacatgaagttggccgaatataattcgttaacaaatcattttaggtgctataaaataaatcataaggggaaatactaagataattatatgaaagtccatttggggaaataatcacaaagcttccaaaatacagacaagtggtgtggatggtgtgacgtcagcagattcggcatcgacggctcaaatgatgagaagagagacacgaaggacctacgctcaatcacctttaattccattgttggcaatatggtcaaatattaaacatttaatcaaacttataatcattttaataacactctttttgattttaaatattttggtagcactaatattctcccaccattacttttccattcactcttaaaactcctcgagtgctgcttaatggtaccaaggaatccatctctatgttcccaacacatatcacacatccattttactgccgtataccataagtaaattttgctcttaattatactcacgatttgtgctcatatttttgtgatttaaactgtatttatgcgtggatggataatacatgataaaatcattcggctggtcatgtaggttacgtaatccaacaatttctgaaataatctatatttgcattattatttgaccatgtctcatcgaccaatcgcaacaaaattggttttgcgtgtaaccaagaaatacgacttttaaaagatagtaattggcgaaaactgtttcattcatgccatctcgatggtgtaaaatttagaagatactagttgacatacataatttacaagattttgtatatgcaatatttgggtatttttagttatcaaactagttagtaccatacttttatctcaataatactaccaaagtttagagtttgcaaaattttaattaattaatgcaaaaaaatcggattgcttggcatgtaaatacttgcaaactcctatctataaaagtataaagaatacgttcaacggatcataactgccaactccacatatttatcaagcgtctaaccagctaattaatatcataacgttcaaaaacatgtagattgatctcatggcgtaact

SEQ ID NO: 61207 - DNA, 1516 bp, Arabidopsis thaliana landsberg
ctccctaattttagattaatattcatgtgactcttttgttagtgaaagcatggttaatgaaggaacaatcaggcgagatactgaacagaaaccttaaaatgaaactgttttcatactttctatacattcaagcccgggctcgagaaagtaccttcattcctcccattgccgagccaatcaaaactccacatttggttttgtcaaactctgccattacttcatcagtaaccccaccatcagccaaagctttcttaccagctgtgagaagatagagcatgaatttgtccatccttttagaaagttttggagcaacccatccttcagtcgagaagcttttgatctctcccgcaattcgcttgacaaaggtaaaacaaagaaagatattctagtacacacaaaagcaaacggagaaattccgcacaccaaaaagcttccaagagatcctgatataaataatacgtaccgtaggaaattcagaacaatcaaaattttcaatctggctaataccactgttgccttgtagcaaattctcatagaaggtatgtgggtcatgacccaatgatgtttcaactcccatgcctgtcactacaactcgacgctgctccgtaggtggtttcttgttaaccgcagcttccttttccatctccatcactgccatggctccacctaaaacccacaaagccagttgatggtagataaacttaatcagctactatccacaaaccacatctcaatagaatcacagccaacttcaaaatttatatataaaagttcactgccatttggtcagctttcgaagctctgtatcttctagagactaacctcacagagtttgctttcatatgaaagatgataaaacatggaatcacaataaaaattcaaactttcacatgtcagctgcttcccacttcaactttacctctaaatttcatcactaacataaacccataacaacatcgaactataaaaactaaaccttgccacataaaaacaaaaccccagattggaagagaaaataaaaaaaggagataaatgtaataccggagctagcagcacgattcaatctcctctggtttcgattcaaagaaacactattcgatccaaagagagaagacaatgcattgttgttgttgtagtgagtacaaggaccaaaatccaaacaagaagtgacgagagcctgaatgctagcggatccagaagcgacagagcatttgctaagctgcctccttcgccgactccgcccaccagattgaagagcaacagcctgacggctatctcctccaccgtgagagacggacatgcaagcagcaacaaaccaggtacataacggagatgcgtaagaggaagacgcacccaccatggcaaaaaaaggaagaggctttgagaagaacccagatgagagaacaaaggagaaagcgagaaatgggtgaagagaagaagagagaatctagcagagagaaggcaaatgggattcacgagagatttaagagaaatcgatctgcgatctctctcttct

SEQ ID NO: 61208 - DNA, 118 bp, Arabidopsis thaliana landsberg
ccctcccccctcccccccccccaccccccccccccccccccctttttccctcccccccccccccccctccacttcccccccccccccccccccccctccccctcctcctccccccccc

SEQ ID NO: 61209 - DNA, 2264 bp, Arabidopsis thaliana landsberg
  unsure (1)..(2264): unsure at all n locations
gtatgtaatgttttaagttcaaacaaaacggcggcgatttaagtcagagaactcaatggaagattcagcgcaaaccaatgagaaactttcagctttgacatgttatccaaatccttgtcttttttttagtttaaatcataagaaaaaacaattaacgtttttcatttgacatttcactttctcatcgctgtctctgtataaaataatatctatatatgtatgtgttgcggatgattttttatttttattttcgttagaagaaaagaaagaaatattatgtcacatgatacggtggatgcaaataaatgagaccgtttattaggggggcttttactatgggggattgacttttggtatgtgcaagtgtattctttttgcatttcgcaatcttcgtttggtttttgtatacaacaaagcattatcttattaattacatatttcatcagaactccatatagacgaattatcaattacaaaaaagggagttcagactaccattacgtatgatttaaacgaataaaatgatatcacgaaaattaacatgacaatagaataaaatgatatagctagtgtaatttttttttaaacagacaaatatgttacagtattaatcaaaaaagaacaccgataattgaaccaatttatttatattgtgccatccatcattttgtaaaaaaatgaaaaataaataaaagaagatagaatttggctatttaatttacaaaaaaaaagagaattctcaaaatctcattaattattaagatattttgttttggacatgggtttctccatgatatttttgtgttttctctaaaaaattgttattttttaattttcctatgatggttgacaccctgtaatagaccacaatttcaatattctccacctaatgaatgggttctaattaatggctatgaaggtttttgctttatctttgtcccctcctttattttcctatcctcaactcatttctcttcgctttttcttctctttttcaaccaaacttaatgcatttccttatcaatttcctctattgtataaaagagttactacacttccataaatttatacccatagtcccataccttcacacatacacatgcacattgtttaaatagtttatcaaccgcccatcgttgaaatagtttaacctaatttcaaagcaatgacttctatgcatgtaagaacttattacatcattcgttaactttcatagaataccaaactaatgcactaaagtacagagaagccttcttgtactcaaatatattttggtgcatttgtagaaagacttatttaaataacaatataaaataaaagctatactagaatctactatataacttccaaaatttgtttcaataattatttcaggcctaaacttaggatttggatttttgttttatacatgtaagtagttttgttttctccggagtagttgttatacaatttaggtaaaagttggtgaaccatcaatctatgactctaactattaaattccatggaaagagtccttgcttgcgggacgaagggaatccaatacaatatgcatatttgatcatataataatccaatttcattcatgttgtcatatgtttaagatatgatcatgaacattaactgttttgccataacagcttaaactaattttgcaagcgaaggtcatgtagattgtagaatgcaatatatgaaatatacagtaataaatagcaattgcccaaattacttgacattattaaataggtaaatagtgtagttgctaaaaaaagcaaataaggcaaggtagctaatttttgtaaagtcaacaacatcattaatttagtagattgtatgcacaaggcatgcattgattaattccaactacttcaacggccatggcttaaattttacaagtttcacggtaagtttccatccttttttgggtatatgagacctaatcaaacgctaagcatttactataatattaggcaactttctaattaaaggaaacaaatattagatgcatccatggaatgagattattgcgtagaaattaggaaatcctttcttaagatggcaaacaaaaaatataaaatgtacaaaataaaagtaaataattctctatgaattctcggttagataaattgtcaaaatatgatgtcataatttgaaaactatagttattatgtcaagaccattaaatcatttattaccaaaacggngtcgtatttatataattactgtaaagtaaagcggcgtatcaaatcaaaaccaaattgagaagt

SEQ ID NO: 61210 - DNA, 584 bp, Arabidopsis thaliana landsberg
caaatcccttacacatttattattactattaatccaaacttcaacggtaactttttttaaaaatttaaccatgcattgttctttaataaattcaagggtttatttttcaaattgtagcgtaattttttcatctaatcacaagctactagttgtaaattttatctttcacctctccttttctttatttatttatttaaaaacttaattagcatattttactattttaaagtaaatagtataataagccgaaacagggataacgatatattaaaagcagagcaaagttaaaaaagaaatgaaagttccagtcgcagtaaaaatttataaacaggtctctcagtctacatctccggcgataatctcggagaagtcaccgggaacagaggcagaagctgcggctcaaaatctctcggagttgaaatcggagaccggtgcaggtaataacccttgtctgcgatacctctctcttcctccgataatggcgacatcttgtcaaaggatcgccttcgtttccgttggttccctgctttaacggcgtcacgggactgttaagtgcaagcttggggaaatcaagacagctaggc

SEQ ID NO: 61211 - DNA, 392 bp, Arabidopsis thaliana landsberg
  unsure (1)..(392): unsure at all n locations
gacaaggacgaattacgggggagaggcgggcatgcnnnnnnnnnnnnnnnnnnnnnnnnnnnnnnnnnnnnnnnnnnnnnnnnnnnnnnnnnnnnnnnnnnnnnnnnnnnnnnnnttgaatcacgctacacaatgattggaaacgccggcattcactgatcaaaccgcagctatattctaaacgctgggatgccaaacgccagcaatgccagaggaaactaccatgacacctctatctcaaaagaccgaaggaataactgatcgataagccacactttcacagatcttgttcgaactgaaaatcataatcaaacaaactattgcccttttgattcacacgagaatacagttgtgcgcgagctcatcttatgacacctgctttatcactgaac

SEQ ID NO: 61212 - DNA, 504 bp, Arabidopsis thaliana landsberg
aaagaaactaatccatggttggtatttgtgatttatttatgggggattgcagcattctctagcacagtctcggttattaataaacttcgaaaactatatatgaaatataccacttatcaggagatgctttgctacctgatatcgaaggaaattttgtatactttgtcgcaaccgatccagcgtcagaaacaaacgactttgagttcgatgagacagacgtttgatcagatcatttgactaaaaataatacatgacaatgtgcgtttcctatgggactagaagcgtctgatattgttcaaccaggattacctgacagtgttattatttcccttttaacgtcggtaaaatgtgcattgttatttcataaatatataaccacaggaatattgggcatcatattattgtaggatattatgatatgggagatcccatattcaactgtcaacaatgcggggaatatgtggtatggaagaacgactaaataataatgtaaaagctaaaaaa

SEQ ID NO: 61213 - DNA, 1768 bp, Arabidopsis thaliana landsberg
cctaagtgtttataatctttaatttttcactgttagcatctgtgtgaatgtgaacctacgaagttgggacttgtatatcgttatacccttgccgagttagatatgatggtacaagaagttgaaaagtttggtgggtgcaaaacacaagaaaccaaaatctcacaacggccgagttcaggcaccaaacgatctattgctttaaataaaaaggtaaattaatacacatagttagcaaataacactgctgagtcttgttttctgttctcgttactggattttatattagccgcagcatagccattcgtcatgcttaacttttctattcaagaattgtaagtgtaattctattaaccagaattcaagaattagataaaatctagtattaaataagttagcagtcttccatatcatatgtttgcttaggccttgaatcttatgataatgtataaactgttgctgcttttctcatactagcaggagggaatgcaagtgagtcaggcacggccagcagacaaatggcttcttagagcatcaaaagttcttgacgctgcgttttctagtgttgaatatgccacccttttgaaggaatcagaacagtttctttgggctggatcagaaatggaccgtgtgagtttttgagtatccgttggaatgcttttgtatatgtctttgggtagattctggaaaaaatattttctgtatatgtcactcaggtacgagatgttacaaaaagtttgaacaaagcaaagatatgggctgaagctgttagtgactgtctttcaaaagtcgaaagtgaagtcaacgatgattcaatgaaagttcacttggaatttattgatgagttgctgagagttaatcctgttccttgctttaattctggttatctgaaactaaaggttagccatatacctgcaacgtcccagttttccctttagattgttactgctgtttgttattacattgtttacatgtttccacttctgtgtaggactatgctgaagaagctagaaaattgtccgagaaaatcgattcagctctctcgagtagcccaactgtatgccactacaaactccattacttccccacatagtctttaggaacatgccttttagttacatgacagtaaaattatttatgttatgcattctaattagtgttacttggttttgtatctagatcacccagctggagctattgcattctgaagtctccagatcgccaatctccctaaaaaaacacgagatcttgtcaaagaaaatctcttccgcaaaggtaaaccatggtagaccgacatatgcatagttggttttccgactcaagatatcttagtagtcatgttttgtgttttaacgaacaagcaaatctgttgtgttagttaagaggaatacgtgaatattgcatattggtttaaattacgattccatatcgaataatttgagatatgattaatgtccgttaacaacctggtgaacccggatatctgtattggcagcgctggtggtatgtttatgttattcgatgtacatttcctcgatgaatataaaaaaagtctccgttaggggtcaatatccaacttggttattgatacctatgtttgtgacaaacttatagtttgttttggatccttgttaatctaaagggtatctatgcagtattttctcaatgcttgccttgtcttgaatttgataatctctctttcccccggatccgcagatgtgagctaataaggaaaaacgctatctcacagacgataaacctccaggaattg

SEQ ID NO: 61214 - DNA, 638 bp, Arabidopsis thaliana landsberg
agtaacttaaacaacttctcaaggcaaacagagaacctaatgattgtaaaggagggtaattatcgagccagtttggtttaattttctatacaacaaaacccgaaaacgtcatatatattcaaatgaattctgaataatctatgtgaattaaaattgcataattttagcgtttggggagtggaaggtattgtataatttgtgcaaagacaacagtggtttgctacacaaggagacagtgagagccgtctatgatggttcttttttcgaacaactcgacaaacaaacatcttctaaaactccttacaatataatcatccaaaaaaaatcctaatgtaaattcattgttatgctcgtgaatctgttttagttaaatctttagtacttacagtaatctatggtgtgaagattgcgatgtgtttgattttcaagaattatactttatttgtgtaagtacttgtgtgattgtatcttattcaaataaaagattatatgatttttttaaaatggttttaaaatattatttaaattgaaaacaaaacatatctcaatttcatgacttaaaaaaaaaacatattatatacatggatgaaaacgttccacaattagaaatgatattttcatgggcgttttttcctatt

SEQ ID NO: 61215 - DNA, 559 bp, Arabidopsis thaliana landsberg
aggacttgctcccagtcgttgaactccatcttctccttgccgccgtggccatggatctggctgacgtcatcccgcttgtgggagtggaagaagaaatacttcgacgccagcgccttcgtatcaatcgtcttgtagagcggaagggggttaagacggtggaataggcaacgcgtccgaagccacgggatgtcgaatccgtttccgaagtgggccactatctcgtcgggctcttctgcgatcttgaagaactccgcgagcatcgcccggtcgtcctgagctttatcccaacggatgacatggacctttttctccccctcccacttaaacccgatgcagatcaccttccgttcttggatgatcgcatcatggttgatggtgaggttgtatcccgcgctgaaggccaggacgatattggggcttgtctcgatgtcggcaaataagcgacgaatacctccagctaccggacgattccgtagtcccattacattggtgttatcctaacacttactgctagggcaaagaaatgtcaacgaaacaccaaggaaagctgcttctggtc

SEQ ID NO: 61216 - DNA, 543 bp, Arabidopsis thaliana landsberg
aaataaagaaactatacattaaagtgttggtgtgttgtgttaatttgacttcttttttctctagttagcaaaccattgagcagtttttctagcgatcggcagccacaaacgccgtcttctctcctccgtctcattcccaccgttttgtaacgcagacgcagtctctgcggctgaaccgctgcaatctccatgaatcgatatactgagtctaggaaccgcagtgatgtcagacaccgatcttcgtcctggttcgatcataacgcttcttgatttcgaaccagagtctccgttttccgaggaaaacatagttgtcatcgaagttaacttgttctccaacattctcttcgcttccatctcttccttgattcgcaagatacctatctgatcctcttcatctcctctcttcacacgatccaatgaagaaaatctctcgctagaaatcgaattaaccatctcggaattcaaaaacatcaaatctgatgaactcacgttgctccaacgattcttgaaaacaacatccgacacaacgatcctatgattgac

SEQ ID NO: 61217 - DNA, 970 bp, Arabidopsis thaliana landsberg
ccacttaattttaaggactattattgcttatatgaaggactaaatatatatctactttaagtttagtggcatataaatatattacaaagaaaaaatcagaggagtcagaatcccacatcagataatgatagatattatcttatatgattggaatatcataattggtaacgggaaaaagaaagtaagacaatcaaaaggaaattgctaggtcttgaatatagaacttagattgtatattaataatcaaatttgcgaatgtagtgtttgttatgaagctaaaataatattattagtagttagttgacctacttatatgtatttttgtaatcaattacatgatttagtaataatgttcgtccaaataaaagaatacaattgtcaagagacaaaaccaagagtagttgtgttttattttgaatgaaaaggaaaactaaataaatagagttataagcaataattcatatatcatatatgtgtgagtgagttatgtgtgtattaaagacttaaagttatataggtataatatatgatgcattcataacaaaatcataacatgtagccaagttattactttatttgtaatagttgtgtataatacatgttgaacaaaaaatattgcagtaataacaatgaaactgaaaatgagcctggttgcttctgtaaccaggtaagctgacatgttccttattgaaaacaattattgagctctttttaaaattaaatccagcaataattcaatcaattcatatattataagtcaaagctttgtttatacataaatctatcttatttacacaaatcagcttcgtttgatctaactaacatgtattaagtattaacattagtagaattctctgaacataacttaaatcaaaacttgtatctactaattatgggaaaacagtctcaaattgaatctgaaaaagaattgcaattttttaagaaaaataaagaaactatacattaaagt

SEQ ID NO: 61218 - DNA, 463 bp, Arabidopsis thaliana landsberg
  unsure (1)..(463): unsure at all n locations
gatccgnttgaggcgcagcatgcggccgatgatctgttcttaaggcccgaagccgacaatgattaccggcgcctcggaggcatcgatggaatcgtaggccggaccggccagcggcttgcgcaggcgcgcctgcagcatgtaaagcggcggcgtcaggatcatcgagaccgtcaccacgaccaccagcaggttggacacatccctggaaatgacgctggcggcagtggcgatgccgaacagcacgaaggcgaattcaccgccctgcggcaaggcaaacgccagcgagcgcgccgcatcctgcggcagccggatgaacaggccgatgacgtacaggatggcggccttgaccgcgatcagcagcagcaccaggccaaacaccagccagggcttctgcagcagcacgccgatgtccgccgacatgccgacggcgatgaaaaacaagcccagcaacaaacccttgaac

SEQ ID NO: 61219 - DNA, 581 bp, Arabidopsis thaliana landsberg
  unsure (1)..(581): unsure at all n locations
gccgatannnnnnnnnnnnnnnnnnnnnnnnnnnnnnnnnnnnnnnnnnnnnnnnnnnnnnnnnnnnnnnnnnnnnnnnnnnnnnnnnnnnnnnnnnnnnnnnnnnnnnnnnnnnnnnnnnnnnnnnnnnnnnnnnnnnnnnnnnnnnnnnnnnnnnnnnnnnnnnnnnnnnnnnnnnnnnnnnnnnnnnnnnnnnnnnnnnnnnnnnnnnnnnnnnnnnnnnnnnnnnnnnnnnnnnnnnnnnnnnnnnnnnnnnnnnnnnnnnnnntcctttttttttcccccaacccatttttaattagggtggcccctttttttttttaaaaaaaattttttgtttttctctttttgggaaaaaaaaccccccttttacacactgtttgaggaagcccctttttttttaaantcccaaaaaaaaaaaaatttttcttttttttttttcgcaaaaaaaaaaaatatatttttccccccccgggggggtgttttttcttattttaaaaaaggaccccccgcgtttttttttttttctttaaatattatagtgnaagggggggaaaataaaatttttttttttctttttt

SEQ ID NO: 61220 - DNA, 579 bp, Arabidopsis thaliana landsberg
actggtgtttagaaaagtcagaaaaggagtcttgtattttgtcaattattgaagatgttaagtggtgtggagttcactggcataatattttattttatttttttttgtgtgtaaacaacttttcaatcatcctttattttgtacattttacatctatattacaacgagaagtaatacagagataactctaaaatctctttacgattcgagtatattttttctgaagatattaaattttcatcattatttatatgataattatactattattgtaacacgttaatcaacatgattattctatggttacaaacttacaattagaagttataactatataattataatatctatattattttgtgtgcaaaatcgttaaaattcacttaaagtgaactatatgaaattttttgatgagtctaaaatgctaatagcattgaaattcaaaaatcatcatatggactaaaacaatttagacatgtgtagtataatcgtcgagcatctaatgaagaaaaaaaaacacatgttaaagaagtatgcaccatcaaaatattttggtgtcggtaccaactttcacaactc

SEQ ID NO: 61221 - DNA, 450 bp, Arabidopsis thaliana landsberg
cacctcgctccttgtacatatcaacgtaaacaatgttttttttcttcgctggagctggttgaggttcgagcttgatggataaagatagcgccattgtcctgtgcgtgactaagaggggaccttgcttaccggagaaaattggggaatggaaagaaacgacgaatgaacgaacgaatcaataagaagaagatgtttgttttagtcttggggaattttgtagaagaactgtcttataaatgtaagcaaatcctatgcggttgttatggatgaaagttgaggacgagcttgcttacttaaaattatcgagaagtagttcactggctaccatatttgtatatatacaaagtgaatttggcctagggctatcgtatgccatatggcccactcttaggcccgcttgagtacgaaacctatcgattttacaacaatacataagaactctctgattct

SEQ ID NO: 61222 - DNA, 362 bp, Arabidopsis thaliana landsberg
cgcctgtacccccatctcccaactgacaaagagagacaagagacaagagacagagatgcgtccagctcatcgaagagagagagagagagagagaacaagagggatggccaggtcgcgcgagcaaagtgccattatgcatgggccattcatcattatcatacccttctatcgggaccggatgctgacgcctgccgccgactgcaatgccaatggggccgtctgtcctagcgtcagctactaagcgggcaagcgcgagacgagagacaacttagacaaagcaagcaaaagcaatcatcgtgcgagcgagaaacaacttacctgggtacgccatcatcataagcacgcacaatacgtacgtgcac

SEQ ID NO: 61223 - DNA, 1166 bp, Arabidopsis thaliana landsberg
aaagagacaagtcggcttttcatataatgtgatcaacaacgatgatgatgattaatatcatgtgtttaattgaatatcctgaactgtagtaaatcaaacgagagcaataatatgtagatttgttggtgtcgtagatgtttttaaagagaatgtgcatttcaaaatcactagctaggccataggtgatatataggtccaaaaaacttctaggttatagacaaaacaatggtagcaataatgcataaccttttgtccgatgacagaaacgtttggtgattcttcaggatcttaaacacgtgaggaaattattttgtaattcactaaaattctctacaattttcacttggttcgaggtttgttgttgagataataattaatcaatttctatgtacaaagcatattctctactccaatgtcatttttcttttcttaatttagtaaaattttaaaataggattagagcaatagagctcataagagaatctatgttcgtttccataaatacataagcatagatccaaggacatatgcattggttccattcatgataaggtcacgcatgaactaccatttttatacgattacattgatcgaacaaaaacaccttacctcattttagagttcaagcttaatcttccaacgggagatgtattgggactttaggattgttatatttgttaaaaaaatttgaataatgttaagttttcaattagtcaaaaatagctaacaaagcaaggctaagaagataattgaccatgctatgatcagaatgtcgttagtatcaagctattaaacactctttaatggattgtcaattttaataacaaaaagaaaaacccaagagactgaaactaaacgtcacatgactcacatggtccttggatacgagttatcaaacaaggagagatctcaacacttgagtccaaactaatcttgtatagaaagtgacatccattttctctactcccactctctcaagtccaagttaattattcgtttccactcaattttcataactgatttcctcacacgtgtcctgcagagacaatacattcacatcattaaattactaatttagctactgattagagtcgtatttttgtcttctttttctagtcggctataagtaatcaatatgaaagcagcctttgattgatatcattatc

SEQ ID NO: 61224 - DNA, 486 bp, Arabidopsis thaliana landsberg
ctaaaacaatatgctgttattggtgatgttagcccaaatgagtggacttcaagatcaaaaacttcaacaataactcaaggaggtaaaagctgctacggacaaacgacaccgtttagtggaacaacgtatccaacaagttcatacgtgaaccagaagaaagtgatagacgacgtggttaaagagatgaagtctcatgtctcattgatggatataactatgctctctgctcttcgtgtcgacggtcatccttcgatatatagtggagatctcaacccttctttgaaaagaaatcctgaccgttcatctgattgtagccattggtgtcttccgggtcttcccgacacttggaaccaattgttttatgctgctttgttgtactgaagatttgattaaccaagatcaaacaaaatgtatctattggattatatagtttcctaatttttatttgtaagttcactaagttcgtacgtttaatcaaacatataa

SEQ ID NO: 61225 - DNA, 448 bp, Arabidopsis thaliana landsberg
cgttacgcacagcagtgtctcttctcttcacatgaaccatttcccaaaccgatttcacaatcacgtaaaccaaatcccaaaccaaactcttcttgtccaaattcacaagctgaagtatcaaactaaacccagcttctaaagctaaacaccatacttcttcatcataatcttgattcatcaacaacacactaacaatctttaaacctagaccattatccaacaacggcattaagaactcttcatcaagaaccgttggcaattcactgaacatcaagagaggcttttttattcccatctaatgagagaatataagaacagagctcgtcccagggtttgtctccaatgaaaacatcaacacagacacgagatacgattttgagagggagtttatagtcttcatatgagttttttgcgagagaaggcaagtactacacgggtcttgataaca

SEQ ID NO: 61226 - DNA, 295 bp, Arabidopsis thaliana landsberg
aatcataaaaactcctggtacatgtaaactttaaaaaaacaactctcccctctctattttatacttttgatatgaaaataaacaaaaattataattcattaattcaatccacctactatataagagaaatcaaaaacaaataacctattatattcacaaactctattttgcaaaatctttaattgtcaatacaaagcatacatacttattataattaagctggaagtagataccaacatatgataaaagttcaaaaaacctaaaaatacttttacatcaacactgcttaaaaaaa

SEQ ID NO: 61227 - DNA, 810 bp, Arabidopsis thaliana landsberg
aagaaaatacaaagaatggctttttacattgtacttgacattttaaggaggacagaatctttcgtctggacaaggatgtcaattgtggtcggaatagaattgaatctcaaatccatattcaaatcatcaaaaataaaaagaaacattttcgctaaatggttttaacttccatttcggatgacaaagaatattattcctaaaattcattttgtcaaaccagtaatattgtgaaactaaacaagttttagatctttatccaaaaaataaccgtatatatatacaatgtaatcatatgaatgaggaatatatatgttaaattcgtatttgatactcaatatacacagatttttacttaaaaaaaacatttgaaataaatggctaaaaaataacacatccaaatttatataaagttttggatagaattgcattaaatagaaaatcttgggaggttgtggtaaattcacgcgtcttgttgggtgtttttatatttcttctttttctcttacttctcatgaaatccgtgtcttttgtttttctttgttactagtactactttagagtttacactgtcttgctcgtgccaaaaaagaaaaaaaaagtcgtcgtctctatcgagtttttttttactattctctctcgagaaaaaaaaaatcaaaggggagagaaaattgcggaggaaaaaagaaaagaaagagaaaatggctctgtgattctccaatttctatagagagagagagaagaagaagattgattagataagtttcttaattcaacgttgagagacagagagagaaaaaaaaaaagattttg

SEQ ID NO: 61228 - DNA, 768 bp, Arabidopsis thaliana landsberg
aattcaagtgcgttgaagttagaggtaaccaccaacttgcattttactctccaaagctctgatttttctgtcaaattcttttgaaaactttgatgcttgttttcttctcatcattgattcttttttgatgataggttagttctacacaaagcttgatcttttaggggttttctctagttattggagagtggtgagaattagaaactgcattatccgatctaaaatgggtgatacagagaagtgtaacagtgatatgatccagagacttcattcatctttcggcactacttcttcttccattcccaaaaatcccatttctcagctcgatttaaaccctaatttcatccgctcatcagctcctcaattctccaagcctttcagtgacagtggcaaacgaatcggtgttcctccgtcgcaccccaacttaatcccaccgacttctccgttttctcagatcccgaccacccgacaacccggttcgcataattttaacccgggaggagctaatcattcacggtcaatgtcacagcccaactctttcttctcttttgactccttacctccgttaagcccttctccgtttcgagatcacgatgtttcaatggaggatagagattccggcgtgtttaacagcaaccattcgttgcctccatcgccgttcacgaggtgtaattcgacctcttctagctccatgaggtcagtgagagtttacctccgagaaagtctcatagacgctccaacagtgatatccccagtgggtttaattcg

SEQ ID NO: 61229 - DNA, 513 bp, Arabidopsis thaliana landsberg
gttggacattctttaagtgttgcaatcttggaagaagactactccaatggtatggtgatgcctccagttgttgcgaaggcgaagtcattgcccaaaaagaatggcaagaagaagaagtcccgtggtttttcatggaactcaaagaagaaatcgtcttccctgtcagtaaagactaggcggctctctactctaacgagccagaggttgacggaaagaagcaagaagcagacaacagagaaggcaaaggaaacggttgtagcttgtataccgttgaaagtagttttcagtaggataaatgaagtgttgaaagggtcagcaagacaaacacagcaccgagcattgccttctgcagccaaaacatgagagacagagaagatagatttttggctggctttacgtttttttgttttctcgtcatctatctgtctgggtttcgaagcttaaactgagatgaaaatagactgttttggagaagttggaagtgagcaaatgtaaatatatcagtagttagtg

SEQ ID NO: 61230 - DNA, 371 bp, Arabidopsis thaliana landsberg
  unsure (1)..(371): unsure at all n locations
aaaaaaaaaaaaaaaaaaaaaaaaaaaaaaaaaaaaaaaaaaaaaaaaaaaaaaaaaaaaaaaaaaaaaaaaaaaaagaaaaaaaaaaaaaaaaaaaaaaaaaaaagaaaaaaaaaaaaaaaanaaaaaaaaaaagaaaaaaaaaaaaaaaaaaaagaaaaaaaaaaaagaaaaaaaaaaaaaaaaaaaagaaaaagaaaaagaagagaaaaaaaaaaaaaaaaaaaaaaaaagaaaaaaaaaaaaaagaaaaaaaagaaaaaaaaaaagaaaaaaagagaaaaaaaaagaaaagtaaaaaaaaaaaaaaaaaaaaaaaaaaaaaaagaaaaagaaaaaaaaaaaaagaaaagaaaaaaaagaaaaaaaaa

SEQ ID NO: 61231 - DNA, 1584 bp, Arabidopsis thaliana landsberg
aggtaaaggtttacggtagaaaaattacgtcgaacaatgttgaaatgcttacataagttgactagtccgtgttgtttttgttctttatagaattatagtcaagaacggcgaattattaagttgtttctgattataaaataaataggttgttgtgaaatcgggggaaaaagaataatgaatacttgttaaatattggtcccctaataaatgttatttattttggttataagaaaaaaaaggaatgtgttgtggagaagagagcgcgagtggaacttgttgctacccaattgtcgccacacttcccacacgtcccctcttgtgtcttttttttacttttcaccacttcctttgtcctctgtttttttcccaccattttctacttcatcaatctattccttttgtttttttggtaaaatatgtaaatatcatctatttaaaaataaaatatgaacgaatagatttataaatatacaaaattgaaattttaagatacttttaatcgaaaagagttaccaaatatttacgtaattaacatttttcaaagtttatttaggtttaaatgtaattttctggtgtaccactaactagactatacataatataaacacgactgtgaaacatgatcatcattagctgttgattatctactaaagaattgtttgttatctctacataagaatatatattgaacacgatttctattatcttttactaatttgaaatagaattgtttctagtaatgacacaaaattaattgactcaatctagtaaaccttggagcacatgcaaactcaattaaacaagtttaaacctttgtatttgcatttattaatcaaagcaaaactgtgaagcaataatttaatcaatggtttaattaagaagctaattagctatttggctcctttagattacgaacgggtgctgctatatctcctctctgtcattagtcattactaaatatttaaaccaagttcgaatctgtcttacattatcttatttcataaaatctcaaagccaaattcatcttttcttttgaaagtgctccctcaaaagctaaacctcaaacatataaaataacaaattcattttaacaaaagcttaatgaattccacgtaagcaattacataacgtttttgcccctagtcagtagagtccctccttctaactccgagaaccagcgtccatgtctcgcggaccaaatgcgttcgtaggtaagacgcttgcacgtgtcgagatgtaatcggtcacgtgccaacctgggttggttgcatcagcatccgacgtggcgatgtgaatggccacgtgctacaaaacctatgtatagaaacacccacccaatccccaagcacttttattcattttctataaaaaaatttacaaggatcgtataatactactaacagtttttttaaaatatttttcagattaacattaataaaacgataaaaggctaaaaataaaaaagaaatgaaagcaaacgcaaaatcaaaatcgatatatcagacaacgcctcgacctttctttctttttatccttctcatcgtctacgttgaacaacaccacacaaacaccatacgaacacca

SEQ ID NO: 61232 - DNA, 522 bp, Arabidopsis thaliana landsberg
  unsure (1)..(522): unsure at all n locations
tgctccttggtatactagatcagagatattgaaaannnnnnnnnnnnnnnnnnnnnnnnnnnnnnnnnnnnnnactggggaagttatattactcaatagaatgctaggaaatacttattgattttgaaatttcaaattactgcatatatattcttgtgtcctgtcctgtgcctgattgatgccaatgaaccttttgtttatttgactaggtaaatctgatgcaacttcaagtgggaaggataccacatctcaatccctatcaactatttccccagtagttcatgtcaaagaaccagttgctgattcaaagcagcctcttcctttgaagaggaaaagatctagtagaagcccagtggatagtgcacgggcacctatggtcgacagtaaaagtaggcatggtaaccaaaccgcagatgtatctggtataacatctgccaaggatcctacgagcactaaaacatcattagataggttaaagcagccaatgccttacaaagggcgaaaagactaatgacttcttac

SEQ ID NO: 61233 - DNA, 121 bp, Arabidopsis thaliana landsberg
tgtaaaaggtggaatctgtgcattttctacgaaattcaccgaaatagagctaacgtatcatgatttttaaatacatccagactattttctgtcaccctagttctaaagctcttgatattct

SEQ ID NO: 61234 - DNA, 462 bp, Arabidopsis thaliana landsberg
  unsure (1)..(462): unsure at all n locations
ccacgacatgggcgtccggccgccagcccgcgttaccggtttgaccgggtcgccgcccgggtgagcgccggggaccgggtcgccgcccggcccggagccgccgtccccgttcacgcgatcatcgcctcgaccgcgcgccgggcccgtgccgccacgtgggcatgcacctcgacctcggtcacgccgtcccgcaggcatcgttccagggacgaggcggtggtcatcttcatgtagtggcagaccgcgctctcgttcaccggttcccaggacaccgccgggttcgcnnnnnnnnnnnnnnnnnnnnnnnnnnnnnnnnnnnnnnnnngcacggaggtcgccgacgtcgagcgggcggcggtcagcatcccgcccgtggacagcaccttggtgcgttccggcggcaggtcctgcgtggcccacagcgctgaggtcccgcatgctcactccgggtgcacgtagatc

SEQ ID NO: 61235 - DNA, 752 bp, Arabidopsis thaliana landsberg
aaattgtgtcctgataatcagtaaaacacacttaaatcctaatatagtataaaggttccaacaaaaattagtcgtattgattacataaaagacttatatattaagctttgaaaaaggaaacatcatgaaaaatcagaatctgtagaaaatccagtcaatgatggaattttccttatccaaacttcagatatcattgagattttttacaacaagaagtacaaagtccagacatttctctaacatgattgatacagaacaattgtgattgcagtctaagagaaattgaatccaattgtagtcaaatgttcacaacagaggcaacaaaattgcgaagacgagagaattcacaattcaaaaccaagataatgcattagacatctaattgaacaagcaatctcatttattcccaatgaaaccctaatttggaatttgaagaacacgaagatctgatcatgtagcagaagaaacaaaccaattcaatcaaatcaaccaaaacacaagaaatcgaaaaactatagactaaccggaatctggaatcggcaaattggagaaggaatcgaatcctaagcattagcagttttagggataagaggaacagcagcgtttccttgtagtttattctgtttagccaaagcttcttcttcacggatcttcttcatcgcaagcattctctccataacaagctcgtattcacacttctcataaacgtgacgctcgtcttcacatttccatggaaggtaaaactcagcctg

SEQ ID NO: 61236 - DNA, 1706 bp, Arabidopsis thaliana landsberg
acatagttaagacgtaagacaaattacctgtcgaatccagaggaaaacaactcatctggttttatgtgtcattatcagcgggaacaaaacaaacctcatcctaatagcagctggcttcacacttcacagcccaatatgtcttatcaatgaacatttttcatcatacgctttttttttttcttgttttttctcgatcgttgctaccactgatgatttatttcagcagcatcagaatttcctgttggatccaaaaattggttatcaattgtttggagccgatcagctcggattgctgcatttaccttcttgtacatctcttccatgttgtctagctcaagacccttcttaaggtagtcacttaaatgagttgtcttcagaaattgagatcatttattcatctcaagagatcattctcattcaagaaaatgtgcttatatgatttaggattgacattaccctcatgtataatccacaatccacaatccacaatccacaccacttgctaaagttacggtacggtgacacaacttcggcataaatctcaaaaattgaataatttgaaggattagaaaataaaataaaaataataataaacaaatgcgaaaagaaaaaaaaatcatagcaagcaaaatttctgcttcagcgctctcgttctgttttggtatttggattttcaatcatggattgagcgattgttctctttttacttgattgatttcttcgataaactctggatcttttgtgtgggttttcataatttctttttttccgatcaatctaatccaatccagagattctgagtctcaaagttttgcttttttgagtctgttttccaaagacatgtagggctggattctaagcttgcaacgtatccatttccctggtctttcttggtgatccggaactgaagtgaaggctctctggattgcttcatttagatcaatatagaggtttatctgacttaagttcttgatgagtttatgttctgtatcacagtagatatatgtggaggagataggtttagttttaaagattagattttgctgtccattttatacaggaattgaagtgaggcatggaagatgtgtccgagtctgataataatgttgagacctccattatccaccttccagatgattgcctttcctttatctttcaacgacttgatagtgttgctgaccatgattcatttggtttgacttgtcatcgctggctcaacatccaaaacattagccgtcgctctttacagttccagtgttctttctctgtcctgaacccttcaagtctgtctcagacaaatcctgatgtgagctctcatcatctccacaggcttcttactcggtttcagtggttggagcatctttcgctttctggctgcactgtgctgaatgattcgagtctcgactccctcaggtatcccggtgcaagagctgcatactctttacttagattgttgctttgggatttctgatgatgggatctccactattgctagcttttgtcccaatctaagtgtggttagtctttaccgctgcaatatcagtgacattgggttaaaaacgttggccagggcttccttgtctctaaaatgcgtgaatctctcgtactgcccgctggtatctgattttgggataaaagcgttgtcacaagcatgcttgcagcttgagtcagtgaaaatctcaacctgcgagggcatgggcggtgtt

SEQ ID NO: 61237 - DNA, 1057 bp, Arabidopsis thaliana landsberg
acaatgagaactacatcaagacgagacttacaataacttcatcaagcaactcatacacgagcacaaagtttttcctgaatgaatcttcattcagaacaccaaggataatccttaataacacgagcaatcctttgtagaagctccaaaacaagagagggtgacacgttaactctcgttgtcgcaacaaaatatagaccaacaaccttgacatggaagtagttcacgccatcgacattctataagcacaaaaaataagttagatgaaatcattacagctcacaaccaaacagaaagtataatacctacaaagataggtggcgcctctgcattgccatcctccttccagaacttgactttacggaagaatgtctctgtacttcctttgggtacctcagcccggtctgtagcaataaaacgttacacatcttgaaacttgtattggatccaaccaaatcgtataatctcaaaacaaatagctttcttctactacattacatacagatactcttcccaaactaattgaatagttttgctatatttgtacaatctgatttggaaattcagctcaacataatttgtcatcggataagaaatgttggtagatcaaacagatcaatgagcttagagaagatttcaatggaaaattctcatgaaacagtgacataagactcgactctgaagagaaaaagcaaaacaggaagaagcagagaggatcagatcgagaaagagagcttacagtcacggaagacgatgttatctcctcgctgagataagacgaagaattgggagatcatcatcgttccttatagcggtggattccgactgtttcaccgcgagtttggttaagtctactgatcgccgatcggtctcgtctttttgtgtgtctggtggtgaggtggttcacgttttaccatttgccgtcgttatcgtgaagcttcttcatgagacggagggttctgtgtttttgtgaattatgatttcttgttcttatatgggcctatttttaagacatcaataaacacaaatttgaacttgttatcagtttaaggaaatagta

SEQ ID NO: 61238 - DNA, 433 bp, Arabidopsis thaliana landsberg
cggctcctgctttcaggtaccgattttccgttaggcaggggtctgaatccgaatggatagggcaccgtttcatatacatattgccggtgcatggcctggtagagctcgtacatctcccgcatattatcgagcatcgagtcgcgctccggttgggtgaagtcaagatcgtaccagcggctggtaatgcttatccagtcaagcgagtcctggtgggtttgtgcatggctgccactgtaatagaaaaccagtagcaggaggctgatgtattttctcatgagttgaatttatggcagtaagataatattttccttcgagtgtggcagctgctgttgaagtgaacctgcaacgaggacagccaggttttttgccctgatctaacagtcgcctcttggggatagcatgcatttttttaagggcattgcactcatgtaaa

SEQ ID NO: 61239 - DNA, 1951 bp, Arabidopsis thaliana landsberg
ttttctctttctttctccaatcactcttcagattccggggaagagaaaagagagaaagaatttaagattcaatctttattagccggagatggattcgccaaactgggaactccgtggttgttgcaaccggaatcaaaatactttcctcatcaccatcggagtcttcaccgtagttatccttctggtcaggtttgcgaccagaaagttatgacctttgcttgattttttcgattatgaaagggtttttgtaaaatctagccaaaagggttccagattgacttataatttcaacgaaatttggtgaattgaggcattttatgtttctaggttaatataattttgattgaagtatcaaagtttctgtttttatgatctttactgagagatttctttgtgggttttggtttgacagctatggaggacatttctattgactccatttaaactcattacggtgtttttgcacgaagctagtcatgccgttgcttgcaagcttacatgtggagatgtaaggagctttctcacttcaactactagtcttcaaatgaacttaaaagggtataagattgattttaggtcacttgaacccttgatttagtttgcaaacatgaatgtgtttccttccatttgtaaaatgttgctgtgtaagagcagagaagatcttctggtttccttagatagaaagatttttactttagcaatatgtcagttcattcttctctctggacatgactgttagtatagccatagataagaggttgcagtatccttatatgtcttgctatctgttttatccctaatcatatttttagacgattcttgcttgcttccattgttaatgtgtaaactactagcttctgtcattagtttaagaacacacagtgagtctacttgaataagtgcagctgctcaagccttagctgtaggtctacattaacttccctaggagtgaatgtaacagattatagctcttttgtgttggttagaaagcttttagtgaggactggttttataaagatgtctctgcagatagttagggtgtagatttgatggcgattttggttctgtaagagtaggagtgttcagcttcaggtcttagtcttactatacttctgcttgtgtttcttctagattgattgatgcatatcacaattttaccttatgcaagtattgcagtgacaatgtgagatctacaaactttcctttgcaagtacttcctgtatgaaacttatctaccagcttctctctatgagtctttatgttttaccccctcataagaattatcttgaataggctatgtaaaggttgaacataaataccaccaaatgtgtgcaccatctctctgtgattctgcaactaacagtcgcatataatgtggataatgtgtttctactaacaaattgtcactcgttttggtaaatcaacttcttattgaatcaaaaggtagaggggatggaggtgaatgcaaatgaagggggttcgaccacaacacgtggtggcatttattggttgatcttacctgctggctgtaatgcacaatctatcgatatatcttatacaaatccaccatttttcaaatttagaactaaaagagataaagttttaacctttttgttgttgaaaatctatagatcttggctcatcattttggggaatggcattgattcttgcatctaccactctgcttacagcaagaatagctgctgctggtcttggtcttgctttattcatcgttctcttcattgccaaaaacgtaagaagtcattatttcccttatattaacaaagttttatttccttgaaagtcatcaacattaaacaataagagcttcaattttgacagtggacgcttcgagggctatgtataggtgtgatatctcccaatacataaatgttgcattttctttttaaggacccagaaatccttaacatagtttgtaaaaaatcttcag

SEQ ID NO: 61240 - DNA, 501 bp, Arabidopsis thaliana landsberg
tgctcgtgcagggactggtcctacctcttctcggcgtcgcgctcggagaagaagtcatcgaagcgcctgcagcagcagcagctgctgcagcaacaggacaacaacagcaacgagacaaggtacctcggggtgaggcggcgaccgtggggccggtacgcagcggagatccgggacccggccaccaaggagcggcactggctcggcacgttcgacaccgcggaggaggccgccatcgcctacgaccgcgccgcccgcaacatccgcggcgcaaacgcccgcaccaacttcgcctaccccgacctgccgccgggctcctccgtcaccccatacctttccccggacctctccggcgaccagctccagcactactattacgccaataacgaccccgtagcgcccgccgctgatcagccgtcaacgccggcgtgcgatcagtccgcacatggcggggccgccggcaccgaggcctatcagtactaccaccacgtgccagtggagatg

SEQ ID NO: 61241 - DNA, 729 bp, Arabidopsis thaliana landsberg
cctgcaccgcggtcgggtctagccgcaagcagtcccagaactccgcgaccaggagcccgtccacgttatggatttggaccgagggtttgaacatcgaccacctatacgaggagtgacgggccctgaatacattccgtctcgacgcgaccggcggacgggtgcgcccgaacgtcccgcgcgccttatcttgctggactccggactgccgaccgaatcgcgaggcggcaggccctgacgagtcgtgcttgatcatcctaccagcgtccgaccttccccaccaggcgcgatcgtcgcggttgagtcgagtaaagcccgaacaatccgcgcggtgcgagccctcgccgaagtgaacccgctttttgattctcggaacatgcttgagacgtcgatcccagagagatcagggacgtcctgggttcgcgatgagttcgggccgtcgctcgtcctcggtcggctcggcgcgtacaatgtgggctggctcggaagccttgaatttcctagcatgcgtgaagttcgatcgcggtgatggatctccggcggctcgatccggggctgatttcggaggccgcgcgagaaagggagtcgttccgatgcggtggatgaccttcaacagttgctgtctgatcatcctcgccggcgccggttcgggcgcggtggcgttcggccaggggttggagtgggtggatgcggccctccccgagcgcgcccacgatttcgggacggtcgccc

SEQ ID NO: 61242 - DNA, 538 bp, Arabidopsis thaliana landsberg
caaactacaacgacttgatccaatcaacttgtaccaaagtgaatcgagttactttacctttattttgaatgcaaactaatagtttgtggttgggtttattttgtctttgtacgaacacgaaaaaattcacaaacctaattagatcaaacccaaattccacgatacattatgctaaacaatataaaccctaattatttcaatacatagatcacatggatggtcatcactggagcatttttcaaagtggagggttgtcctaattatttatagttttagtagtaattatatcggatttaattatctccatgcaacatcatgcaaaaaagcattgtaaaaataaaatagggcgaacaataatacaatatagttgactaatttaattttttatttaatttaactactcaaatgttattagttattattactttctcagtcaaactcgaagtgttaaacactatcgttactgaaattaaccgcaaataagaatcctctaaccgaatagaatctaactgaaataaataatccacatttattgtta

SEQ ID NO: 61243 - DNA, 574 bp, Arabidopsis thaliana landsberg
gtattttggctgtatacactcggtactatggaagtatagaggcgttgaatcatggatggcatgaatatgtaggtatgtgtacctccagtctatgcgtggatcaatggttttgagcttttttttttttttttttttttttttttctcttctttttttcattctgctaatgctctgacaataactgtctgcatatcgggtacctgttaacgttaatattgcttgcaagatatggatgatgaggtaggtacaactatggatgttctatatacaatctccatctatttatcttggcgcgatctaaggcgaacagccacaatatatcttcagccacgacatgttgatatgactcaacctttgcatacaaagcatacaaaatgttttcaatagccaagaaaacattgtatgatcaattttacttggtgattaagatagccaacatatctgtgttggactgaggttaggtagagtagtttgtagtctgtaggaagatcgccctcaaagtggcaaggtgctaggtcccaaccaggaattcctggcaatttgacaggttaaatgtgacaagccacattatttt

SEQ ID NO: 61244 - DNA, 1305 bp, Arabidopsis thaliana landsberg
ctgaattctgaattatttgcacaattattaatttaaacccaaatatgaaattagtttgtattataaaatcataaatatctaggtgaaattagagaaggttctttctttttactgaacatctgcagaaaataaacctagtaaaacaaatcaactaaaactatgttcaacgaacttttcttttttttacgaaatgatgtttatatttcaaattttggagaaattcaaaaaaaattaaattataaaactttttaatgtgtttaaaacaagtgtatagatttggaaaactctcaaaatatcgcaactaccatgtccacaatttttttttaattagtggtacagtcaactagatattcagaaaaaataaacaatagagaaaattctatggataaaatgaaaatagcatttttgaaaacaaatatcacaactaccaccccaccacacatttctgaattatatctagcaacatatttgtattttatgttcaaaataccacttaatcatcaaatttttaatcaccaccaaaactttcaaacataaaccaaattgttcgtgtaaatatgatctgggtcactgcgtattagttgtgataatatattttcttgacaatcatattaacacttcatttggggaatttgatattttctttatcattattaaaagttgaatgtgtaaatatttagacaattcctaatcttcagaatataataactagcggaaacaaaaacgcgttttaagaccgtttgtaaaaaacgcgtattaaggccgtttgtgaaaaaacgcgtttaaagtttaattggtctaagcggtttgccgcatcagaattgacggaggtccgttactctgaatccttgtattcgcattaaccctaactttttctgcttctcaagcgtctcgaaatctgaatccagagattaaacaaaaattggtattgcgaatgatcgattcttcttcctctaaactctgattcctggtgaattcatctgtttcttctttctcgattgtgtatattctcagcataagattaggcttcattctgaaagaaaggatttttctagggtttgagtttcgacatctttcagtgatgtgaagttggtgtttgctattgcgtcttagtttctgaactattgctgcggtatagtttgataatctatgttagggtttcctcggaacagggaattagggttttactattctgtggtatttgatgatgaattgtgagctacaactgaagaaaaagtttacatttttatgtagaaactttagttctgattggtttcgtgacatttgatatgtattgggcagggc

SEQ ID NO: 61245 - DNA, 1571 bp, Arabidopsis thaliana landsberg
  unsure (1)..(1571): unsure at all n locations
aattttgagcgagtgtgtctaattaattaagaactgtgtttagttcaacacttaaaaaaatcgatatttaaatgataactacccatggattattttcaagacaatttggtacatgaaagaatttaacataatatattattttaccaaattagaaaagctaaaaaaataagtactataatttgttgtatttagtgaaagaataaatgttgctgggaaaaaaagtgaaagaataaatgctttgggtatataccttatattaaaaacaaaaccgaaaaaaaattcatgatatttgttaccatatatattatatacaatctataagcagaaattaagataatttatttgaaaagtgttttcaatgaggaaaataccaatggacagaaaaaatgaggtgtatgtacaaagatttgttaccaaatttaaagtattcaaacagaaagtacccatctgtttaggcaaaggattcgatcatcaaacgtcctacaatatcttgttttgcgatctcacccacaaatttatttcctataaattctcttcctctgtctgatctcttctattcaagcccacttcttttctctttctcttgtcttcgtggagttttcggatcttacacaacaatatctttgtcttactgtatttcttgtccattttcttcttacctttctaacaattattaagaagagtaaagcttgaatttaaataaaaatgatgggagacaatgaaggaagaagaactccgttattgaatcttggggttcaagtatcgatgagagtgttaaccatcggagctgcaatggcctcgatgtgggtcatgatcactaaccgtgaagtcgcatctgtttatggcatcgcttttgaggctaaatacagctactcctctgcctttaggtatatatttttttaaatttattctccttttctatcatcatctacttcttattttgtgaaggtgcaatgatctagttattgaaataattcatatatgatacaacgaagcatccatctgcatgaaatgtcatcattcacgttgaaaatatgaagaaaacagatcacatattcggtagaaaagattgaaaagatgaacacatttttctaaaaaaaacatccctcacgtatgatgtaggaagaacaacatgtgggacaaatcataatttggcatttttcattcattcgatcatttggnnaaaanttttccccccatctttattgaaagtaagagatcgagtgattaaagtgtatgatttgatgtttgacaggtatttggtgtacgcacagatagctgtctgcgccgcgacattgtttacgcttgtatgggcttgtttggcagtccgcagaagaggacttttttttgcactcttcttctttgatttggtaactatattacatgtttttgatctaaacattttcatttctatacgtgaatactctttatcttttgaattagcatgttcacaaattatataaataaacgttttgagatgggtttgatattttgatgtacagcttacgacttttacggcgatatcagctttctctgctgccttcgcggaaagttacgtagggaagtacggt

SEQ ID NO: 61246 - DNA, 438 bp, Arabidopsis thaliana landsberg
  unsure (1)..(438): unsure at all n locations
tcgtcgttcttggcccaaagtcagtttcgcagttgacttcgacgatactgccaagcttgccttctgtatcgatgtaaatacccaccaaaccttcagcggtaacgcgtgtggatgccttgctggccttgctgccaagtttgacacgcagaatttcttcagccttgtccaggtcgccatcggcctcggtcagggctttcttgcattccatcatgggcgcgtcagtttttacgcgaagctcttttacgagtgctgctgtaatttcagccattgttcaatctcctgatgtctgatgtacggacacattaaaaaaaagggggcgacaggtcgccccgattgaagttcgcagggtcaatcagccttggncgctgtcttctgacacttcaacgaattcgtcgttggacttgatggcctcgacacctcgttgaccgcttgctcacg

SEQ ID NO: 61247 - DNA, 1292 bp, Arabidopsis thaliana landsberg
tagttaatagaatagtgatgattaacataagaagaaacaaaccttttagtaggggtgaatccgggtgatcagctgaaaaaaacaaagggtgagtttcaaataagtgttttataacttctggtaagattatttttttaggtagtttatatgctaaaagtaaagaaaattgtatttataaagaaattttcacacaaattttcttattcaaataattaccaatttttcttcttctttattatatgctataaattctatttatatatttatgtatactacttaaattctaatcatcaaataaaataatactgaacaactactataatattactaaattagtagattttcaatattttatttttgctatattaaataatttgttaactttctaaaatattacatagataatatgtttcaataattcaaaacattagaaacagtattaaaaactaaggtaaatattttgataacaatttacttttgaaacagcaaaagaatttttaaaaatgaaatgggttttgattttaaattgtagaagcagaggacatatattaatcaaataaagagtagatcattcccttatcaagataaaacataaacatgcatgagttgatacttttctttatataatttttccctaaaaacaaattatatattcttttcttcttttgctagctattttcttaattgtgaaccaaattatatactatttcattgtatatcaatagtttctttaaccaaaaaaataaaaactgtctctatgtatatatgtaacataatcagaccaaccttaaagagagagagagagagagagacatgttgactttccacaccaacgtgcgtccatgcaaatgagccctttctctttgccaaacgcacacgcagaaatcaacacatgcgtgtgcatataaagcttctgatcatacaaataaagatgcgtgtacaaaattataggtataggagcgagacacaagagaaatattaccaaaaaatggggacaaaaacccataattctagagggaaaattttcatgatctatctaatcctagtctcattgtcacttctaggtttgatcttaccttttaaaccttttttccggattacttctccatcttcaacgttacggattgatctttcatcggcgcaagtcaacaaaaaacccgaaatggcttcgactcatccgtatctatctaccagagaaaagaattcaagtcggctttcttaacatagacgagaaagagcgtgagagctacgaggctcgtggaccgttggttcttaagaacatccacgtgccg

SEQ ID NO: 61248 - DNA, 691 bp, Arabidopsis thaliana landsberg
ggttttggtcgaagtctgccgaaaagaaagtttctcgaagcgcaaagaggtgaagacatagagccggttttttcaagaagccttgacggcgcgtgagggaagttggtggaagtgaaagagatgatgaagccagctgtgactatgagaaaaatcaaccggaaaaagcttttttggtccatgtcaactttttttttggtttgattctttggagagtgaagatcataggaattgtcatcgtattatgtagaatttatagaaactagtgagccttaactgagtacgtcacctcacactcacagtataaagagatatacaaatatcaatcccgaaataaagtatctaccacatgctatgtatatataaaaaaacaattatgtacacgaattataaggaatcttatctttgacgatagaaaaatggaggactaaacatttgtcaactcctagaaacctataatgatatatgtacggtgccatatttgtggaacgcagtaaaaactataaactatggtatgattttgaagaatgatgaaggcccaagaggctcatgatgtctataatgaagaatttataaatctttatgagaaggtttggattcattccttctgctttttaaagattacaagcggctattgtttgggtttttatacgaggacatatgtgaactaaaaccctaaattaacccttacaca

SEQ ID NO: 61249 - DNA, 1942 bp, Arabidopsis thaliana landsberg
ctttggaatgacgccttctcttcctgcaacctcgttatcatagccattgcttgatttgtagcaaccgctgaagcgcttctttcttcctccaattctttatataaaccagtcagcagtttcctatcataatcaacctgtcttttcaaccgatcaccctcactttcaccctcgatttcagtcacagaaactccttccaacgataagttactctcgttcctttcaagcattctcttttgaagtagcagctgcatatcatgatctaggttctttgtctcttgatcgctactgttaacagaaatcttggggcttacatctctaggtgacaaaaactctatcccacgagaagctgatatttgagtaagaagtgctttaaggtcttcgctaactctagacgtatctttcttcatccaattctctatttgttgtcttccattactatcatagtgaccttcgtttcctacaacgatattgtatgcatctgcaagatccagtaattcacctgaatattggtttgtttctgctgccactgacattgagttgaaggaagaagattctgactcaagagctgcttctgtgtgagaagtgacgtcccgtggagccatttcagacaatgaagagatcctaagagatgtctctttcatttcctttttatctgatacacctgatatgaaaattcattttctttatcagaaacccatacctactagtgtataatttaagcactatatatctttaatttacagttcatagccatcatacatgcaaagctggagaagaaaacacataagagtcttgcatttaaatggaagtttaaacttacaattatcggttgaattttcaggcatggaatttggagatggtacaactatatattcagattccagagaggtaatatcagcttggtgagtgtccctctcctttgacatctcaacagaggtttgattcgtagtgactgattcagaaacctcgtctagagatatatcatggattgacataagttcaattccctctaagacatcttcaggagtttcagcaacctctgatgttgaagtaacatcattgaggcaaataagctcagtttcttcccttaaggaggaatttgccggattttccataaaatcctgtgttaatgtaatattttggaggcgaaccagctcttctttctcctctataaaaactgtggaatgttccatggcgcgtgatggtgaagtaacatcattgaggcagataagctcagtctcctccactaagaaggtacttgcaggattttccttaaaatctggtgttaaagaactatcttggaagcgaatcggctcttcattctcctttaaaacaactgaagaatgtcccatggtgcgtgatgttgaagtaacatcattgacgcaaataagctcagtctcttccaatatggaggcatttgcagaattttccataaaatctggtgttaaagaaccaccatcttggaggcgaatcggctctactttatcctttaaaagaactgcagaatgttccacggcgcgtaatggtgaagtaacatcattgagacagataagctcagtctcctccaataaggaggcatttgcaggattttccttaaaatctggtgttacagaaatatcttggaggtgaatcagttcttctctttcctttagaataacttcagaatgttccatggcgcctgatgttgcagtaacatcactgagacaaataagctcagtctcctccatcaaggaggcatttgcaggattttccttaacatctggtgttgaggaaatatcttggaggcgaatcggctcttctttcacctttgcagctgcaaaatgtttcatggcgcgtgatgttaagaaaagattatctaatgaattgatctcttcctccttgaacaccttctctgatgtttcaggcacatcattaactggaataagcacaggaaatgaggaat

SEQ ID NO: 61250 - DNA, 306 bp, Arabidopsis thaliana landsberg
acctgtatggtcgcaaaccacccactcatgctaatctagaagacccatgagacaccaatatgagcggacaataccgtaacatttacagtctgaataccatgtcacgattctctaaacattagataaaactaaaaacttattatataattcactatttctaaatattatatcttatttattagaacctcttaaagcatgacttatctatgtataacgaatagatagaaccatagtgtggacttaaagaattttttatagatatgtaaaattttttcacttatctctttatatgtctcttaaggtaca

SEQ ID NO: 61251 - DNA, 1267 bp, Arabidopsis thaliana landsberg
tggtgatttactgggattgggctaagttttggttaaattatatgggccgattattgcgaaatgaaatatataggcctaagaaataaatgtctaatgggcttcataataaataagaagtcattaactatacacgttttgaatatggttcgttgtttccaactaactgtaacgtttcccactttcctcgtcattatgagttgttaaagagttgactactagtatttttatcatgtgatattcattttctgtagtaatttattttacgtggtatcatactatcacagtttgtatttaatcaatattgcacctttcgtattacttctaatattttttaatcatttaaaatcatttttctaaaaccttatggatcaatttcatgacatatactgatgacaaaaagaagacatatactataccccacaatttttttttttttgttttgaaactgacatatattaacatgtttaaatagagtgctaattaactatgacaccttccctaattaccaaaatccaaaagtaatcctcgttacgaatatttaacccctcgtgcttccctcgtgggtattatttatgtatatatataaaagatcatatgattggacacgataattaggaacaactgtgtttttttttttaatttaaaaaagaaaaaaagaagaaaagagagagagagactcacaaatcataatatctccttcattaactcataatcactttaaagaacattggaatcagattcattacatagggattgatatggaaaagtcaaaccaaccagttcatgtaaccttgtccgaattgaaggacggagataaagaaatcgttgatgctgaatttttggttgatcttcttgagagctatagatttggtaaagataatgttcccgcccgagaatttcgatccaaggcggcagcgacggctccggcgccggtcaacaccaccgagatagagttggaagaggataatgatggatctcaagctcaaggtacattagtcaacttgtcagtttcttacatgtttttttgtcttttaatttttggtacctctactaattggttagagtacttttaggaccctaatttttaaccggacacaaacctgcttaaccggtagatcaatctctcgtttatttttggtattaattgccatcgtaggtaacaattctgttagtgaaagtacatcatcgctattttccgattcagatccaatagtacttgagagtactgtgagcgaaaccggttcaaacgaagaatctgaaccggttc

SEQ ID NO: 61252 - DNA, 529 bp, Arabidopsis thaliana landsberg
  unsure (1)..(529): unsure at all n locations
tcttcttaggaattaagtagtcaaggagggttgtttcatatattcttgtaaaaataatataattattaggtatttaatatttatataataagataatatttctagtttaaaattaaatattagtctttaacaaaacgatgtgcacattttttcttttaaaattgttatcataaattttaggttatacttttaatttcaatttgcatagttgatgcttaagaaaatttccaattgatctatttgtttagaaattttaagaaaatatcattattgtggtgtgtgatggatcatggtagtgtttgatgaatgtttttgtttagttattgtaaggaaatatgtgattgtgtgaatgatttattattcactatgaatttgataacagaaaagtgtgggtacgatatatcggatatatatcttatatctattatatatggaagagaaatatacgtgtcagtcacattaaatttattaaaatctgagtctttttctattacattaatttttaatattnttcaatccctaaatgggc

SEQ ID NO: 61253 - DNA, 144 bp, Arabidopsis thaliana landsberg
actcaaaaaaaaaaaaaaaaaaaaaaaaaaaaaaaaaaaaaacaataatcttctctctctgtaaatcgtcacaacccacccccccccgaaggagaagaacccccccccctcctctcagaccccccccatctcaactaatcgccc

SEQ ID NO: 61254 - DNA, 1711 bp, Arabidopsis thaliana landsberg
  unsure (1)..(1711): unsure at all n locations
cgataaaagctacaacattgtgaaagaattgattccaatattacaacctttaaaacacttttttttgagttttttaaccaccaacattaaagttattattaaaactaaaaatacgatagaacaaccttattatacacacatgacatgatgtgaaatatatgttgagaaggtccattggtgcatatggagatttatgtttttctatgccataacaattattactgtttgggacgaattgcaacacctttgagggagagccctttcttccaaacaccagccacatgctcatacattgagaaagtgatctctccggcagcggatttctcaggtacgaactcgccaactctgacatcgacccatttataccttggaagttccctcaaactcaacttttgctcttgtggcgtctccttaccgttaggcaagactagctttaggttcaccggcgtgtcccatccataggccggatcctctagcttcaccttaaagaccacctcgtaaacaatccccggagtgaggttcctcgtgtcgaattttcccgtgatgtcgagccaacaaacgtttttcaatcccacagcttccacattctcgctttaaaaataatcaaaaacacactaaagtttgttactttgcattaataattataggtctaacaaaatataataggtctaatacctcgaaatatttggttaccaaaagaaataataattaccagttcgtattaatattgctataatatacataaaattatacacaaacttaaaacgtcgtgtaacctgtttcgattttatcaaggatactttgatttatactcaactttattgtaaatcaaatatgtaacaaagatattcattttgtggtaatattcatagtatgggatttaaatgaaacgtatcttactttggtgactctttttcggtaaaccaagtccaatagttgacgtcatctgaccaagttatagagaggttctttgcaaagagcatgagcagttgctgtttctctcgtccacccntatttgatctgtttaatatatattatacgcagatcatcaaaccaaatgaattcatggtccgtcttaaatatattaagattgattttcttaacaaaaagttaccatgttgatagtgttactttagtccattagttctatcttattttatctttcgaagcatttgaaacctatgtggaagtagcaatcatgtctttctaaaccaagcagaatggaaacgtttgttttgtgatctgatcatttttttaagctactttttattttagaaatgagagattcaatttttttgaaccagaagttctgtgtttgcaattttgtttacataaaggctccgttttgcgtagttattttctgaaaatagaaacacaagtgagctaattcttaaaaagaatatgaacctgtttcttgggtttcaagaaaacaccagaccgtagctgttcagagagattaacagaggagagagagatcggaggatctgcgtctctgagaatggcctcacagttgtgtggagatttcaccgttgaagctttcatcggtaaagttgtcaccggtggcgcttctttctgcaccgggatcaagtattttcagtcttggtttctaaacatcttatttggtaataattctgagcaatgtttcttgctcattaaccagtatgatgtatttatttttgataaatttgttatcttgatcagtacattcaac

SEQ ID NO: 61255 - DNA, 1910 bp, Arabidopsis thaliana landsberg
ttatgtaagcattggtgttaaatgttgatttttccgcgttggatacggtttgatcttcccacatgcggggttgatgatactcatgggcacaaaacaaattctctcttttccggtttttttatttaaaaaaaaaaaaaaaagtttggcttttcattagtaacctttaaattttgtctttaagtaatcgattttcaaatccctagctttaatacttaacttcagaaggataagcatttgggtttaggtcatttttttcctgctattgttgatattcaacggcccgaaaaatagaaaacaaaatcagtttcaaattcaataatgtgatagagtaagtgtacattcacatagaagacaaagcgggcataaacaaatctattaatggaaaataatggctaaattacaaagactgtctccaataaacgacagcatcatcagatgcgttgtataaaaactctattattgctttacttcacgtttcctgtggttattgacctcaaacttaattggtctctttataagattcttctatatatagcctctaggtaagtatcattgggttgtgtctgcagttccaagattatagctgtacaagtttggcagcataattctctttaggcgtggaaaataaaccatcaacttaaaaattaatgaaaaacttaggtttgaacactaaagatttagtcatctaagtatgtactcacaggttaatatatattaaaacccatagtattggttagtaacaccacatatgtatactctgaaatgaattgcaggaaatctactccacaaaataacttttcaagtttgttgaaaactcatgtaatgataatatcgtttggaaatcattcgctattttatggttaagctgcttaacattagtatcacaatccatagactcacgtaacgatttctacaaatagaacaactatgaatctccttcagagtacattcttcaattcatctactctctcacttatctagtcacagactcacagtaacatatcctcctaaatttgccactgaagacactatgtcacctaattttgtatcaatttactcgcatagattcaaattttcggaatgaatataatcattacactgaaatagacaaaaacttaataaggaacataggaaaaatttaaacagaagaagagtgtgttctttcgtgtttagttttcacctgagaagagagcttggtaattctagtaatcacgctagccaatttcgtctccttgacgaagacgacgccgtactgaacatagagaacgacctggttctacgagtaacccgaattctggacccggacccggatgatgcagcagcagcagcagcaatggatccagatgatccactaaaacatccgaaaagcctcatgatccgacccgcaaagccaccacctctctctctactacctccaccatctcttccacctcttctcgaaccccaagctactcttctcggaagtctctcatcaccgagtctaccaccatcaacctccgtgtaaaccaccggcatcattctatctccacctctccaaccaccagggattctccctacagcgaatcctccacctggtaacctccaaatcgttaaccccgcagctgagtcttcctcttcctctgcagtagcggtaacagcagtcaaagcagcaccggttccgtcggtgagatcctccgccggtagctcatgacggcaaaccggacaagagttacgaatcgcaagccaaggaagaatacaatcaggatgatagatgtgattacaaggcatctcgcgagcagatgatttcaaaacgaaattctctttgcaaacagcgcaatgagattgagaatccgataagagatgagtcggatcgatttcaatcagaagcaaagctttaatggccgatttagaagccggtggatgttcaccag

SEQ ID NO: 61256 - DNA, 178 bp, Arabidopsis thaliana landsberg
ttgtgttgccgttggatcaatattaatgtgatactgtgctgaaaatggtacaattctggaatttaattgtggatttaaccttaaccaatggagggctttgctttgtttccatttttcttctgttatcttacattcatttccaatgtattgatgtgatgctcatagctctgcttatgtg

SEQ ID NO: 61257 - DNA, 788 bp, Arabidopsis thaliana landsberg
accggagactagaacggaggagactgcgatgagaaccattagggtgaatacaaccaacatttttgaggattccatcttcacacaattcaatttcttacacactttcaaatcttttaactaaatcttgttatacttatactattgttttttcttgcttatcaatttgcaggcatgtattaagtctatttataattacaagaaatggtcattggtcaatacttatccataaccatagattcgttttttgttcttttaccatacatacttacttacatattaatatatagtatgaccaattgttgtgacatagctgttcttttaccatttgtgtaagagatcagctatgccatctatgtaagagaacagctatgccccagcaaattactaacaaaacaaatgaaatacaacacaaagaattttttacttctaccctgcattcaaatgtagtacgttaatatggtaccgtttataaaaaaattcgatcaattatcatgaaaaaaatggacattaataacactataatcaaccccatgacattctgtattatattataaattatgcagctagcgtcggctctcatatgacattctgtattatatcatcctcccactaaaagaataatctttatacataatgtttacgacaacaagaacgatgaataaaaggtttgtgaggaagttcatgttgttcaatataactagccaagtaccacccgtgaaagcaatttccaaacaccgtttgttgcaattcctactctccttactctcgcaagtctcgttacaatggtc

SEQ ID NO: 61258 - DNA, 277 bp, Arabidopsis thaliana landsberg
  unsure (1)..(277): unsure at all n locations
gggatggtgtgcggtgataggactggtggatctgcgacacgtggaatatgctaactgtggacttgcaacaggcggattaactggcgctggagctgatatactgtgcagtcacgacannnnnnnnnnnnnnnnnnnnnnnnnnnnnnnnnnnnnnnnnnnnnnnnnnnnnnnnnnnnnnnnnnnnnnnnnnnnnnnnnnnnnnnnnnnnnnnnnnnnnnnnnnnnnnnnnnnnnnnnnnnnnnnnnnnnnnnnnnnnnnnnnnnnnnnnnnnnnnnnn

SEQ ID NO: 61259 - DNA, 1639 bp, Arabidopsis thaliana landsberg
ccgaatgagatttggatttttagaaatgatttttcagttttactttgtttcaaaccgaaaaagtaagccccgatcgcattcaattatccaaacacgataatcttgctcaattctactcttttaactttggtcctgtctgtttaaaagctaaagattggtccctacaccaaaaaaaaaaaaagcttagaggatttgtttttttatttatttttgctaaattttgcttagaggattggttgggactttaagacaaagaaagaaggaaaaaactacactctacagtaacaatttaatcaatcagacttaatcacataaacattaatttcaatagataagcttgtattagttagtttcaaaaataaaagtaatagagatttcgatattatctagaaaactacaacgtaggaacaacacataaacatgtgaattgtgcatgcataaccccaaagagtggcaatatcaattatcaaatatgcaacacttgtaccattacatgtcattctatctttcatatttttgatgattttgcactttgaactctgaaccatccatgatccattcccttgacttgtaaaggttatcaatcaaacttaagtttttaaaaattaaatttgtagtcaagaatagtagtcatatatatatacaaaaaaaaaaaatttccccgacccaagtgaccgaaaataacgactacatgttttattcctcctttagtataatgcgacattacagtttggtatcagtagttttgtatccttctcacaatcacgattgttggtgtaataaactttattctttctatccaacatgttatagtttccacatttgtgggtgctgaaatttcgaccaatgtcactcgtagcctcgtatacctaatcgagcttacttttatatcaacaactacagaccaagattcccatttcacgttgttgttgtttttttttttttttttataaacatttttgttgttaacgctaaatcattagtagctagaatgccccgtaaccggtcttgaaaaggattcaaatatgtttttaccaaagaagaaatgtaagaaacataacatttaacaaaattttaaaatatattgactaataatttgacccaaacccccccccccccaaaaaaactgatatttgacaaactacaaatgtaggtgaaccaaaaaaactatcaaatttaataaaatactattatgattatcatagtttttttccttttcaacaactttataatactgtagtggctcaaagaaaccaggtcggagaaattgttcacaaacgagataatatacaaattcaaaatatttcgatatgaaacatttttgtcaaagttgatgaatagttttgcagcacataaaatacaagataattcgtctgatatttaggaaaataatattatcgtatgtgaaaataacaatatagacaaaccaatatttgtagattagaacttcacataaactacgaaccaaaggattttagtagcttcacatcaaagaataaaaatctaagtttcacaaagaaacaattaaatgatttttgattttgaaaatttaataaatagccccacacaacacactcatattccttcacagccttaaacgtggagccaaagaaagtaaaaacaaaaggagagcaatgga

SEQ ID NO: 61260 - DNA, 338 bp, Arabidopsis thaliana landsberg
tcttcacctgcaaagggcaccaaaagccatcagggacaacagaacaagatactgacatcccataataccatatctaatacatatagtagtgcttgtcagtgatgggggcaaacatagaatcagaacagtaaaaaaggaaataaaaatcattagtcacgtagagttatgggtattcaaccagaacatactggtgtcttttttgggccaaagtgttggcctgttccaaaattaacgtcgaatactcaaacaagggaacatcaataacaaaattggctcttacggactcttgtcagctaatcaaaatatgattttgctccagtccaaaaatcagtcacgca

SEQ ID NO: 61261 - DNA, 372 bp, Arabidopsis thaliana landsberg
ttagataacgggcggtattgaaaggaaagcgtgggatttgactgggggaattctgcctcgtggccagctgtagagccgtgtacacagaaggatgaggaacaggctagaggttttcacatcaaggaaaccggtggggtgcaggacactcatctaattgaagctgggctttcatatgcgaaatgcaggtgtagttgtcacgagacttcaagccgacattctgtcaatgaatggggatgttatggtctatcctggtcggttcacagaccaatggcgtaactggggtgatttatcttaagtatacccagattttgttaggccgaattatccatctctcccttcactggatttctcaatggatggggtaaggatgag

SEQ ID NO: 61262 - DNA, 578 bp, Arabidopsis thaliana landsberg
cgtcgtgccgacccatggatcggggcgggccgggccaaagcacgcgggccgccgtatgtgcccatacccggcccgctaaacgggccgtgccggcccgggcccgtaaccgaccgtgccgggccgtgtttggaccgggctaaattcgtgccgtgctacgggccaaacgggcggcccgcactgtttggacatctatacttgttgctgctcggtgattattggttcgcaggcgcgtggaaatatatagagccatccagccaatcacaatgcgacgtgtagccatagtggatatgcatggacgggtggcatacatgcatcatgcatgtgttgtgtggcgaccttcaacagtttgctacagagatttaggtctggtttgattagagggactaatctttagttcatgggttttagtctcgtttagtctgtattttatcaaatagaaggattaaagtggagattaattaagtttagtctatagtcactcacataaatactaaaagaaattaagggtaatatttacttaattaccttgtctagatactgcataaataagaaagtgaatttagtttaattatatatta

SEQ ID NO: 61263 - DNA, 319 bp, Arabidopsis thaliana landsberg
  unsure (1)..(319): unsure at all n locations
tcggggtactgcttcggggacagggaatgcgtatggtctgctaaccgcggaaggactagaannnnnnnnnnnnnnnnnnnnnnnnnnnnnnnnnnnnnnnnnnnnnnatgaagcatggagtcattctcagcccatataccgatccatgccccgattcgactatgaagggaagtagggatcctactctgagcgagcactggctgctttcccctctttctttgcgctgccggaggagatagcttctactatatccgctctatcttctttacttggataagtactctttcacatattgacccaagcaacggctatctttctc

SEQ ID NO: 61264 - DNA, 513 bp, Arabidopsis thaliana landsberg
  unsure (1)..(513): unsure at all n locations
atgcaatttggtttagccaaaaaaacaaactaaattttatatgtccggttcatgtaacttcataatcaaacaagtaaaagtcgaatgtgacgcgtcttgccgaacgcaaaaacggaccaggcaagaaggtgtagttagttaattcggttaatattcagctgagagaaatcgaaccggttccatatcttgtagattatccggtttactttccggataagatttataagcaaaacagagttaaagtagtagatttcttctatacgagaccaaatctgaaaacccaagtcaagctacaaaaacttaactccaagcgaacaaatctcctcattcattaaacaacaaaattgttnnnnnnnnnnnnnnnnnnnnnnnnnnnnnnnnnnnnnnnnnnnnnncgagagtgacatctcaaaccaaaagatggagtctatattaaagagacgaagactccaaagtcaagcttcaaaattttcaagcaaagattacacagagaaaactttccgaccaaatgtg

SEQ ID NO: 61265 - DNA, 666 bp, Arabidopsis thaliana landsberg
  unsure (1)..(666): unsure at all n locations
aacaaaataaccatatatcattgacagaattagaaaaatgcatttcatgaaaataacaagtcttgatttgtatagaaagtaaaaaaggaaaaaaagaaaagaaaaaaaaagagtcattagtcattactgttttgacttgtgtcttattaccgagtttgggtgatatgtaatgaaataatgcattactttcacattcagaaaaaatctgacaagatattgaagcctgaccaatgagaacgtgccaaaggatactcttagtgatgacagcttttatgtctgcccacgggcaaaggccaatgtcctgagacccacataccatcagatcggatcgccacatcatctccagtttgcgtttttataggacccaaacaaacaccttgtgataaattagacacatttagtcaccattaagaatttttggcaaccttaaatgannagcgattattanatncgncttttttcggngnccncccgggggnnttgnggggtttgggggggtttttttgaattttactacgattagatatttttctatacaacttgatatattttgttagttctaattcaggctcttgaatcaaaaagttttgagagagaatttctanaaacactttttaaaaggatccatnccataaaaaaatgaaactaacgtgaaagaggatcatt

SEQ ID NO: 61266 - DNA, 622 bp, Arabidopsis thaliana landsberg
  unsure (1)..(622): unsure at all n locations
ctgtacgttcctttcatatgaagaatttccctaatagtttaatttagacccccttcttaacttttatttatagatatgtatagtctacttttatataaaataatagcataaaaaaaaagctttatggtggcacttacttatactttaaatttttaaaattttgaactcatacaacaaattatcaaggtgacaattttactatttcaaacattcggagtggctttatgccaacacaaattaattttaacaaaatatatacatttacatgtttgatttgatggtgatgtgtagcatttaaatgtttgatttgatggaatgaatcaaaagatttcttttacaagtttttttagcacttgtccgaagtcattttttagtcgcctcgtttttctattaaaattattgagaagcgnngaatactnntggagggtnntgaaactaataanacttaanccaaagtaaaaaaaaaaccaaaaaaaaaaaaactatctctaggacctaaacccttaaaagagaagcagaagattaatactaaaaaggccaaagaaatacaatgatagaagagggaaaccacaaatgaacaatacaagaaaatcaaaaactgaaaaaactcgtggacataaac

SEQ ID NO: 61267 - DNA, 490 bp, Arabidopsis thaliana landsberg
  unsure (1)..(490): unsure at all n locations
ctaacgttaacttgtccgagccgctcatatttccattgtctccaaattgaacgtcgaagatactgccaccggatccgccacctccattaacggcggctaatgagttcattagaccttgaaggtttccattattatcattctccataattcgtcctccaccaaagtgattagcgataacacttgatgagttagacgaagaagctaagcctctgaacaaagcagatgggtcgttgcttgtgactgaacccatttgtgtagctttctgaagtagtgccgtggctgacacgttagaacccgcgttcaagttttcttcacggtgatgaacaagaacgtcggtgctatatagagaaggaagactcgtctctgagttcttcgtgttttcttgaaagaatccgaggttgaagaagctgttgttggtgcnnnnnnnnnnnnnnnnnnnnnnnnnnnnnnnnnnnnnctgtatcagaccatgctggttcatgaaactctg

SEQ ID NO: 61268 - DNA, 506 bp, Arabidopsis thaliana landsberg
tttatattcagattctggtgtttctcgcggggcgtgggggccttcaagcattgtcatcccctgctctctattgatggtacttttctgcttgggaagtataagggcacattgttggttgccatatcatgcgacatagacagcgcactggttcctttgtcatttgctttggtggagagggagaacagagatagttggtcttggttcttgcggcttgttcggatccatgtcgtatgccctggtcgcgaggttggtgtcatatctgacagacaccaaggtattcttaatgcactgcaagagcagattcctggctatgcacccatgcaccacagatggtgcactcgacatctagcacaaaatcttcttcgaaaggatcatagcaaggctaactttcccctttttgaggaggtatgtctacagttggaggtttctcttttcgaggatacagttgaaggaactataaagatgcaacaaaatgttgaaggtaaaaacctgcattgttggattgc

SEQ ID NO: 61269 - DNA, 254 bp, Arabidopsis thaliana landsberg
caccaaacaactgagggagtgtttttagacactaaaaggatcatccactaaggagtggggactctagaacatacactccattacccgaggtgccatgaagaggcacaccctatcatgtacagaaaccacgccgaccacggtatacccaggattaacacaaaccgaaacctcaaattactcagcaaatgcccccttcagctgacacactatacataagcaccgggaggccatctccaactgtgaagacaatacct

SEQ ID NO: 61270 - DNA, 440 bp, Arabidopsis thaliana landsberg
tggagggttcgggggagaggcactacttggagaacttaacaccacgaaaactggatcaggaacgattgcatggcccactggtcattgaccgggacgggcacgagcccttccgctacgaccgagactacgtggtgatgctgtcggactggaccgatctgagcggcgaagcgctgttcgcgcggctgaagaagatggcgggctacgacaattactaccagcgcacggccggcgatttcattcgcgacgcgaagaaggacgggctcgaagccaccgtcgccgatcggctcatgtggggtgcgatgcggatgacgccgaccgatctcttcgacgtcaatgcgaacacctacacctacctgatgaacggcacgaccgcgctcggcaactggaccggcctgttccggcccggcgagaaagtgcggctgcgctttatcaacggctcg

SEQ ID NO: 61271 - DNA, 447 bp, Arabidopsis thaliana landsberg
  unsure (1)..(447): unsure at all n locations
ccccgtcgtaatgacattgttgtattattgttctcatattttaaggggactacatacattagcatgtgcatcaatttagctcccgatctctaactttttgtttgttgacggttaaattaactacaaaaatgagatatggaaaaatatctggtcttatggtctagttacgaaaagaagaagataatattaactttttaatagtaaaagtcccattctctttgttcttacagcctttaatatataaacaacaagtttgaacaatttttatcatcattttacggcatgcaccaataatttatccttgttttaacatttaccatccaatatttttgatgatatatatcttttcgattagacctaacatatttaccatatttaccacaattatacctaccacaccacttctanngcatcgtcaccatcaaaagcttaatgtctacatcttag

SEQ ID NO: 61272 - DNA, 1590 bp, Arabidopsis thaliana landsberg
  unsure (1)..(1590): unsure at all n locations
tatgtatgcagtgcttttgacacagctgagctagaggaaggacccatcaattctcttacaacaatagagatctcctcatcagtgtgacgtgtatggaccaaatcttcttccatggggtctgaagaaaggtctccgttaacatctattctacatttaatcttctctttcaaannnnnnnnnnnnnnnnnnnnnnnnnnnnnnnnacaggacaagtataatgtaatggagaaagacaaacttaagctacatgaactcgaagtactggaacattgtagtagtcattacagaaaatatgtaaaaggacatactttttgtaatagagatccaactttttggatggatatttcaaggtccggagatatacattagccagtgaactccattgctgctgacccaaaagatattctatatatttgtcccaaagagtgcagcaagaataatcttttccaataaatgaaagccccctctcaaataatctgccagaggtaagaaaaacagttccaaaaattagcctctagtgctccacaatgaaatataaatagaggaattgaagtaaattatcattatttctgtcatcaaatacatacgctgcactacttaacaaatttcagccctatggggaaaataaagtctactacttagaacaattgcaatgatgagtaagattgttgtttgagttacacattataatgaaagttaagaacaaagcctacgcaaaattcagaaatacctactaacatcatgaggatcttcataagcagcaacagcgaaagcacaatagtcgagccatacagctacagagtaagtagctgcttgtactgctcgttcgaaaacttcaacagcatcttctaaagtgcataactttatcttatggtaagcatatttcctccaatagccatgacacaatggaaactccaacaagaaagcatcataaactaaacatagcttctcaatatcatcctacaattagaaagcttagattttagttcctatcaaaacaaaagttttgaaatttaaacaaagaaccctaattttttagatcacgaaatcagaaacgcaactttgcaccacactgagtgcgacttacagggaacgaagtcgtctctatttcggagattaacaaagtccattcatcaaaatcaagagctccactggagaatgtttcttttaatctatcgttgtcaaggaaatctgcaaacgaaatcatcccaatgatgtgacttaagattctacattttttattgagtgatggtgaaattgatctgctatgaaactgatgcggagatagagagtgagacttagggtttaccagtggagctgtctaattctggagaccgttgcaatggttccttatcggagacggcggtcctaacctccgtcgtcaccatcggtagacaagacttagattttttttctttttttccaggtgttgggttttcgtatgaaactatgaatgctactttacaaagggtgaattttcacaaattgttaagatatttatggttatttttttaaccccaactcttaaataatttaaatagaattattcggattattagatttgagcgtaaaattgtactagattttaac

SEQ ID NO: 61273 - DNA, 765 bp, Arabidopsis thaliana landsberg
atatcaaacggaaaaatatactgcgataccttaatgcttcactttacatacaaataactatgtgttccgtagtcttacaaaacctgcatgttagatatatatagattgttctatcatgtacaaaaaattatatgttgcgtacattacatgtgatgatgtggcgaaagattgtttaactttcatcatatcggaattcgaatgtggtcgtgatgtacatgagaaatagtcatatatgtttttgttttatcttggcggattttgttacaaactttctaaattcaaaaacaaactattaaaaatccttaggcttcaaagaaaataatttatttgttcgattaataaaagatttgccattatatatatatatatatatataatgggacaacctttgttttttgtcttctggttattaatttgtatagaaatgatgagaagtgtgacctaggaccgtactatgatgtatcagaattggttgtttgtacgatgaccattttcaggcacccatctccatgtgtgtccccaacctcttttgtgtcacaattcttccattgagttgtcgtcacccaccacatggaacccaccttcatcttctaattttagtcaaaagttctactctcgcgtgaatcccaccacgctctctctagctggtcctatgtggtatcatctgtattttcttctccccatttgttatttttgttttgccggcagttaaatttaatattactccccaaaatgttgggtgaaaggtagaataatactccatag

SEQ ID NO: 61274 - DNA, 1840 bp, Arabidopsis thaliana landsberg
tgaaaaatttgtgaattctaacatattaaagtcaacgcttggatcatgaatcaagatcaggatacgaaatcagaaaactggaaatgagaaaaagcattacttacgtagtaaaatggctgcgttttctctcgattagacgaacgaaaaaatctcaaattttctcgaggaaaaaaatcaaaactttgacaacgattaacacaaacaacaaacacccatatcgaatttcaacaataatcgaatccaacaatccagggaaacctcgaatttcccaaaattttgttctgatccgataacgagaaaaaaagaaaagggaaagtgaaggattgaaatctgagagacgcgtttctctcagctgagttctgattgggtgtcgagaaagtgtgcgaaaagaaaattcgttaaataaggaattaacggctaagatcaaacttgagatatttttgtagatgagattaaaactttgttttggcacacggtaggtaatctcgttatgagattatacttcggccgttgactaatcatttttaattagcaaacttgcaactttttaattacttgtttttttggttaaacaacaatattttaattaaacaacttgttgagcttttatgtgttctataatttaataagctttgaatttttcatgttgacaaattcaatatagacttctagatttataattgataataaattaaattgatagaggtctagttatcttagcatatgtatagttttatgtgactaagattacttttatagttttaaattatataacaaatcagggtattttacatgttgtattatcaaaatgaatctatataaataaaacatgaatttatatattgatggtcatcataacaaagacacattttgctaaaagattttattttcctgtttcataaaaaaataatattaataaataagttataaattcatgtcagataatatggttttacaatgaccattcttttaccctaagtaaacctcacgtccacactgaatagaaagaagaattgtgacttagtatgtggggtaaactaataactatatgttggtgaagtcaataatagcttgcgatttgtgtgaaaccgacgcttaatgttcattggattagcttggattacattccaagtattgcttttttaatgataagattaatgtccacataatgacaatagaaaaacaatcatttatgtttctaacagtagaattttgcctttgaggttgaataaagatcagggaaaaaatatatgaaaatctcattttccatggtttcgatattttagatgtaatctaagtttttggaaaaaacacattctacctctgtcaaattccttctgtgtcatcacgggaccgtgcgaatcggcgtccatcggatcccacagctttagtccgaaggctgagaaagcattaaaactctttatcaacgggcctatgtttatattgggctcacaggtacatccacatgttacgtttcagtggcagatacaatagctaaaatgttttcttagaaagaaagataaaaaaatgattgcaaatttaaactgacattttactcaacatccaacaattcaccaatgcacgaaagaaaaagcgcacttattaggctctcacacagatatatgtgcaatgcacacataaaaagttatagattcatgacattgtaaattataattattgtaccctcaagtttcttccgaggtgtttcaagaatggcatatctcgaaagagcctctccaacgttgaaagaaacactcctcaagatataccggtaagccacactctctcttttattctctggtccaatttcattcccggtttagctacctccgtacctaac

SEQ ID NO: 61275 - DNA, 1171 bp, Arabidopsis thaliana landsberg
ggacttgccgagaaatataaatgatagagggtttatgagattgatctaactatctaagctcgtctctacaaatacaaagtgaatcatgagtcttatgacacactaaatgcttggagagagagagataaaaacgactggttgtcgaaattaatgattgtaagagggtacttcgtagcccttaaatttcgctgacaatttacaagaagaaacgaaaaaagaaagagaaagtgagagttataactatagagttaattattgctctgaacatatatagtctattcttattagctttcttcatttggcaaacccttttgggcactctcagcctcttcctctgtctcctcgtatacctcttttcccctcctctccaactccttcacccaactgctttaaatttcttcccaaaatcaataaattacatcacaagatgacatattattacgtctactgtagtttttcttttattttttatttcaattatcatactaccatctttttctaatagcagacgaatgttttttaactttaaagtatgtatgtttttcgtatgaatttttaacttttcaaaagtacgagtaaaaacgtacttggtttctccatatttttttctttcaccaatgtttgcttaaatcattgtgatccatatatagttacgtttcatctccacttttgctagagttctttttcatattttcttcttgaatgtgttgttatggattttgttttgataataagatcctctaactgcgttggaccacagatattgttttgtaaaatacatcaaaactcttcgtgtgaaaacataaaccgacaccatggcttagtaatatcattggataataattgatccaacagaaagatatatagccaacttctcttcctaatttgattccttgatctcattaaccacatattattgattcttgttgttatagtattttgcttatacgtacagtttggtgatttgaatagaagaaaaatcaaacaaaaaataggagccaataggaagaagaatggtagtcttgcacacaaagttaaaatataggaaaacaatcttatctcgtcgtgagataggaaacccaccgtgctttaaatttgccgaagaatctcgtctgagacctgcgttatttaaaaggagggcgatcaatttattttatcataatatctctta

SEQ ID NO: 61276 - DNA, 352 bp, Arabidopsis thaliana landsberg
tttgaatggttatgatcgtcaaaattatgttgtcactatggttgggcgttgcagtaaagtataattgttttgaaagtcatgtttttagtgttttgaagtttgtttgtcaagaaaaaaaagaagagtattttaggagttttggtttaaacagattatcagaatatttgtttaaacgatttcaaagtcgatgaatgaaaatactttccaagattaggacgaatttgaatattacgactttgattatgttataacttaatttttataatgatatttgtagataattttagatctaaaaaagttttaaataaattttacatatatatatgtgtgtgtgtgtggtggggtgggggtg

SEQ ID NO: 61277 - DNA, 455 bp, Arabidopsis thaliana landsberg
ccctggcgacgacgaagagcgcgccctcgccggtgcagtcgatctgcaggcgcccgccctcgcccacgcccagcctccccgccagcgggtagaacggcaccagcgccttggccagcgccgcctcgagccgctccggcgcgaagaaggccgcttctccgtcggtgtcgcctccggccgccggcgccgggtagtagtacacgagcggcgtgtgcgtcttggggactgccaggtccaggttcgacagccacagctccgggtgcggcgtgtcctcgctcggcgcccaagcgtcgtccccaccacatcaaccttcatcgtctctccctcttggctcttgagtgttgaatgtttatagtaggtagctctgtgtgcacttagcgtgcgtgttggaccgcaatttatagtatggtgtcgggacgagaggacaggtcgcgtcacgccatggtccgcggtagaga

SEQ ID NO: 61278 - DNA, 768 bp, Arabidopsis thaliana landsberg
gcttggcgttcgatgatgccgaaccagacctcgacaaggttcatccacgatgccgaggtcggggtgaagtggacgtggattcgtgggttcgcggctagccagtctcggatctcgattcgtttgtgcgtggcgtagttgtccatcaccaggtgtaactcgccggcggggtaggcccgggcgacctgcttgaggaatcgcaggaactcctggtggcggtgccgggcctgacaggtcgcggtgactttcccggtggcgatgttcagcgcggcgaacagggtggtggtgccgtgacggacgtagtcgtgggtgcgccgctcgggcagtccgggttgcatcggcagcatgggagcggtccggtccagggcttggatctgggatttctcgtcgcagcacagcacgatcgcgttctccggcggggccaggtagaggcccacgacgtcggtgaccttggcaaccaactctggatcggtggagaacttgaacgtctgcgcccgccacggctgcactccgtactcccgccacgcccgggccactgtggcgtcgccgattttcagatgcttcgccagtaaccggctcgaccagtgggtcactccgagtttcttcggcggtggtttcagcgtcgtggccacgatcttgcgatgatccacctgccgaggtcgaccggatcgagcctcgtcagccaggccgatgatccctcgctcgcggtatcgagcccgccaaccggtcacggtcggcagcgacaccccgacccgcccggcgatatccaca

SEQ ID NO: 61279 - DNA, 546 bp, Arabidopsis thaliana landsberg
gtgtgcaattatgagggttagattgaagttcaaatttggtctaaacgtaaaagtaattaaacgtaaatatagttaaactttagtatattctgacttgcacgtatccaagaaatttatttaatgacgaatgaatgatggaggaagatgagaagaagattaaactgaagggtagtttagtttgacttgcacagattctaaaaattaaattatttaatgacagtaatgatggccgaggaagacagtataatgattaaacttaaggttagttttatctgcacggatctagatatttgatatgttttttttcacattgatgctatagctttaacttctatgaatcctatgagttaatttatttgcacgatcctagagaataattaatttgatgatggattgcacgttcatttatttgatgatgaattctagaatttgacttgtacatgttctattaattaatctatatttgatggttgaccaagaaacattagatcgattggtttcacccatataattattctactaaattttaagcactttggaaccaaa

SEQ ID NO: 61280 - DNA, 486 bp, Arabidopsis thaliana landsberg
tccccattactacaaaaatacaaataagaatatgtccatatatacacataattatgcttatgacttttatattgacaaggagacaactaaacattatagcaattaaaagataaattcttgatggcacggacatcacgtgttccactataaagtagatgaatcgtacatgtagaaataatttgtccaagctccacacatgtctttcttttaggaaaccacatattaaaattagtctacaaaaccaaataatgtaacctttcccctaatttaacaatcctatcggaactatatttttctttttgttgaaattactaacattatagtgcccaagtatcaaaagtttggaaaacaatatatcaatctagaacttgcaaggtcaggttatattactgagaaaatatcacctctcgcttgctatatatatgaataataataacaaaaattaatagcttgagttcttttattggtatcagaagctagatatct

SEQ ID NO: 61281 - DNA, 175 bp, Arabidopsis thaliana landsberg
tgatccgggtgctagggatgcgtggccagaccactcagactcgacttacattcactggctgatcacactgttgacaggattagctgagcgctgtgtggaaggcgtgctagagagtcatggatgtggtggcctaactcccgtttctcttgaagaaccgcctgtggtatcatgcgct

SEQ ID NO: 61282 - DNA, 655 bp, Arabidopsis thaliana landsberg
  unsure (1)..(655): unsure at all n locations
taataatttgttgagaaaattaataaaatgtaaaaagcttaagaaaaattactagcttatggattctttagaggatgtgaaaatattagaaagaactaggtttctcggccatggaggtaattcataaagcaacaacggatcacggggatcaaattgcaatcaacaatgtccacaatcttcaacttggtcaataccgtcaactcattaccatcaaagttattagagcacacataaagcctaatatattatcatttgagcagcccatctaaacccgctaatgattttgctataaaacctaataacataggcttaataggcttctcaagtgataatattttggggttttatgtgttctctaatataaatctggatctcaccttctaatgattttcttaattgtacatgggatccaacttcagtggtttgggatggattcaagaattggagaaaggtccatatcgagaaataattatgtcctacaaacagaagcataagctctttgttgagtcatcttgtgtgttggaaatctgaatgacctaacacaaacgtcgtcaacggaattgcactaaatccgacatggcccatgtntcaacatatccacggtggcatccgcactttacaattgaggatcnatcgctcaccatgttgtgattga

SEQ ID NO: 61283 - DNA, 758 bp, Arabidopsis thaliana landsberg
  unsure (1)..(758): unsure at all n locations
tctgaaaactattatatattgtttttacacaaatgaccgatatcaaatgttgaaattcaaaactttcacccactcttcattgctagttgctactaaatccttacacgttcttatgcaaaattagcaatattatctgatgtcgcaaaattgacatgatgcatatatatatgggtgcatgcaatgcaatagctagtccgactttcgaatcgagagacgacctgattagatatataaaaagataaactacagtcctgactgcgttctaggtgttagaaacttacaacgcgaactagaaatacagaattgaggattatatgtgaacgatatcataatgttggttgccatattaaaagctacacctactcatccacgcccattaatacggtggctttggacagttgtacaataagaggttcaagtttaaagttattattgtatattcattttctggtatacagaagaaatatatactttcataaggtacacataatcgctaataaggcccattcttaaatgtacgtaaaaacatgtattcaatagcctaattgtgtagatggtgagtgtatatagtcgatcggggtatagcctatagcgactatctatgcttcctttataaaaataaatatatgatcgctaatttaagcaaaaacagatgtgtcttatgaaaaattctttntccaatagatatctaattatatagagcttaacttttttacacaaatcacaaattgtctgtacacaaaaaatgtttttttttt

SEQ ID NO: 61284 - DNA, 757 bp, Arabidopsis thaliana landsberg
tgaaaacttttaaattcagacatgtaaaaggctaccatatagtatttttagaaagcaaatagtaaaaagcaattgaaactagaaataatagaagactaaaagttactttaaacacaaattttgatccattaaccttggaccacaagttggtgttttaaacatgaaaaggtaccttatgtttatggttacaggatgtgatttagatatctatattataaaaatatgtggatgtatggaaattgcaaaaaaaattcctttggttgtaatttacccattatttaataattcgagcctaaaaaaatcatttgtgccaaaagatagacaaatattcttacttttgacttggccaagtgagaagttataaactatttgccgttctcatttgtaagaacgccgtgttgttcaacaagtgcaagctcaaacagcaacacaatgtcagattagaggtccagtactagtactaaagaatgacatcaatacttgtccaacaagaaaacagcaaaagtaatagtatcttttaaatcacgtaagcaagtgttgtggtagtgtattaaccggtatttctcattcctgcagcaataccattgattgtgataagcaaagcatctcttagcttattgttatcttcatcacgtcttagcctcttaagaatttcaacttgtaacatgttcattgcgttgagatacggaagtctactatcaatgagtttcttcaagctcttattgtcctgccagagtttctcgtgaccacttatcac

SEQ ID NO: 61285 - DNA, 574 bp, Arabidopsis thaliana landsberg
aaagcaaaactgtctaaaacatcttagtaattatgttcctataatcctaatttttcattgcagttcatggtaatctaaagtgaagtacgagataatttaggacgtattactggaacagtgaagtaacataaccaaacgttaaaagactactaaaacacttgagcaatgggatcataattactgttatttaagaattagttgagataattgcagtttgcgctaacccgtttttcttttccggtttagatcataaattacagaagaatgtttaatgacataataacttaactcgagggaaaactaaatcccttgggagttttctccatcacgcctgactaaagcaaaaatgtctctttgtgtttaaaacttacaattcccattcggactttctcgatttttccaaatatcattaaaatacttttttagttcacaaataaatcctatattttatttgcattgcatcgtcgctttcgaatttcagttccagatatttgaattcccatggctatatgcaaaatttaaccagtagatgttggtaagaataactaaatgaatacaatcggtaaagaaacat

SEQ ID NO: 61286 - DNA, 322 bp, Arabidopsis thaliana landsberg
  unsure (1)..(322): unsure at all n locations
attgcccatttctttactcgtagaaagcgacccggaaataaacaccaatcatatctatctgnattttttttgtttttattttataatnctgatctttagatccattttttggtccaggagtagctttaactatgtaaatcatttttcttacagagatttaaatgactcaacttcattctaacttcatttttctaaacaaataagttctgatctttaggtccattttttggtccaggactagtttttaaagaccgtaaatcatttctcttacagagatttaaatgactcaacttcttcttctttttcttcctttatttggtag

SEQ ID NO: 61287 - DNA, 1248 bp, Arabidopsis thaliana landsberg
agtatgtgattggatacatctgcgcggtcggtagctcagctggttattctctggtgctttctttaacagattacgcgttgaaaagattctaaagaaatacacattcagggctattttagacatggccacatatccgtctatggtagctacttgtgtagttgtggtaggactttttggaagtggtgggtggaaaaagctgagtacagaaatggaagagtttcaactagggaaaagctcatacattttgataaacatcggttcaacgatatcatggcaagcttgtttgattggaagtgttggtttgattatcgaagtttcatcgcttttttccaatgtcataagcactctttgtttaccagttgtgcctgttcttgctgttgtcttcttccgtgatgagatgagtggaatcaagttgattgcaatgtttttggccatctggggatttgtttcttatggttatcagcattatgtcaatgatagaaagccagaagaagaccaagagcttcctcagtctaaagaagaagaagaacaaaaacaagtagataccattcatgtccaagcttaggcaaagatccaagaaaaccaaaagcttttgtaatttgaaccagtttaatctaaaataaaaatgagttatatatattgtaggcactacaaataaaattggtaagtgtctcaaggtctcacagtcttcatgtatctttgttgacttctgaatccaagtcaagtgtacttatggccttcccgtcttgttgtatcgttgttgacttccaaatccacaaaatagattactaacataacaaaaacaagtaataatttttttttttcaagtggacggacacttgagccaataagattagaataagatacaacaatatcaagcgtctatatatctgttttcaccaaactcagcctactttaacaacgttgtgtataagaagttttcttaaaaccgccaattaaaaggtttcaataattcaaagtcaacggtaaacatctttacagaaatatgatgcacttgttcccaccaaccttcatatatataaaagctttaccaaaactctgtttgtgggaagtcctcttagagtggtcatggaaataactcaagtaatctatgtcaatggtaagcaagatgcatctcgtagtgtagattacttgattcttttcgctaacctgttgtttttgatgttttcagatcataaccacatagaagcaaacctaacaggtcaggaggaaatgaataccaccatg

SEQ ID NO: 61288 - DNA, 385 bp, Arabidopsis thaliana landsberg
cccatttgaacatgaaaaggaccacctatatatgtgcatagactgttattgctgtactcaagcgtgtacttgatgacataactgaccaatcacctactctctatgctagagcacacacgggaaaatactccgctttattgcaacaataggtttgatccttggattattttacatgtattcgtaaagcgggtaaaaaaagagtgatgtatttataatacgtgaatacgttcgaactgatcccaagagcaaaacatttttatatgacttgacttggatttcttatttgaaacataatacgtgatcatgccccatcatatatattgtaagctgtccactactccacaatagacaggccgacatttacttaacgctgaccttgaaccat

SEQ ID NO: 61289 - DNA, 1313 bp, Arabidopsis thaliana landsberg
acatacatgccactaagaatcaaattacgctgataaattagtacacctttaaacaatttttataataatattaacattcttgaatatttgctatatatgggaatagggcgcagcgacgacatgttacgtggcattgagcaacgaaaccaaagggttaagtggaaagtattttgcagactgcaatgagaccaattgctcagatttggcaaatgatgagtctatggctctcaagctctgcacccaaagccgtgccttaatccacggttatttggatgaatctcaaaaacattaccttcctaacgtatgtcttatgtaaatcatcttaatagttccgttttttgtaaaaagaccatttgtcattttacttctgtaaagcagtgttttattaacaagaccgatctgattatgtgtagttgccgagaaaccatacatacataaataatgatttctattaagtctaattaatacagaatttgctttctcatcttagctttggcgtgtcttactatttctccatctctttatcagcccttccgtctctctctatctcggattagtttttttttctatagaaactagaaaacgtacctcactgccttgactcctcttcccatatatacgagcatactttatgtagatccttaggattttcccttttacttatatgattcattttcctttccaaattgaattaagaaaactttaggtgaaacttttggcgaaagaaaagaaaaagtaggtgaaagtgaacccatagcccttggactctttttagtttatgtacgagagctaaatgaggccatgacccaaccaaaactcgcggcccatcccgaacctttatccaaagtttcaaacccaccgttatcgtccctagtttataccgacacttccgaatcaccaattccccaagtcattttcatctctgtctcacttccttggtttgagtccgatttataaccgctctttaacattcatgtgtttttttcttatgtttctatattcccatgtctatttctaccttttactcttttataatcttcatgtctttactagaaccgtcggaataacaacggtaaaaagaccatgtttcctaattagagcaatcaaaagaacttctagtgagcttttttttcctttttgatcaactttaaatgttcttgtgagctctctaactactgaatatttttcataattataatttttaacttcgaaataaatttaatatagatatttaacaaaaatttatatatataaaattatctatttcatcacgtcaaaaaatacagtaggaccacaaatggctttttttataa

SEQ ID NO: 61290 - DNA, 269 bp, Arabidopsis thaliana landsberg
tcggtaatgatgcaggggttgacagtgcgacaccctgatcataacatgaaccatattaaaacatacagcttattgcggatactgacaactgttcctatctatccaccaaataccatatttatatatggaaacaatctatatagcatatccgcacacgctttattcgtgtatagatctagagccgaattaaccttcctttgatatgcaatagaatgctgaaccattgacgccatgatcattatcctaaactaacactacttatggaatat

SEQ ID NO: 61291 - DNA, 1093 bp, Arabidopsis thaliana landsberg
ggaatggttcgttcgcaatcttcaaattctccgtttcgatttttcgtgagtttcttctgaaatctgattttggtttttgttcttcttcagatccgattttactgtctacaaaatccagtgagcggcgcgtcattaatggctaaagcggcgattaaatcacacgcgccggcgctttattcgttatcggtgattcagtttaacggaagcggcggttcaaaaaccgataagaatctacgcgccggcgttgctctttgtgcacgctctgcttatttaggtcacgtcgatgcgttacgagagcttggtcactgtcttcaagacggttacggtgttcctcgtgacgtctccgaaggtcgtcgtcttttgattcaagctaacgcgcgtgagctcgcgtgttctctacgctcttacctctctctgaaatctggggacgagaacgagatcttaactgatttaagcgtggttccggttcaggagattcatccggttaaccggtttttaaaagagtggtttagttcgggtcgggttgatttagcggaagggttaaggatgtgttcgcatggtggttgtggaaggccggagactcgggctcatgagtttcggcgatgttctgtttgtgggaaggttaattattgctcgcgtggttgtcaggcgttggattggagagcgaagcataaggttgaatgtacgccgttggatttgtgggttgcggcagcggcggagattggcgacaacggtgaagcggtggcggtggagattgatgataatcatggtgagcggtaacggctctaacgctttttttcaaggaaatgactgaaatgccaacagtttctttgactgttgagtttttttttttttgggttatttaattatgttttaaaaaatttaatgttaatttcttctcttaattaattagttttggctaatggcgtttctgaatcttctgatactaaactggcatgttattttaaataatatagttttttgccgttacatataccatgaactggggtcgcaaaggtgtgacttattatcttatgagataaatatctgtagaaaagtataatgctgaatatagaaataaatcttaaaaggt

SEQ ID NO: 61292 - DNA, 307 bp, Arabidopsis thaliana landsberg
attagttgtatcctagatacttcgagagccactatgatttggtgaaaccttgtgtgtttagtgtacactgattgataaccattcgatgatcacttcttcattgaaaataatgctattatagactacaaacatctaaatacaaataagcgtacgtcctttgatccatataacagttcttatgctcaatatatttatgctttttaaagcattataaaatgaagcttaaaaatatccctatcccacgttggactatttaagagtgaatcatcatctgaatactagatgaactattttatatatttccttc

SEQ ID NO: 61293 - DNA, 412 bp, Arabidopsis thaliana landsberg
ggctgctcatcgcgggggggggtttcgctccttcactcgggccacgccatgctactacgagtcgcgccgcacgcggcccctgacaccggcacgtttcgcatgctcaccgccgcgctctggcgcgccggccagccctccgccgccgtggacctcctccgctgcatgccgccgctccttcttgactcggacccgtgccactggcgcgcggtcctaccctccctctggcctctgctgccgaggcgcgccggcctgggacgcgctcacgttcctcgacgacatgcgccgggcacgtgcaaaggggaagcgcgaggagaagtgggcgggcaggcggccaaaatgcgttggctttgctgcgggccgtcggattgaggagggcggacacatcgtggcaggtgccgtatgcacggagctg

SEQ ID NO: 61294 - DNA, 520 bp, Arabidopsis thaliana landsberg
gctgtggcgccgagctgggttagctcggcgccacaggctatggcgccgagctaagggtccaaaattgagtttaaaatttttttagtctaaacgtgattttgaatctaataaagggctaaaatacaaaaaattcggcagatatgatgtatacagtatacgtattgactagtactcgctctgatttttttatttatcatggtttagttaaaaataaaatagtgtataataaatattcgagaacagatgtacatgataatcaatgaactcctcacttcgctcttctaactagcttggcgcatgcacggaacaataccagcaaagtcagaattcgcttcgcaagtcagagctgcagatcactagctgaccggtttagcctgcatcgacactaacaaaaaaaaaagcatgcatgccctgcccaccccactgctgctactactactagatggtggtaaacaaacatgctgcagtcagagaagtaaaccacgcagtgctgtgttgggcacagtaataagcaggttca

SEQ ID NO: 61295 - DNA, 275 bp, Arabidopsis thaliana landsberg
tttttctttttttttttttttctttttttcttttttttttctattttttcttttttttttttttttttatttttttttttttttcttttttcttttttttttttatttttttttcctttttttttttttatttttatttttttattatttttatttttttttctcttttattatatttttttattcttttttctttctcttttttttttctttttttttttattttttatttttttcttctttttttttttcttttttttttttttttttttttt

SEQ ID NO: 61296 - DNA, 228 bp, Arabidopsis thaliana landsberg
gcaatctaatatatgtgggcccgattacccgatgaaccagagaccgcccctcccacccaaacactagggataccccatctagacctaacgtgcgtacctgcttgacaaaaatcaaaaacaacgctagaacatctactattggggccgaaatactatcccaaatcacaaaaatacccgaaaaaacactcaaaggacaaacatgggcgtccacacaacgaccaaggaaaa

SEQ ID NO: 61297 - DNA, 383 bp, Arabidopsis thaliana landsberg
cattttgttactcgtcaggactccatattgacacgtggggcacttcgtcaaagtcgttatgaatccagacaacttccggcggcggcaaaagcataccctccgtcatattctcaaaaaaggtaggcatccccaaaagcgcctcatcatccatataaaacacaccaccattctgctcctcagccctcctctgcccctccctaaccccctcccctgcctgctgctctggctaccgcgcagttttagatgcctacgtcgcagtctcattctgaagcgccattgcagcttcagacgcagctttctgaatctccttaggacagagggttcacaagaatacgaaatccgccaagcagaaacagcgaaattgaaacaagcagagcgaccac

SEQ ID NO: 61298 - DNA, 1587 bp, Arabidopsis thaliana landsberg
tactttataggcctgaaaggacaagaatgagcgtatgtgaaaacctgaataaaagatgaacaatttctataaaggaagggaatcaatgagtaatgctcacatcctctggttttgcaagccattcagcactcagctcactgatatggcaaagaccttcccgcccaggcgctatctctacaaatgcaccataaggagccattgacttgatttcacaattcctgatacaaaaagaaaggtaagaatccaaatctatttacgctttttggtcagagaaggtatatgaaggatacatacctgtagatatcaccaacagagggaaccattgtcaatccactaataatcgctttcgccctttctagactcgctacatcgattgccataattttgaccttgacaaagataaatattaagaagttaggataaagaatacccaataaatataaaatcacatttttttgcatgtatatctcacagttccatcatcttgcatgtcaatggcctcaactccagattcttcaatgatgctctttactttcttaccaccagaaccaataagagagtatactttgcttggatgaacctgcagcacatgaaacgccaacaatctttagttcaaggcagaaaggcattagactgggcaatcctggaaaaactagttgaagccaaaccttcataataagtatcaatggagcatattttgagaggcttagcgtgggaggcggtgagcactttgccatttcagctgcacaaaaaggaaaaaaaaaaatatagtaaattacatcttttgtggcatacattttccaaggaactaaatctccccaagtctactatcttgagactaataattcatgaataacattccttaccaagaatatggcgacgcccagcttttgcctgtattagagccttttccattatctctaaagtaattcctcctacctagttcatgattaaagagaagaagtaagaaaagatgttaccaacatattaattcaattgccatttaaaaccatttcggtagtgtaaattaagaaacggatgatgaccttgatgtccatctgaaaggcggtaacgccatcttcattcccagcaacctattgacaaacatatcaaaacttcagcattcaagtcaatgcaaggtccttcaagggaatcctcatattttctgaccttaaagtccatatcaccagatgcatcttcagctccagtgatgtcagaaaggataaggggagatccatcacctccaaattcttcagtatcccaaaccattcccattgctatcccagcaacagaacatttgactggaactccagcatcttgcaaagccaagcaaccgccacaaacagatgccatactgtcacattttgagatcaacgtaagaagcaattaccaaatttgtcattcaaacaaactaggcgtgcagatcataaaaccagataaaaaagctgaccttgaagaaccattgctttcaattactgtactttcaacacgtattgtgtaaggaaagtcatcatcactaggtagaatggtctccaatgctcgctctgctagtgtcccatgacctatttctcttctactgggtgcacc

SEQ ID NO: 61299 - DNA, 1689 bp, Arabidopsis thaliana landsberg
taatttttctagggacacaaagaaaattaggtcagtatcaaattatttattgaagggaaagtaagcaatatatatgcttgcaacaaagagcagctgtacattttatactaccaaaacaggaaacatctaatcaatcaaagtagtttcacattttattccacagaaattacgacaaaaaagtagagagtgaagagtcttacggctaatattgctctcccagatgcagaaaagcgctcaccagcgatatcaatctcgactgtagtttcagcagcaactgctggctgggaaacacatgctaggtaatggcggacaactagctcatatacattctgaaatagtggaaaagaatgttggctccaacgtagaaacatatacctatgctcgggtatgttaaaccaaactgacagccatacttacaaggtgatctctgctccagttagactctccgctagaaaactttgttgggtgaatgggtgggtgagccttgtcatcatgaccaccattagcagggtttctccagaggcccccctcaggttctaataatctttgtgcatatgatccccatgcaggatgtcttgtttgttcctccaccatagcctacacacaactagagatcctaagagactatcaaaggaaatgataaagtccaaactaaccttactggctcatgagaaaaaagttacttacacgtaaatctgtcctgctcgaaaaagaatcggtctccgtacgaggatagctgatgaaaccagcctgatataattcttctgccacctgtccagacatttttgatgtcatttaacaaaagagagatgtaattgtaattcaaagacatatcagcctatacgacagcataaaactctaccaagagagaacagaatttagattatgttgaacatgcaatcctaataggccaaagaatcatagaaagtatcttaaccaatctaaatactcattcagaccttcatggtgtgctctgaactcagacggaaatatcttgaagcacgtttttcaagttcaatcgtgttcaaaggataaggaggatacttgaatcgttcccttggatgtgggacattcattacctggatggagattataaagtaaatacacaatgttaactagagatggagtgtcagatgatataattccgtctgataagatgtttcttttttactcacagtggcagtaggttcctcaacgcacatctcatataatatgacagctgaagcataatcgaagagatgaccacgcctgcaatagaaattatatcaatgtaactttcaagaagattgggaacaacaataaggaaggcagttgaaaatcgtacatccaattaaaggtggcaaggccttcttctgattggtgagaacagttgattgtccaaaactcttctggttcatgtgcctggatcttctcagtatcgctcgacaataaagccaagtgtaggaaacttcagttgaagcagagaaatatcaaactagctgcattaactggctctgatatgtaaaatgggacagatcgctctgaaacttatcgatactggtttcacattacctgacacggaccataacttataacacgactcctctcctcacccgtagagtcaatagcaaacctatctctcagcagcatagtctgaaatctagtgaaagaagcaccaatgcgtaggtctatttcctaaagctttccaaa

SEQ ID NO: 61300 - DNA, 461 bp, Arabidopsis thaliana landsberg
tgccgactgagtttggggcatctaatataatatcaaatcatacaagattcagaactttatatgattaaacatcctcagtggtagtgacagttgggaagagtaagatttacgtactcaattatttaattgcttcaaaactgtaaaaatgtatagaaccaacaacctgaaacacgtgaggagcactacaaacgacgtcgtctagtgtcgtgacaatttataacatggtgggccactaagtaagacagttgttagatgtaccactccctttatttcgtaaatatttcatgctttgttttcttctttgactcgtgtccatcaaaacaatcatttcaaaatactttggacgagaattacacacgattacgccacgtgttctattcacatccaacggctcttacaaaaataaagaaaaagtccgtctacttgggtcatcaatcatcatcatggaagcccacttagtt

SEQ ID NO: 61301 - DNA, 506 bp, Arabidopsis thaliana landsberg
  unsure (1)..(506): unsure at all n locations
tgagaagatagaggatggggtttcggggcttcttctacctctgtattttgcggctagcggtctcaaaactgatgtaacaacgatcaggggagcacagtcatggggacttctagttcttgtcattctcaccacttgtttcgggaagattgtaggaacagttggttcctcgatgctctgcaaggttcctttcagagaagccgtgacacttggattccttatgannnnnnnnnnnnnnnnnnnnnnnnnnnnnnnnnnnnnnnnnnnnnnncggaaggtatagattcttgaaagccataataagacttataaaacatttaaaagccgagttatctaaataacgatttttgtgagcaggtgctgaatgatcaagcatttgcgatcttagtcctaatggcattgttcacaaccttcatcacaactccaattgtgatgcttatttacaagcctgcaagaaaaggagcaccgtacaagcacagaaccatccaaagaaaagatcatgattctga

SEQ ID NO: 61302 - DNA, 516 bp, Arabidopsis thaliana landsberg
  unsure (1)..(516): unsure at all n locations
ttgtccattgtaatttccctgacaagactcttgttgttttgttttccattgtatccgaggatttaaatttatcaggaccagacgacttttgtcaaagtgttgaccatcgtaatgtgaggttttagatctaaggctagtaggatttttctgttaccgttacgattttattaattatctgaggttttagaaattttcacaaaaatctatctatatcttttaggagttgaattatatttatcgcataaatggtagttatattgtgtcgaataattaacatggatcaattcaacattccactaaaggcgtttggaaggctcaacaattatggccgatattttcgttttgaaaattttggggtaatcagatcaccctcaagtgtgagccaaaaaagaatttattaaaaatgacagcaaactacaaggactaatgttataattaaatagaaaaactttgaccttntaattaaatctgaaacaaagaaaaaaaaagaagttaatgttgcaaatataatccacg

SEQ ID NO: 61303 - DNA, 1783 bp, Arabidopsis thaliana landsberg
acatgatcttctgatgccccctcaaaaactgaatttgattcaaagtattaaattcaattcaagtggttaattattacgcatacaaacagtataagcagaagcagaagaaatacaacttttgtatgcatgcatatagatagtttaagttatagctgtctaaaactatttgaaggtcaatttatgaaacttacatttgatgttttaacctgttttattttttattttttattgaatgtgtaattgattaatatgagtaaaattatgtatgagagtgttttgctttgtctaaaaaaaacatcagtactatgaaaccaaaaaagaaagaaaaaactgatacaagacttagtaataaactggaaaatagtgtacaagcctctttagctccttcccgccctcgaagatgagaccgagaaccagcgttgcataaggtaccgtaaccttggtttaatagtatagttcagagatgttatcatgtatcgaatcatctttcctatgcttctggtaagttcagaggctgatgaaaaaccgatgtggtggatgcgagtgttcctttaccacacaagataaatagttgtttgaaaatagagctccaggaggatatcttctagataattccctgagcaggcgataattaagactggtaagaatcagctcccaatcggatctagaatttgtttgaacctgtttttcttttttcttctaatagttccaatttatgtatatgtttataattttttcatagtaattttctgaaagagagattgagataatatttgaatacatcccttgcacatgtaaaacgatggtctttataatatttataaattccctataagatagatgatagatccgatgatttggtttgttattacaaattttgcttgcaaggatgaattttcacattggacagacaatgattctgttgcggagagattagtaaataaatagacgatatatatccaaatgaaagatgaatacttcagccagtgcgtaaactttggtatgtgatatatatttaaatattaataagtttatatttatgatgataaactattagtagcttatgataagcttagtactgtagtaattaagtgctagtgcatgaccgtctcaaactattcaaagaccttagcttgtgcaaaagtttgtaataaacgtataaaatttacatagaaactttaaaatttaaatatcgaaccatgtgcgaatgcatgctaaaatgatcatgattaccttaacataatggcctagtgggaaaagaaacaacataagtagcaaagaattaataaatcttaccagctccttttatgctcaacacttaatcacctaagaattcatgcaccctagctaacaactcaacaaaacctaaccaattagcattaaaccctaattatcaaatgtaagaaatcagtgtccgtacttggtttgttgtggccatcaataatattgtcaacaatgtgaagaggaagcatgggattgttctcttaaatcagccatgcagtagccagtagacaatgacgacgaagtatattgggtatataaaatgttgttattatatcacataatgtgctacatatgtattctacatacttaatctatacatgtatatcagctttctttctttcactagatagatgatctttttcaaaggtgaatccgcgtactcctaacattgatgaagtcatgaagatgtccagaatgtaaatgtaggaattgtacccttgattgaaactgcaaacgagagaagatgaatccttgagaagatcagagaaagaaacatttt

SEQ ID NO: 61304 - DNA, 486 bp, Arabidopsis thaliana landsberg
  unsure (1)..(486): unsure at all n locations
gttcttggaaaaatagagattgctatggaaataaatgtggagctaatggctgataacgtgatcaactacaggagatcatcagtatcgaaatcgaagtcgactttgcctaacggagtatcgctcttagttgtggcatcaacatttatggtagcatgctcaaactgtgcaccaggctgaggnnnnnnnnnnnnnnnnnnnnnnnnnnnnnnnnnnnnnnnnnnnnnntgagcctctgagttctggcgtttcttccattcctgatatatgttaatcaggtatttctcagtggtgcatgtacgggaccagtgctgctgagacccgcacctaaaaacatccttcgtcagcatgctttgaggcacttgcatcgccctgctgggggttgctattgcctttgcctctgcctctcatgaagctgtaggccgatgtcggttgggcctagccgaacgatcgcctttcccagctgcatcgtctccagatgaaactggc

SEQ ID NO: 61305 - DNA, 1026 bp, Arabidopsis thaliana landsberg
cattcttttcattcttcaacgtgctctagagcagcttttatattataacatttgctttttacaacatgctctgacaactgttatgagcattgtcatatgtataagaaactgtttggagtattaattgcgtaatactttaaaaaaaaattgtatactttatttcaatttcatacatagagtagagcagtaggagtgggaaagaagatgcatgatttgggaaggcccatcaacttaattttacccaaaattgtttctacgatatagaataattgcatgataggtgttgtcatagaagggtggaaagatgaatcgatgattgctagggtttttaaaaaaggagatgttggtgacatcgagttagggttttttttttactattggtagattcccaattgactaaattctgctagctagttttcaatataaaatatcccaacatatgaatggacgaatataactttgtacaaggtggaaatggtccaacctcgcttcatgataataattaagactgaagttacattagaaaattattctccggaccgttcttaattaggggtttgatttagcaaacaaatccaactcaaaaagatcagattcagaacttgaatcactctcgcatccaccaattacatcgttcttgtctcctgcatttgggtcttttgtctcaaccctttggtccgaatacagactctcacaaaatcttatgttcaacttctgatcactcttcttcaaatctttctcatcaaagcttcttctacgcgcgtttaaactccacgcgccggcattggtgagaggcgaagcatctgcggcgctgtgtagtcactacgcagctcttcctcctcatcctttctactcgtggtgtctccacctccggcgctgactttgacttcttctttagaccagctgagcgaagaagagagttcaagaaactggttagcttcttaccgccgccacgtgtcatctctttcttctgcggctttatgacgacgactctaggtttagcgaggtgtcttctgtctcagggtg

SEQ ID NO: 61306 - DNA, 2212 bp, Arabidopsis thaliana landsberg
agaattcgaatacacttttgttacactaaaatttctaatgagactgagtcctatgatgattattagttatttgaggcatcactaaaatatatttttgatccctaaccaagagtatatcgataatcaaaattctacaatatcttatattctaactttccataacgagaaagtttatcggtgacaagcgttactaaccagaaatgcagtgaagagagatcatacatagtgaaaatcataaaaatgaaagcctcttccataggcagaaacttacacaaacatttgagaattcactacttagacattgtctcttgttactaccgagttaaaaagatttacattactctcctcactccatcaacttctttgaattgttccatctctaaccaccatacggtaagctgcacaacaccatacattaaatcaataacttattttttagagtgattttgtagatgattagatttgtgccagaattttcaaaaaacaaaccataaataagtggtgttttttatgacaggtaattttaacaaatagcatgatatcatgtaaaatatacaaaataacatgttatttgttagaattacaaatatacaacaaataaaccaaatttatttacgattctgtgtcatccatatcttccaatgccaataaatatggacaacatacatgtatatggtcgtttaaagtatatatttttatattctttgtctcaatttaaaaataaaaaaaaaatcatgtaaagctatcaactcaaaagaatgtaaaaagaaagggtgattaattggttacccgagcctaagggaagtgtcggagctctcggagtcaacaggcgctccggtagagtttccggcgttagtaatagactccgacgactgtccttcctcgtacacagcagcgttctccgattcagcaccaccgtgtgcatgcacattgttacatatctacacgtaaccaaaaaaaaatattccaaatttaacattaaactgataacaaacatacaaaattcaaaataatcaagactatatatatatccacgtacttgcatgccaagtcgctcgttctcttccgttagttgcgttccctgcaaaaatcaagacaaaacatatcattaagttctctagctaagtatttgcattttgtgtttttagtggcaccatgtgttttgaatttctctagagatcaactaactacgaatgagcaaatcttgacatgaagcctcgaccaaactatatatcaaacaagaattagatatatattcgtttatggttccatgtttcaaaaaacaaaatgaagatgaaaaagaaaaaacgcaccaaatccatgcatgcacactcgtagacctctaggaccctagagactaactagctacatggttacctttagttttaaagacatttttaaatcgcgctatatcacttggtttattcatttatctcacagtatgatcaaacatatgtgttgtagacaactggggattaaatttaggagtgtgtacgttaatggtagacaaaagaaagggatttgttatcaacagagagggtaagacacatacttgctgcctcaaccgcttgttctcatccatcaattgcattccctgaacaccaaaaaaaaagagaagaagatgaaaattttggatcttgaaactgccaaaattaatattgaaatcatcaagtaaagaataaacgttattttggttaattattacctttttctgaagttcgctgatctcactcataatcttgtcactctgcaaacacatctcgtattagtaaattgcatactcgtaagcttagagaaacttatacatggtatcaagtaattttcttaacaacctttgtttcaatcacacgcgtcaaaccagtttcaagggccttctctagctgctgaagctcttcaatgtcaagtccttgaagttcctctcctctcatttgcctatatatgatcatgtaaacacacagttagaaaatgatagtcgttgatcaaaaaaaaaattagttagaaaatgatagttagttcaaaagtcatagaatatacatatataacgtaccttagtcggtggctcttgtccgcaatttctttactcattcgggcgtgatcactgttctcaaccagctaacagaataaaacattgatttaagctctaatcatatccataatgatctaaagctcaactttctacacaggactactctacatgactactacatggatc

SEQ ID NO: 61307 - DNA, 735 bp, Arabidopsis thaliana landsberg
tatacacaatttaggaaaaaagtgttattcaccgtcgcaatgatcaaacatccaccatatattgaaaattttaataggaaaattaaatcggacccatttgaatctctatatgtttaaaggcagccaatttcttcatagagaggtgtaggtataatccataaaatttgtagactataaataacgacatgacttgaatatttaaacccttcttgtcaaacttgattagtcccaaacttgtatgtggtgtgctatatacatgaataacaaaaatataatttaggatggtagttgtacataattcaaaaactgatgtgagcagatatgttgagatagtggtcatatatatatagaacacccaaaaattcatctgtataatcattgccagaataattgaaagattcttaatttaaaaaaaaaaaagagatcattgaaggtcaaacgttaaaaacctaaattttttgaaaacctactaattaatcgtaatgtcaccacaaagctaagtatcaaaagtaaaacaatagctacatcgagaaactcgacgattagaaaaacacgaataatgtagtacaaaggaacaaagagaaaagattccaacaccactcaaatatacacctacataatttattttttcgattgtatcatgtataaatgacaaatgtaaaaggtattcacatgttttttttaaaaagttcgagaaattcagatctaagtcctaattttgtagacatgggatca

SEQ ID NO: 61308 - DNA, 1150 bp, Arabidopsis thaliana landsberg
  unsure (1)..(1150): unsure at all n locations
gaaacagagtttcaattgggagtcatggaagaaagaaggattattctacaattctctccacaactcggttgaggacatagccaacgctggaatcactcatctttggcttcctcctccttctcaatccgttgctcctgaaggttccatttctgctttactctttacacattcacataccaatcttgttactcacgcaatcttcattcctcaggttacttaccgggaaagctatacgatctaaacagctccaaatacggttcagaggcggaactgaaatcgttaatcaaagcgttgaatcaaaaaggaataaaagctttggctgatatagtgattaaccacagaacagctgagaggaaagacgataaatgtggatactgttatttcgaaggtgggacttccgatgatcgtcttgattgggatccttcctttgtctgccgcaatgaccctaaatttcccggtaccggaaacctcgacaccggaggagattttgatggagcgcccgacatcgaccaccttaaccctagagttcagaaagagttgtccgaatggatgaattggcttaaaactgaaatcggattccatggttggagatttgattatgttcgaggttatgcatcttccatcaccaaattatacgttcaggtaaatcacatatgaattctcaaatatcagacaacagtattagtatataagaaacataggttgagataattatttactattagtatatataagtatcataggttgatagggttatttactactatttagtatataagaaacataagtcaatgcaatcaataagaaatatataagaaagttcactactgattatgtgataaattcctctgtttttggatacacagaatacatcaccggattttgcggtgggtgagaaatgggacgatatgaagtacggaggagacgggaaactagactatgatcagaacgagcatcggtcgggtctcaaacagtggatcgaggaagcgggtggtggtgtgttgacagcttttgatttnnnnnnnnnnnnnnnnnnnnagtctgctgtcaaaggtgagctttggagactaaaggcctcgcagggaaaaccgcctggtatgataggaaacatgcccggaaacgctgtcacattcatagataaccatgatac

SEQ ID NO: 61309 - DNA, 4091 bp, Arabidopsis thaliana landsberg
ttgacgaacaactgctatgacagattttaaatggaatgctatctatcttcgcatttgttttttttacttccacatcttctcttttctctgggctccgaggctacgcacttcaatattacaacatcagcacaatatcctcaaatgtaaaatttggtgtttaagctttatctgtagattctctatattttagttccttttgtgtgattcatgctttttaagaggtgtcatcctcgagattgttctctcttcaatctcaggtttccctcagagtttggaattgcttggatgttaatcaatcattaatgtttatgtatccttacattaagatctggagacagaaccgactgcaacaagagtttcaatattcacagcagcatgaagtagacgtagatgtcaagatctatggtctcggtccaaagagtgattcgagattcacaacagtggagacacctctagcatcaatagtttgctccctagagatacctttcagtgatgaaggtggatcaagaaaacagtgcttcttaaaccagagcaatgcaacaatggaagaatgcgaatccacaagtatcaaatccaggatctgatgaaagaaatgcttctgtcacaaaacaacctctcatacgcaacattgccagtccaactcgaaaaactaagtggtcttggaaaatgaaaagtatgaaacatggaccagaagctgtagagaaagcatcaaacttatatttatatacaatgaacatcacaagtgtatttcaaagacaacattaaggataaaccagaccagtaaagaaaccaaacaaccaaaaaagaaagaaaacttcaccataacatatgttgcttgttccatatcatttatagttagattgtagcagcaacacaagattcagttctcgccttgtcagaatcttccaagactttcttagaagctttaatgacaatatgattagtgatgtaatgcttgcgacaaacaggcatatagacatcagctccaccaataagctcagttctggtgtcacaattctttcttagagtgaagaaagctttatgtccacagacctcacaccgtgcagtgagcttagtcacagaatcagctattggtataatgtcaagtacagcaccaaaactccttctacatatagaaagatcaaatccacattacagtcaacaaaattgttttttttaagaataaaaagtaatcaaatcacaaataggaccaagcaccttaaatagtcaccatcaaggcctgcaacaatcacaattttaccatcatcatcagcgactttgcagcaaaactcataaagatctccaaagaactgagcctcatcaataccaatcacatcaagctgccaatcatttttcagagaaaacacaaattcaatacagatccttcacaattaagacccgaaacaccaaatagagcatcgaatttattaccttgttataagcatctagtccgaatttctcaggaaatgacatgagatctggaagagcccagcaagggaatccaattccatcatgtgtcaccaccgaatctttggcgtatctagtatccttactcgacttcagcatcgcaacacttctgcttaaccaaaacacgaaattaagaaatttacggagatagatctaacaattaaaatctacggagatagaaaataaactgtaccttccgtcgctgatctctgacttgattcggcgaaggagagaggtcgatttcccagaaaacataggacccatgataacatgaacagcacctgacccacgacgttccagatcggagagaaaatctccggtgacgtcactgtcgagggttttgatcaaaaaggaagctttgagagtcgccatggcagagacttgagaagaaaagatggtttgtagatgaaaaaagggagaagggttcaatttgcttgtggttttaggtagcgatggtgaatagcttgttgaagatatatatacgcggacatccagaagttgaacaaggaagaaaattgctggagaagatttgtcaaagataagggcttgaaattttgaatgggaggttttttcaaaaaatttacatctttggagggaaacagttttttagagcgaatctttttattttacctctctcttttcataaagcggaacactataaacggaattaaaaaaaaaaaaaaaactgattttctattggcttattttttttaattaatttccttaatgtatagatcatatgaaatttttaaacatgtgtgtttaggctttgcaaacacattatttaagagaatgataaatatttttaaaaaatatatccacataaaatggtactggtttttggtcatatattccactaatgttttttagaattattgtttagattagaaagtcgtaaattcgtaatattcgagaaaacaactttctcacttgggtttttatcctacaaacccatcattttgtgtgtgtgcttttgaatgtgggcttaaacccaaaaccctgaggctttttttggccctgagatgaacatgttcacaaccttcttcaagtgttccaatacatacacgttcattgctttttcgtagttgcaatttttatttaatttttcgtatgtagttgcacaccttcatgtctaaagctacaaattgttgaaatgttttttccgatcacctcaattaatgtacaatcgtagctcgttgtattcctaaaaccgaactagaataatacattttcatcgccaggttattacaagttaaatcaatttgatcaaaattcaaacatagataaaatgtacaccagtaggttaaaactaaaccaaacgtacacaacaagcctaaattatccaaacaacaacaactctcagttttgctttaaaaattctgtgaataagacatccttaattgcaaatttatttttaattacttctttttaaaaaacttttagtggcaccatcctaattagtaattactttctatataattcttctttaagatacaaactaaaaattccgcaaaaagaaacatctaaacattccaatatattaatatttttttgttatgataaatggaagggaaaacgtataaaaagtttagtattgaaaaagagaaaaaaaagaaacaaaccaattatgtaataatgagtataaatatataaatacagacatatcttcttcttcttgcacacccaaaaagcctttgtctttctatctctctaccaaaacttctctctttctctttttttctatatctctagagcgcgttactgcgcgtcgtgagtatgtttttattgacgccattgaaattgggttaaatcggtttgaatcggattgaacaaaaactgtattaataataattcttcctctacttttctctctgattgattccaatcttctttcattttcttcttcttcttcttcttctggggaaggggcaggttaaaattatgccatctattcaaatcgtgcctatcctcagatcttaactcttttctctacgagattcggcatctgggttttattcttcttggtgggtttttttttattcttcttcttctgatctcagatttcccctgattggtttttttttttgctaaatccgttttatgttttcccgatcaaactctcctggcagattctcggatctgttgttttctagattcaatctgaatttgattttacgtttttgtctttgtaaagaatgtttccttttgatcagattttgataatccattgacatctctgattcaagcaaaagctaattaactttgatccgattcctttgtgtgtgtgtgcagagcaaaatgcaatcggataatggaaagcttttcatcggtgggatatcttgggacaccaatgaggaacgtctcaaggagtatttcagcagttttggagaagtgatcgaagctgtcatcttgaaagatcgtaccactggtcgtgctcgtggtttcggttttgttgtttttgctgatcctgctgttgctgagattgttatcaccgaaaaacataatattgatggcagattggtatgttcactgttctctgcctttcgtttttgaacaatgtaacttgttttcgaagcttccttatgcaatcaagccttcaagagttacagtttgttcgcatttcc

SEQ ID NO: 61310 - DNA, 1230 bp, Arabidopsis thaliana landsberg
  unsure (1)..(1230): unsure at all n locations
catagcatttatgaaactaaatcagaattatcaatttaacctgtatcgagcgttcccgaagtgcaggatttggatccgttaggagccgttttgctacatatggataagcaccctagataaaatgttcacttttagtgtgggaagggaaatataagtgaacatatagctagtatctgctcacttcaggatttatatgtcagctaatcctaactttgaaaagaaagaatcaaaatactaaacgagacttcacctctagaaatttaaaatcaggcttcagtgtgaaacatataccctcctgcgtaagcagagaacgaatnnnnnnnnnnnnnnnnnnnnnnnnnnnnnnnnnnnnnncgtacacaagcttgttgaattgtcctgcaccaaaaacgtgacaccgtttcttcaaatgtgcatggggtgctcagtaaacaaaacaaacttgcttgaggaatgcaatatatcaagtacctgtaacacttcggaaattgaaatctgcaagtcctttccctgcagagttctgccagatggcttctaaagctggaacgataggagaaacatcggtatccttggccaagaacccaagcctagtgaaatcatttgccatctccccatagtcctcattaaccgcatgaacaacagcatcaatcaaaatttgcttgttttgctgagaaaaaaaaagatttagtttggactatgaataacaagtctctatatatagatgtgaaaatcactataggaagggacataagctagctatactagataccttggaaccattaaactcaaattacctgactcagtacagcaacattaccgaagtccacataagcgatacgcccatcttgcattgcaaagatatttccaggatgtggatctccatggaacaatccaaattccaacagctgccttagagcagcacttacgccaacagtcaagaatccatttaaatcaatccctgcatccttgatggcctgagtacatttagtaagagtcagtatcagaatgtactttaattttgactttttaggagggtataggggaatttattttgagttgtccccctttttgaaagtcatacctgtgggtcagtgcaccgaataccatcaatccactccattaccagaacccgcggaccacaaagattcttgtatactccaggaattttgactgtggggtcatctttgaagttctccagaaagtcttcaatgtttctggcttcctgagcaa

SEQ ID NO: 61311 - DNA, 1019 bp, Arabidopsis thaliana landsberg
cacaaagttaagttaaaatgtctcaaagtatgtcataagtgcagcaaaaaaccctgaatttgcgcagaaattacatgctgtgttgttagaaagtggtgcatcacctcccccagatttgtttatggatattaacccacataacttgagggggaagaaatttgcttcaagagccccgccaagaaagtagcaattctatggtttctggtattccatgctacccagaaaaggtactcttaagatacccaacattccacctgcccccttaatctatcttaagatatttaagtccttaattgtttccatctacactgaataggtagctgaacaactgagagaatctgaaaggaaccccacagccgagagttaccaacaatcagtggaggtcgatttgtcaatgaagaggaactttgatttggataatactggtaaagcttcttcatccgaaaatatggaggttggcactgctgatggggagtctgctgtttgtgatagtcatgaccaagggattaatccattgctcggagaagctgcaaagtgggaaattatgtgggaagatcttcagattggcgagcgcattggtattggtaaggtttgttatatcagatattggattcgctagaattatgcaactttattattataaactgaagtggtatccgtgagagacttttgctgaagcttgatatttactaatagttatctacccttatgcttgtggataagatctattacatccaactattcagttttgatacaccagacaagccccttgatctgatgtgctctttctctgtgcttttctgtcgcaggttcatatggagaagtttatcgtgcagagtggaatggaactgtgagttatgttttgtagtcttaatccacttatccttgcaatgttttttaatctgcagtttctaaaaatcactctcacattcccttcgatgaagagatttgctattttagtcatggagttcttggactgattgtgtttttcctttcaggaagtggctgttaagaagttt

SEQ ID NO: 61312 - DNA, 199 bp, Arabidopsis thaliana landsberg
atggagcacatatagcactctgactaaggatacccatactgagtcggagcggatataacaaatatcatgaacaaactgaggggggtggttgaactggcacataaagatcacacatgtaccattttgatatttccgaccaacttccccatgagaagctactactacaccgcaaatatgaccacctgaaagaccacatgca

SEQ ID NO: 61313 - DNA, 718 bp, Arabidopsis thaliana landsberg
tgattaagacggggcgagagtacgagaattattgtatttatcaactttgagacatactacatgatatggatcatgaaaattaacacaagtagtgcaaattgcgttatccatatacaaaaaacatcgcaccttgatgattcacttaattgtagattactttctcagagtggtccggacatttctattggttttaaagacattggctttaaatcttcagacacaaaacacatatacatgtgtacacttgaaaacatattggccatcttatttgttttggacaaactgccatcttattatgcatgggttcttgtaaggaataaactaaaaatgtttgtgaaagaaaaagaaaaacacaaatattgagaaagtacaaaaagaaagacatggcaaaggccaaaggggggacacaagttggagataaagtaatacaagtccaaaaacaaagaaacaataatgatggattgtaattagccacctgacaaaatctctcatcattcaaagtactatattaatcccctctcttcttcattaccatctcacatctctctctatttctcttccacaaagagtcctaacttcgagttgaaacaaacaccatttctcatctctatctcagaaagaacaaaccatttcgtgttctttctttctctattctcataaggaaatataattcctgaaactgttgagttcttgtgaaaggaaataaaaaacatgatga

SEQ ID NO: 61314 - DNA, 335 bp, Arabidopsis thaliana landsberg
  unsure (1)..(335): unsure at all n locations
caacggggggggcggggggaccaacccgctggatccttctgcacacctaccttatttatcaactagcaatgatatcagggcctaaaatggagatccgagctgctaccctcaggacaatgaagcttattaaccaccgtctcactgttctaacttgaccccagtcacaaatacgtcatatgtaaaagaaaaaggggggaacaatcacacaccgatatcgcagnnnnnnnnnnnnnnnnnnnnnnnnnnnnnnnnnnnnnnnnnnnnnnnnnnnnnnnnnnnnnnnnnnnnnnnnnnnnnnnnnnnnnnnnnnnnnnnnnnnnnnnnnnnnnnnnnnn

SEQ ID NO: 61315 - DNA, 1455 bp, Arabidopsis thaliana landsberg
ttttcttaagaatgatatgctatgtataatatgacaactcataaagtcaaaataataatttgacagctcataatacattaattttgtaggttaacatttattttcttatcaatttgtataaaaagaaaatttgactatatatatatatctacaaataaatgaatttgactatgatttcaacagaaaaagaaaaagaattttcgaaactgtattaaggattttctgtttaaattttggcaaaaactaatatattatttggaaaatatattagattcgattaaatttacaatatggatgtgagttttcggacatatatgaatatttttggaaaaatagtttattctattcatgaattattattcataaataaacacagacaaagggaaaggtactagaaacactcattatggaccaatttgtgacaatttgcaatgtagaaacaacgacatgcgaaccacacaagtaatgccacgtgtaatctcctgaatgaatagaagaaagaaaaggcataaatagccttaagattttctcaccagaatgacctggcgttagatttggtccaaatcagtgaaatcaaaataaacgtttctttttttggttagatgcacgccacgatttcgtctaagagaaggcacaatttaatcttactagaagaaggggcttatcaatttagttacgtttttggtttttactcaaaaacaacttgtatgttctacaagaaacttcgaagcaaatctaacttgtaataatggattgagttagatctaaaagcaatatgtatttttaaggctaagaattttcaacagctatataccacaataattatcattttgataatttcacaaaattaaagaaacgtgtagagagaaacttattatacttctagaaaaatgatttaacttttaataaaaaaatttatacttaatatatgtatttgatatgcggtttatacaaaacaatcacatgtatttaaataagaatagttaatattaaaaatctaaaacaataattattctggaacatagataatgcttacataaaatttgatgtgaaatggaattagtatttattgacgttaaaaaaataaaaaataattattgacgctaatgggttatataatcactagaatatgtttttgatataaggggaggccaccaatttgtcagacggaaaatgttacagagttgggccaaccgaggtatcttcaaattcagtgatccaatttgttttactattgagcccaaaaattgacttccaaacagccaaaccactacgtaaataaacatcaataggctgagaacggactattatactaagtatgttagcctagaatatgcaacactgtcacagtgacacactaatggtaaaagaaacagaataacaacaatcccaattgatggtggtggagcttcgacggatggcaggatgggtactgagttaagttaaagttccaaa

SEQ ID NO: 61316 - DNA, 1996 bp, Arabidopsis thaliana landsberg
taaaaggtgcactagagacatgtcttgtttgagttgtccttgcacagaacaaggatggtctgcatagattagcctgcgtagagctcatctcttatctcaatggcttctctcaatacatcaactccaggatcttcatcaacaacaataaatataaaaaaaaacttcaataacaacaaaaagcaaaaacaaaaacgttcttttaggtatgttaaaggtttaaatcgtagcaaccacgtaaaccaatcaagaattcgaaaataagaaaggactgaaccaatcgataggaagatctaatcaaaagaagattaccagaaatcagaagatgatgataagggtgtgaaataatgtaataccttgacgaaaccctaattcgagagaggattagttttgcgttttcttgtttgtgtgtttaataagaaacagaccgaagaagtcggagcttcgaagcttagaggtataattgaccgaagaaattgtttttgacggcggtggattaaaacgatgtcgtttcgtcttatccgatgaaaaccaggtttaataaataaggaaaccagcgatggccggtgtgggtgtgatttatttgcaaatatagaccgataaatatatacttgaaccggttttaatcaatacggaaacatagtgctcgacgtccatcgttctctgtgcgacgtcgcgacaaaacccagatccttgaatgcaatcggaaaataaaaaggttaatttttttaaaatttctttgtcgaacgtcatcgttaattgcaagctttgcgatgtggatttcatctgatctctcttctctatggtttatcctctgcttcttacaagcgctcatagtgtttgttcttttgagcttcgacttggttatagtttgattgatttagatgaaactgttgtagtttgccactgatcggatttctggcgttaactcaagctcgaatcttcccttaaattcaattcaaaaaaaagggacactgttgttattttttctgaaagtaacttcgttgattcagctttcattgcgttgtaagttgtaactgtgaaaaatggctcttagggtttttggagcttctctcgtctttgttatcttctgtaaatccatcagttgaatcactctgagctcacttcatgtttcaggcacttttaaggaatcaacacgatgtcgtttcatcataaccgctaaaataaatacttaaaaaccggtttgagttttgattttttttggtaggatcttaaaccggtttgataaataaggaaaaccagtgatgagaactatacttagaaacgacgccgtttcatcaagcatcattcttctacgtctggtttgtttttcttcagccgcaaatccaagtcgacgaatacgacgattttagttattcggccggaaaggttgataatttcgtgtgattaatctatggagttggaatttgaatcaaagtacgagattaaccgtacggcggagttcattattagcaaaagcttcaccagaattgctttacaggtaccaaaccttttctccagtttctgaatgaagaagtttgattttgtttcttagcttcaaattgttacttcaatgaatatttgatgataaagcttagtttttttctttcatagttcccggatgagttgttaaaagattcgactaaggtcgtgagtgctcttaagagcaaaactcgtttgcttactggcagagaagtcaggttctttgtaatggctgacacaacttatggtagttgctgtattgatgaagttggagctttgcatattgattctgaatgtgttgttcattacggtcaaacatgtctaagcccgtgagtcataaacccttttcttcatctatgtaattgctttaaattcccttgttgaaacaatgtcttattgtgaggttctatgttttcacaggacatcagttcttccagcattcttcgtttttgggaaagcttcgataaacgtctccagctgtgttaagcatttgatagattatgcgtcaaagagcgat

SEQ ID NO: 61317 - DNA, 782 bp, Arabidopsis thaliana landsberg
agctttctcggcttttagttttccaagtgcataccaaagctgtggatttagtataaaggatgttaattattactatgttattaatttttgaatattctagctagagctaaatatgatgaaaattatggtttacttattctaattaccttattatcgatgcagagttgttcatcgctccagctttcttcattgataacagagtggtcaagactattacagggatttttttgccaagcgcaggctaagagagatgatgtgaagacacattttctcactgaggctgttcttgtacacgcttcgattacactctcgctcacttttgcttctaactccgccattgatttctgcaaaacattaacagtgaaaatgagttacatttcttaaaccgtaacatttctttttttttgttagcacgactaattaagacaggttgtaaaaagaaaaacaaaagtgaacttctgatagtactcttacacaaattggtaggtccatttatgttattgattttatgatgacatgtgtgatatgttttttttactgaaacaaaagttttggtacgtagacgtttcaataaatagtggccacaggttagaaaggtgtatcagtacgattcatatcgcgaccagacacttacacatacccttatgtagatagctgtccctgttagtaggtagacaagctttctaaggtagttcacagttactctcaacacaaaataaatgaacctatcaatatagaagcgtagaaaaattcgtatgctaattaattactatatgatgact

SEQ ID NO: 61318 - DNA, 1384 bp, Arabidopsis thaliana landsberg
ctggactaatcaatcaccgttttgacctacacggcatcgattaaccccatccgtcagattttctatattttttatatccatcggtggtttccatcccatcacattgattggccatgccggaaccatatcaaccgtccgatcgttacccatcgccacaatctttttccctatattttctctcaacatactcaatgctgccatgtactcctcaatctcctcttctggcacactctccaccggacgctcccaccacggtctcctactttcctcatccgccgcgttatcaccggaatatccctccaacttcaccggactcttacgaagatacttgtctatcaatgcgtctacatggccaaatctgtagatcctatcgcatttagagaacgttatgacggcgatttttgcgcccgtgagaacgctcaattcagcggatttcttgaacagcccacgacggcgtttcgagaacgttacttgtctcttggtctcttcctcgattttcttgatctctatcttctgtcttcctcgtgtcgttttagggatttgtgttgttgtctccttttttggttgtctaaccaacatgttagggctttgaacagaatccttgggcgtcaagcaagtcatcgatgaagtttctctttctccttccatgaacaaatctttcatgactaaccgagaggggagagatgaaaatatcattaggtttttccttggtcgagggatttatagtcgttcatgattatgtaagaataaaggaattaatttgtcttacttttcttcgtacgtttatggaatgttgtactaaatgcacctccaattaattaatatttttcggaatgattcaatgaatcaaagatagcttctcgtaaaaatgtaagacatgtgttgtcttatacaaaagttatagaaatattataaaatccgagatactactttccattttagtcgtttattgaataatcgattgtgaatttgtgatacacattatatttatataatatatgcatagtctacctaaatatacacgaatctctttttactatcacgtacacatatacaaacgtagcatgtagaacaattatgtcatgccaagcagaagaaaaacatatgagtatatgacgtcttcttgccaagaagtgatcacatattcaaattacacatatgatatttaagaattccaaatatcacggtaaaatgtctaagtgacaaattgatcacatattcaaattaattaagtatctcattcgtggccaagaagtgatttgatgacatccttgttacttgattacaatctattccatagaccaaaaaaaaaaaaaaaaaaaagagtttaagaacagaaacttggaaaataatcaattattgaactacctctctagaaacaact

SEQ ID NO: 61319 - DNA, 547 bp, Arabidopsis thaliana landsberg
  unsure (1)..(547): unsure at all n locations
ccccccccccccctccaccccgccccccccccccccccacccccccnccccttcccccggggccggcccccaccaaacccccccccncccccccccccccccccccccccccccccccccccccccccccccccccccccccccccccccccccctccccccccccccccccccctctcctccccgggggggnccccccgccccccaccaaacaccccccccccccccccccccccccccccttcccgcccctccccccccctcctcccccccccccccccccctcccccgtcccccccctcctccccccctcccccccccccctcctccccccccccccccccccccccgccccccccccccccttccccccccccccccccctcgtcccccccctcccccccccccctcccccccccccccctccccctccccccccctccccccgcctgctcccctccccccctccctccccctcccccccccccccccccccccccggcccccctcccccccccccccccccccccccgccctctcccccccc

SEQ ID NO: 61320 - DNA, 487 bp, Arabidopsis thaliana landsberg
  unsure (1)..(487): unsure at all n locations
catcaattacgaactcgggaagagatgcggttcgtatcctctttcccctcaacagctggatgatataacttgcgacataatccatgtcaatctcctcgacaatccaacatatgaagcagtatcctatacttgggccaccgaatatggcgacgcctcactatcagcaaccatccaatgccgtggtaaggacatcgccgttacgcgaaattgtgaatcggtactgcgagcatcaagactaaaaggtcgaaatagaaagatatgggtggacgctgtctgtatcgatcagaataacacatttgaaaggaaccatcaggtgaagataatggctagcatttacagaaatgcttcacaagttgtggcatatctcaccacggacaccaggttatccttcaaatacgttcnnnnnnnnnnnnnnnnnnnnnnnnnnnnnnnnnnnnnnncaagttacaccatcacgtcgcgagctcgaagagttccttcggatgca

SEQ ID NO: 61321 - DNA, 724 bp, Arabidopsis thaliana landsberg
taaaaatgaggatcacccacccttcaaccaccagaatattctatgcgatagagaacaatatacaaaagacatgaaaaccagggcaggcaaagaaaagaaaaaaaactgaaaacttatcagataccttaattccagcagaaatttgactctcccaaccgttgtgaacctaaggggaaaatattatatttcagacaaaatgttcccacgaaattatattttcaaattcaacaacgtgcatatttcccaacctgaagtgtcgaatgagagtcattcaaatattcagagaagatccattgatgttgtccagagattgctacttgtcctacaatcctataatagtagagagatacgaatgaagatgttagcatcattaagtaaaattcaataatcaaaacgaattaatagctgatgttcctgatagaagattcaatattaagtacatcatgtagtcaatgccaatgaaacaaaagttaaaagagcagagaatattatagctacattaatgtaagactgtaatacacagtcaagctataaacacaccaagtctttgcattgtttgacaacatcaataaaagatctcaaagtaatgaagatagcaagagtattaacaagaacagtgcatcagcaagcaaattttccttacccttccccgagagagtgtacatgatatgacatcttagccacagctaacccaagagggtcatgagcatggcgccctccatgc

SEQ ID NO: 61322 - DNA, 124 bp, Arabidopsis thaliana landsberg
  unsure (1)..(124): unsure at all n locations
caaggaagaangaaacaacaacaggcccgcgaagcaccgagacgaaacgggccgcacacgcgcaacacagaagaaaacaacgagancacaccatgaccgacaggcccccgaaaacgaagaaaca

SEQ ID NO: 61323 - DNA, 1515 bp, Arabidopsis thaliana landsberg
gtgttaagtgatcgttctgcttatagaaatttcagcttcagttattttatacaacacgttcaagaagatgttgggagggttggttttaaagttggccttcctaggttccttaatcacgtctactaatttatacacccaaaattttatttttcctttataatttattttaggttttatgatttatttgaattgtttttggtttgattttttccatataatttatttttcatgtttttccttaagaaatatattgttcctcattatcaaatttaattaaaatcgattagaaaaccaattttaagttacagaggaaaaaactgaactttattaattttgaattgtacattgcaaaaaaaaaaaaaaaactcaatccgataaaaagagaaaaaaaaactaatgaaaaatatttggcatttggttttattttatgttatcaaaaaatgtcagaagatattagacgaagggtcacgataaataattagaaacaaaaagaattaaaaaaaaaaaaaaaaaaagaataaagaaatggctttgctctcggcgatgaagttgcagggacgtccaccaccgatctcgtccaatctcaacccaaattccaaacctgcaggttcggattccgtttccttaaacgcctccgaacctggctccgaacggaagcctcggaaattcagctcacagctaaaccgctggaacagagcacgaaccttaaggtctggcacgaagctggacagtacgattactaatggatcaaacaatacgaccggtccgatgcgtccgatcgaaagttcgagtcgcactgatgtttcgacattggacagcgacgtgtcatcatcaagtaacggagttagggagggggattttaccggggggaaatccatttaccttagcttttgccggacctggtgggacgggggacacccggttacgctggttggggacaattcgacttttgcttggtcgacccggggttgtcccgttaatacacatctcttctcaggggtattatcgtctttcatctctcttgtctcaatactcatttttactaaaccaaaccaaacgggaatgaattcggtttacaatttaaatttccttaattgttgaaatcgaactttaaaccgaatccaaccaaatgacaattcctactaatttcagctgaaaatgtctgtaattcaatttagccgttgtgaatcggaccgaaattatttctgttttcttgaaccggaataattgattccggttatcttaaaccggaattgagttagtttacttgattggttatctggttttttgaagattgaagatggggagaagttaatggagatcataaagcaagcggcaagagaaggagcaatggtaatctacactttagctgatccatcaatggcagaagcaaccatgagagcttgcaagctatggaaaatcccatcattagacattcttggaccaatcacagagtcaatctcctctcacttaggcactaatccttccggtctttcacgtggcataacaaactca

SEQ ID NO: 61324 - DNA, 269 bp, Arabidopsis thaliana landsberg
catgataaagaggcctttctggggcttttatattaatctcctacgacaaataaacggaaaagctagatggttcaaatgtagatttgaattcacaacactggatttgaattcaagcaaacaaagatattctcttctctgtattagagtggattattggttacaaaaaaaacactaccagcttacatacaaagttagaagcatttatatacatgagaagaacaataaatgaaaattactatgttgcatttatattgaagctgccgtttgtg

SEQ ID NO: 61325 - DNA, 369 bp, Arabidopsis thaliana landsberg
  unsure (1)..(369): unsure at all n locations
cttctcgaagctgcacgtcgcaggcgatccgcttcgcctcgtcaacgtctgggatgtcggcagcgcgcgtgccgtggccgaggccggcgcgcgggccctggcaacgagcagttgggcggtcgccgccgctgccggctatcccgatggcgaggaactgccgttcgacgcgctgctcgccaccgcctcggcgatcctgcgggcgaccgacctgccggtcagcgtcgatttcgagggcggctatgccgatgcgcccgacgaggtccagggccatgcgcggacgctgctcgggcttggtgtggtcggctgcaatttcgaggaccgcanggtccggggcgaagggctccacggcgtcgaggaccaggcagtgcg

SEQ ID NO: 61326 - DNA, 4720 bp, Arabidopsis thaliana landsberg
ggatttagcatagcattaatatatgaaaatgtttaggacaaacatatcacattctaaaaatgacgagtatacatacttctgtttgcaaagtatcgagaatagctgcaagtaggttgtctcgggatatgctcgcgtagacctagagtaagtgtcacagaggttagctaattatcatgattattagtatataacatgaagcagaaaaaacttacaagaactggacatccatcactgaattcgatagcaaacatttggggttcctcagcgaaccggacaagtgaacttactgaagatagaggacgaacgataacaacctgcacacatctaagcagtattctcagtatttgacaaaacaaaaccaaactggacaagtagaaagttaaagctacgtcctactcattttcagtctttactttatcatcccaaacattgtaacttatttgacttatgttcaacttaaggcacagctatatcatgggaaactttttacattaaaactctaataaaaccagaaacaaaaacattagaacaaagaataggaacgcagcataaagtagtaatatagatagaaattgtgtctaaaaccgtgttgccaacttacttcataggtatctattcgtctctcaacaagggaggccttagtaagaataagctgaagggctacagtatccccatgctcaccaagtgctcctttggggccaattgctaagcttagtccaggcatgttcagagttccatgagcagcagatcttaatctagtaacagaccaccacccattaggagtttcttcagctccaactgcttctttagctgcatagtcaataattggcatcaaaaataatataaagaaatcataaataaaaaagtgatctagacaagacacaaatataagtaccccttcgtgtcatatactctgatactgtcagcaattgtgaatcatcgactgacaagaataccccaaccatggactttgcagtcttagcctgcaaatgatatttgcaatcatcaagattaacaataagttagcaccaacttctcaactaatgtgcaagcatatcatttataccaaacttgcgacaatggaggaatttgttgtcccgggtgcagctctaaaagcttttgactttctcccatacatgggacacagaacaaacccagcagagtccgcagattttgtccggtatgcatcagagagaagaatgattgctggggaacccatgtctctgaaatccaaaatccagcgtgaattaccagattttgagtcgacaagctccagaccgacaaaggtgatcttcaatttctgcaaaagaaaaaaagaaaaaagaaaaagtcacttcataccaaaatctaattcgaaacagttagtaaaagcacctcaaataatttctactaccagtcgcaactttcaaatgactcttgcttcttgcaataacaaaaattgaaaaaaattaaaatcaatcccatagaaaataagaataaggctactcatgcgaaacaaaaagaactccccctgcttagttcatgattacaaaaatttaagagcacatcaaacatcgaaaaatactaacatcagcttaatgcctaataccagactctggctaaaactatctaaagatcagaaacttcaaatatgttgagcagctaaaagcctagtccgacttgacctcaaaaccaaagcaacagtatcatactatcagagaaaccatgcataaaagattgaagatggagccactgtaagaaaactacttacataaggaacccattctgcgttccgtctcctaagatgtagcacctgaaactcagccacaggtctaatttgattccatctaagccgatacaactcggtcaaaatactcgctctgcacctagaagagaacttcatagccttaaatttccctttcccatccgttctaacattgacagtaaactcaccaccaacactctccgtgttctcatctcttccagccagaggtgaagcaccatcaaaattacttccagtatcataagaattagtaacagcaagagtattaggatcaagcgtaacaattccgccgctcgaaatacaaaggatcctcttataacgacctctccatgaatgtttaacaacaagatacctagctagatactccggctcttccacagcaccgccggttgttgaagcaacggtacctctagagacggaatccatagtccgatcagatccaacggaatcgataaactgtaacgtgttgtttcgaggaggattattaagaagaggtcgtagaaaatcccagaatcctaccctggaatgatcggaaacgccaggataatggcgggggtgggactgattcgcccccagttctttgacttggttatagcaaaagccaccggggctagaaggtccttttgcaacaatcggatccaaaatgggaagcttaaaccctaattttagtcgtatgtaagaaacctcggggagaagatgaatgcgatcgatttgttcttgaatacgaaatttggtgaatgatgatgatcagagggaaatgaagcaaaatttcgatctgagattgggagagaaagagtcgtgaatttgtgtgttgttgttgttgctgttgtttttacagtgtgacgactttgtttgagagggttaaaggctaaaggccatttttgattcggtgtctctccggtgcaaatgcaatcatcatcaattcttctgttcctttaacgcggattaaacgtgtgtcaaaatgtataattgtctagattactatttctttggctctttcaacaaatgaattagcacgtatattaaaaaaatatgaaaactaaaaatattactaattaaaaaaaaacagaaaatctatatgggaaacattctacagtaaaagaaatgttaaaatatagctaaacattttttactgtaaactgaaaacattttttaccaccatttatacactgagaccagaactccagaagcatagtactattccaatcatgtaaagaccaaaatacaatgagactcttcaccttattgaaaccgagatcaactggccacattccaatcaactttacatgtttacttatgttaattgttggaagatgtgttttcatcagaaaaggaaacactcaaatctaatttaaaatgaaaattcaccaaaaccacctaatgctaaaaacatcaaaacttatcattgctgacaaaagacgtatatgagctaagagacgtcatggctggaaatgagggagtgcattgtgagagtagacaggattccgggaacaacgctaatcccaatctgaaacttagattcaaaatttggagaaggtgtgccaaaaaagatttgtccattaattgagaaataaaaaaaaggttgaccacaaagttgtcatcatgcacgcccttgtttctatgtctcttaaacacattttgtttcatgtttttcaacacaaattttgtaatgtttactaacattacaacaaaacaatcacatcgtttggagaagatgcaaaccgcctttcctacttcatttactctttgaagtcatccttgtcatctgccggaatcggtaggtttctccagaacacggccaggccgctcccgccaagctgcagaatgccattgaacataattaaacttaaggaatttgcatgtgaactttagtgaaatggctatgaaaacttaccgccatacagacaacactgactgcagaaggaacagcaactagagggtttgtgaaatgcttttgtgcaagcaagaacccgagcgctgaactctgcggtttgcaaagtacacagattttcaaaaagaagccttagtaaagcaaacggcaatgtatatctacggtataggagaaagtaacttacttgcattccacattctatagaaatggtacgcgaagtggactcgccgaaagaaaactttgaaatccaatagccaatagcaaaggctgcagcatgaaggagtgccaccgggagtataagttgagctccttgggttttcaaaacatctgcaacttgtccaatcttttcagaaaagataaggtagtaatcaatgccaattccagtctcaaaattcaataaaaaaaatatatatatctggatatatgaacttacagggctggcacagagcagagtagtcagaatgactccgattagaggcgtcactgttatgatcttagacgtaaatttaggaaagaactcatttgccagaactgcacacaatgcagaaaaagacattagtccctaaggatatataagcacaaattcatttttccggaaacacgtagcaccatacttacctccaattatggtaggaaccaacactacttggaacgtactaagagcaagtccctgacgtaaaaaaatggatccataagctttcgttgtggagggctgcaactatattctaatagagttcttgcgcttcattctactttaaatcattcaataacttttactgaaccatgattattcatattttagcttagtgaaatgtatcttatatttcatacataaaaagaaatgtatcttatcaatgcaattttgaatgaaacgattcaaaatagttatagagaaaactcacagcagcgtcaacgggaacaagctgaccagcaagaagcttagtaagaagaggagtcattataatagccccaatgggttgaacacctaataaattaaagaacagataatgtatatgaaatctgaccaataaaattaaagaactgaaagagaaagaagtgaaaataga

SEQ ID NO: 61327 - DNA, 304 bp, Arabidopsis thaliana landsberg
  unsure (1)..(304): unsure at all n locations
cacaacacagcagggccgcgggaccaataaaaaaccacaaaccccaaacccacccannnaagaaaacaaaacaaaaaangccacaccaaaccagacacagccacaccaggagacacagacgacgcaaaaacgaaagaaacaccgcgcagagagagacacaaaacccactaaaccagcaccgccaacccagaacaagggagacccgaacccgaaccaccagccaaccccacacagaccaacccaaacagagacaccgaaaggagacacgccaccgccatgcccaaaccaaacaaaacacacccca

SEQ ID NO: 61328 - DNA, 2395 bp, Arabidopsis thaliana landsberg
caacgttctatgtatttataagcacagccgatcatgtatacgaaataattgtgtgggtcctggggccgcgtgtatctcatgacctgtcctctctcaacaagagaagaaataaaattcaatctccaataaccataaatgttttaggacatatttgaaatagttaacaccataaaatgattaaatggaagaccagaagcaaagatttcatttttgttaatatttaccaaaatagatgactaaaattaattagggattcttcccaaaagataattgtatgacagtggagcaaggattgtataatatgtgtttaccttttaaaaattcctaaaagtggtttgattaatttcccacaaataatcaacctcccattagtatccttcccaaaatgaaaacaatcaatattcttaaattttaaattgcattgaattcaccttaccttttaattttgcctttcaatgtttgacttctttatatgattagatatacctatatatatataaatttattttctttaatagaaagattttactaaaaaatcctgaactaaattcatgcatgatgacagagtaaatccatcctcatcatcaacaaattaagacagaactataacatacatggaaaaatatatttcctcatatagtgttggcactatctccctttttgttttgttttgttttcacacataaaatttgtatataaatagttgtatagatgtgtcttaggttctccatctctctcaaatatctctcttgcatcgtcaatactataaaacacaaaatctaatgatcatgccattttcagaaccccaagaatgtgcggtttgtaagagagtcttcttatcatcacaccagctgatctcacactacaacgccgctcactccaatcgccagtattccaccttctcttcctcccccgccgccgccgccgctgctgcacccaccaccttccgccactacactaacgtaaacggccggaaccctaatcctgattttcaggcgaggaatcagtttgacgtgaattattaccgtagaggttacttagatgatcaagggaggttccataaaggatctcctcaggcgccggcgatgagtccgaccagaaaatataagtttttgctgccaaagatgccgccgacgacgatgccggagactccgaaactgatggatctttttccggagacgttcatcaggaggtacccgtacgctgccgcttctttgccagctggaccaatggagaccggaggatagcgctgtggcggagaacggaggagccaacttccagtcccatcgacttgtcattaaggctgtgagtctgtgactctttggtagtacttgtccgtttcaattaattaataaaaacaagaaaatatatgattctcgtctctcgatcccaaaatattagggctttttgagaagtatgatgtcttttttgttgttgttctattgttatttggactgattagtgtattatacatgtatttcttctaagatattattttgttcttcattttgcattatttcttcttgttatatgctattcatcatgattattataaactcaaatggatataacgtgaatatatatatccaaaataatagccacaaacggtcaaaccaaacaactcttaagacttggcaaatacatatatgaatggatacgtattaatcataatccgatgcaaagtttcaattctttactcatgaatccaccaatttaagagctttcaatctctcaacaccactccgatttattaatcattatgaaatcccaaaccactttgcattacaacattttttttctttttctttttattacaactttgatttcatggaattgttcttttctctttcctgtcgtggttttttttttctgtaaaacttgaaacaattatgtatgtaatgaaagactaccaatatttttttgtattgatggtctcgtctccttcctctcatcaacccgtaaaatcctctcgtcgactagtttttttttgtttttgttttttccccatggaggattgattgagtaaacactacgttgcctcaattatcaccaacaaaaactcaaaataagattagttctatttataaaaatatatatataaacagtaaaaataaacaccttgaaaaagttttttttgttttttttggtaaataaagtttagtgctctccctcttcttcgcaaccaagaatttgtctgaaacctaatctctctcttttctctctccctttccaattcttttctcaattatttccataatgaaaatcaatgctatcaaggttcgaattctctgatctcgttcaaatctttgtctggtctggactgtttcaatgtttacagacatctgctaatctgttaaaaaattccattcaatggttgatttgttcttttcgtttc

SEQ ID NO: 61329 - DNA, 606 bp, Arabidopsis thaliana landsberg
ccatcactgccgcacgtgtggtatgtgtgtattggacatggatcaccattgcccctttgtaagtttcatagcgttttcaggtttctctttagttattacatatatcatttttacttaaagggctgaatgtagagtggctttttgagtttacgttgtgtggtgataggaatgctagacttgtaccttgttcatcattttatctcatacgaccctctgatcttccccaatcatagagtcctcggatactagacttgtttgtcaataccgtaaatattagtgttcttaattaccggttaaggacttaatgctaatgactctccttgtgttgtatttgcagattgggaactgtgttggtgcgggtaatcacaaatacttcatagcattccttatctcagccgtcattagcacaagctatgctgctgttatgtgtgtgtataccttgattcatatcttgccacctattgaaaaaggagctgcatatgcatccgatgtggcccatgtggcgcatggtaatagtatatcgattctgagagtggtgaagaatatatgtcttacttacatagccaacgctgtcttcatctctgttcgaagccttggtctagtcta

SEQ ID NO: 61330 - DNA, 1078 bp, Arabidopsis thaliana landsberg
  unsure (1)..(1078): unsure at all n locations
ctccagggtgggttccataaagaatatttgttggcttcccggcacatttaaaaccaccgagaataaatgttgagagcgttcatatcgccagagtagctgttgtaacagaatggaaaattccgcaagccaagctgattgaaaacaagacgggatatgcagcccaaatcccaccacctgaagttttttttatccaacagagtatttagcagggaacgaaatataattttcaaaattatggtttacttattcagagggacttacatatcacaaagagcataagaactgcaagaataacgacaaaacaccggtcacggaaacgtctcaacccaaagcttttggtttcaggtctgactggattctgattcgtgattgcaccacaccatccacacttaaaaacaggtgcatatgatggaagaacaaggtttagcccacagccccaacaaattgcttcataatcctcatttatggttgcaacaaaacttccctagagaaaaaaaaaagcaaacagttataaagctatttcacagttatctctgttaaacctatgctgcaagaaaacagtcccactatgcaagggtcactctactattagatgaccacaatgtgtaaacactaacacaatccagcttcatgattgcctacactgtattatgttctcttgaacagttctctactagctaccaatgattgagaggttaaaacgttccctttcttttttaccattcactaagcaagtattatgaaaagagaaagctcaagtaaaaaggttttgcatcacatatataatgccagatttgatatcaacttgatctcctaagtcctaaatcactaaatcaagcaagcatgctgaaactggccaataatttcaagatacactaaggcataacaagatgaaatcgttaagactatgtagtgatgatgggtgagactagagagagaaggatctactaacctgggaagaatcttccatagctggttacaagaaaggtttcttcagaagatttgatgagagttaacaatcaccaactcaaagaaaaccaaaaagctctttntttttgtaatgaaatcaaaagaatca

SEQ ID NO: 61331 - DNA, 372 bp, Arabidopsis thaliana landsberg
gccaagacaaggagggagcagaacagggacagaagacaaacccaagaccacgaagaggacaacaaacggcaacaacaacgaagacaaccagaacacaacaaaggaagacacaaaaagcagaaccgcgcgcaccgcccaaaacgaggaagaaaaacagaacgcgacaggaaaacacaacgaaaaccggacccacgcacagagacacggaggaagcaacccccccacgccgggagagcgacggaacacacccgacgacgaaaagagcaggaagcccacacagaagggggcaccccgagacaagaagacaaaaccgaacccaagaaaaagagaggccaaaccaggagggaaacaacaccaaacaaaacaaaacac

SEQ ID NO: 61332 - DNA, 1671 bp, Arabidopsis thaliana landsberg
tgctcgatccaacattttaaagtacttcttctttaactttaatctacctgtagcgtttgaaatttcaattacttataaccaatagttgaaatttgacttttggtttaactattaactattattctccaaagatatgcttcgcttttcttctaattgtaacattatgattgataattttcatgcaactccttttctctagatcgtaggtaggaggatattaggttaatttgactacgctagagatttaaattagtacgctttcgaacaagtcaaaagacaccatcgggttagccactaagaaagcaatcatcatatacatcaattaattataatactacttatatacctgcactatatacactcatgcataaaaagtaaaaacgattctctctttatcaaatttagattctggatcgttaaaaagtagtaaaaaatgagaaaacttttacaagataaatttgatgagtcaccctcatcatattatagttagaggctaataatatataaataatgtcaaaacaattttctctatgtacatattattacagagcgattacatatatcattcacaactttagtcattttgttaaccctaatataatgtgatatcaaaacggaatattaataacgttatacattacaatttttgtaataaattttgattttaatcactaatcagttacttgttgccattatattgatcggggatcccttattgataggcccaatatgaatgagctcagttatattttgggttttttctcatagcataaatggcccaatgaaagcctattaagtgatcgaaggtcagacgttggactccttgtatgaaaccaacagactaggcccaaattatcaactcaaaattgaccgtaacatatacggcgccggttttgtagacctgagtgtgataaagtgagctgttaaatcttcacttaaccccatttttaatcacgaaattagagtggtgattaaaaatacaactaaagttgtttcaagtgattgttttcaattatttaaattttaaattaatccaacttatcgttgacggaaaatttgggagagaatattctcgatgggaaaaggaggaggttgtgttccgagcaagaagaagaagccggccaccaccggcgatggtcccggaatcgatgatgataacgacgctactaatgctccgatccaaattgacgatgatcaaaccaccattgacggcgatcgaacaacggcgacgaatactgcaggaacaacaacaccagcgattactactacggctgctaagatctcgtcaccgctcaagatcttcgtcgtgttctattcgatgtacggacatgtggagagcttagcgaagaggatgaaaaagggagtggatagcgtcgaaggagtggaggcgacgttgtacagagttccggagacgctttcgcaggaggttgttgagcagatgaaggcgccggttaaggatttggagattccggagattacggcggcggaattgacggcggctgatggatttctgtttggatttccgactaggtatggttgtatggctgcgcagatgaaggcgttttttgattcgacgggatcattgtggaaggagcagagtcttgctggtaagcctgctggtttctttgtgagcactggcactcaaggaggtggccaagagacgactgcgta

SEQ ID NO: 61333 - DNA, 738 bp, Arabidopsis thaliana landsberg
catcaccacgatctcactcaggcagatcaggctcagcacgaaagccacgaagcaaccgacgggtgcaccaaaggtcatcagcatgtccatgctcagctaccaccgcctggcagagtcgcaaccgaaacggtcatcacgccaccggcgcgaacctcgtccatgaccttggtcatgatgccggtctcggcacccttgtccgcggtgatgacgacggtgtcttcaggacgttcgctgtgcatgcgctcgatgatggcgcgcacttccggcagggaaaccttgcgacggtccatccagacttcaccattgggctgaatgccgatgatgatgttgccggagtcacgatgttcgcccgtcaacgcatccggcttgtgcaccttgacgccggactgtttgacgaaggacgtgatgatgatgaagaagatcagcaggttcaggacgaaatccagcatcggcgcaagatcgattccgtgatggctgtctgcatcgttatggctacgggctcgcattagtgcttcgtctccgttggagcgatagaaacgttcctgacgccgcccagtcgtacaccgtccatgacggtcaccacggtgccgaccggcgcgtggttattggcgaccaccacaaacggacccgctggctttttaacatggaaacgttcgagttggcctgcaccgcgtccttgtcgatcaggcgctggtcaatggaaatgtcgccattggcatgcaccgggatgaacagggt

SEQ ID NO: 61334 - DNA, 548 bp, Arabidopsis thaliana landsberg
atgtattgctttactcacatgccagaagtgttagattagccgcaggatttgcaaaaactggaatgctttatagttgataacttattaccgtaagagagagaaaatgatttagagacgggccggtttggattagaaacgtcatgtttgaacagccaccaaacagaccagtttagtcaggttttgtctgacaaaagacaatattttaaagttcttgggactgttaagtttccgccaacacgaccttcatgtaacaacgcaatctcaaagtgatttattgcagctcttgctctaccaaacacttttcttagatcacattgaacactgagcaaatcatcttcccctaaacagaggagatgcaaaagcaagaatctgtgaatggaatattcaacaaaaatgaatgaaccaaaagggagatgaataatgataatctggaggatgtatcgttaaacacaaacactagaggataacagagaaagaaaaccattccaaagcgacaaatattaataagcacgcaaacttaaaaactaccaacttgataggaaatagta

SEQ ID NO: 61335 - DNA, 1640 bp, Arabidopsis thaliana landsberg
ggtcctatctaccatgtaaaatgatggtggaggtgaggaaggtgatgaaaatatcttggtcttctctgccatgacttagttccacttgaatcttgctttcctggatttagctagaaacaaggtcggattcaaatttcagatatatataaatcgagattttgattcgagaataagaaagctaaaatcttactgtgagggatggatagtagttgaaccgtgagttctcccccctagactcttgagatgaaggtaaacgtgtaaggggtgacactcttgactctagaaaggtgagagggaaacgtgtagtctccactaatggtttcgatacctttattaaaattacaacaaagaaaagagtaggaaaaaaaaaggtgatatataagggttcttgttaaagaatctattaatgtatctctaaagaggaatacaaaagtttatgattatacaaaagtattttaaccaacgaagatgctctaactatagtcgagagcaattatataagtttttattttttttctttgacagcaactttcttttgtttttaaattttatattttagtggttaagccgtagatgtggacatttcaactactatactcctaattaaactcaaatcacttcatcagttcatctttttttttttttctatacaatgagtatttaaattagtgatactaatccacaaggtgaaattgtattacaaataaccagatgattttccacgctttgtgtaaaaatttatgtaacaataactgatttcagattgtactcatgaattatgaatatgataagtgacatgataaaggttcatggtcattgtgaccatgatgtgctaaacgataggtcgttataattgatatatgtctaaccacatgtttgaaggtcgtgataatcgagatgagttgaaccatgggtatgaggattgccatgacctgagatacactgggatatttaagtatgagacacacgacaactcaggatgcatgctttagtttggttgccggaaaaaatctaaaaattattcctctaaatcaggttataaactgatcaagaagcatcttgtgcactctcaacaggcaccaatgtgtggcaagtaaaaacctccccgaagctcaaacacttcctgtaaaagattgcaaatggatggagccctcccagtggggtatgaaaataatctctatcaatgccaaattgttagagaacattatggatagagattattttggttgggttggtatggagggctcaagtgtcttgatgactttatgtacttttcttgcttttgatagctactcagacagattaaaccgagacacacgaagaaaaatatccctattgaatgaagtgtcctactgtccttggactctttgtgtgtatgcaggttctgtaacgtcctttcgtgtgtttttttttaattcccaaaagtacatttcatgaattctttgtataacatcaatcttatctaaacaatattgaatttattttacttcaatagtttttctaagacagcctgtaatggtcattgatctcattgactgacagtctagttgtcgataattatatattattttttccacaaatttgtcgcctatcacatgacgaagattcctcaaaattcctgacaaatattccgttttttt

SEQ ID NO: 61336 - DNA, 197 bp, Arabidopsis thaliana landsberg
cttgatgccctcgcggacgaaggcctgggtgttggcccggccaatgtttgcggcggcgccggtgaccagggcgacctggccggaaagcagctgactcatggactgtcctcgaacggatggagaatcgtccgagtctagccagcagcgggcgcgggcaaagcattatcaggccgctggagctcgcattatccgggcga

SEQ ID NO: 61337 - DNA, 1413 bp, Arabidopsis thaliana landsberg
agccaaaaggagaatgttgacgacggcgactggaaattttctctctctgtattttcccgaattttcgggtttattttcaaagtttctccaaaagtgggccattttttgtggttaggcccagataagtctatatgacccatttaaaagcctcacaatgttcgtttctctgttgggacaaaaaaaatccctctcaagtcaaaaccataaataaaaatcaaactaggaatttcttttttgtttttgactcaatcgtgttttttgtttgagtgccattaattgccataattatgttaatctcagattcagactgaatgtttgatagcaaagggtagagactaagagagaaccaggacttagtcaagcgtaaaaatctttttgggtggttggtcgtaatccaccaaaatttggtaagctttcaacgcgttatctcaataaaagtattaaccacttctttgtttctctctattgtctacactaaataatatatacgtttctataaaaaatcctaataaatttgataaaatatttactaatttcccaacaagatatgtttatttttggtatcatttaaaacatgagtccggccgaaaaataagtttatcaagttaattgtctatatgtgttttctagtctgccttattgtggaaatcattcatttgcatttcttcatataccttacatgttgaaaagaatttaccatcttattattactcagcatttgagtcatagctaagagaagaaacaggcaatgaatgtatcgtctgaaagaactgtatcagtggtgcgggtaatgcagcctagggttgggaactggaaaatatggtggggattgtggtggagctgactggaacataccagcaccagtgtatggtggtggtcttcctggaaaaaaactaggaggagggtatggtatgggtgttgtgaagccaggcactgcttgtggaggaggatacaccattggaggtgacattgccgcgttaatgaaaggcctggcattgccattttcatttcctactcctcgatattgccagtttggtatcgccataggctcaatctttgcgttcttgcttctcttatttccaaaacacattagaagacaacactttgttggcttcttctttttcttctccattggcttgttttggttttgttccggggttctaggaacatgggaagagtagttgtctccaagaaaagagactagttctgcctttttgccccatttcgtaagcttatgaagcaatgctgatgggatggcatcacctgtgactgttaagagcccttgttctgcgttatactcaactgaactgacccctgattcaaaaataattttagctggaatatttataacatcactataactttaacaattttacacaagtggatttttctccctagacatttacagccttt

SEQ ID NO: 61338 - DNA, 726 bp, Arabidopsis thaliana landsberg
cagtcagactggcgttgtcctgcacattcaaggtgcccacggccgcgcccacatcgcctactttgaagtcgttgttaccagtgaaattcgccgttctctttcaaagtcatcgtgccattgtcagtgccaccgtgaccgatgctgcaatagttgttaagattaataaatccggaatcaagcgttagcgcgccgagactcacaaacaggtttccagaaaaggcgttgctgccagtcatcgtcaggacgccagctcccgtcttggtcagacccagtgcgccggtaacattgccggcgaacgcggtgtccgaggtgtcgttgactgtgagcgtcggcgcgccggcggaaacattgatcggactgttgccggacaaattcgcaaacgtctggctggcgccaatgttcaacgtcccgttggaaataacggtgttgccggcgaatgtgccgggcacattcagcgtcaccgtggcggctccaactttggttaatccgcccacggaattgatctgtccggtgccctgaaaagtgtaagcgaccgacgagttgttaatggtgaccttggccggactgaccgtgttgctcaacaacaccgtgccactgtctagatcgttgaaagtaaccgcgtcacccggcggcacggtttcgatataatccgtcggcaaactgccgatcagccaattagtcggcgtgttcaaatcccaaaggttgggcgatacactgttggttcca

SEQ ID NO: 61339 - DNA, 1373 bp, Arabidopsis thaliana landsberg
cttggttcggtttcaggcgctagcatttgtagccattactgttttgttttcttaatctttattacatgggtttttacatcttgctactgcctctctcaaggcaatgaccaatcatatctgcatcataacctttgctgcagaactttggtggggaagaagatacgatcttttgcggtgtatttgacggtcacggtcccatgggtcacaagatttctcgtcacgtatgtgaaaatttaccttcgagggtccattcaaaaattagatcttccaaatctgccggcgatgaaaacatagagaataatagttcacagagtcaggaggaactcttccgtgaattcgaggacattctagtgacattcttcaagcaaatagacagtgaacttggtctcgactctccttatgatagtttttgcagcggtacaactgctgtaactgtctttaaacaggtaaatcagcagtctctaaagctttatgagttttttaagacagttgatcaaaaaaaattgaaagatgttttgtcaaacattttgcaggctgactgtttggtgatcgccaacttgggagattcacgagccgttcttggcactcgaagcaagaacagtttcaaagctgtccaactcacggttgatctgaaaccctgtgtccaacgttagcatcttattattttcttttaacttagggcctaatacctctttgaaaagtaccaaatgttgagttgggacatacaaataaatctcctgaagaacttttcgttttgatttctgtaaacaggcgaagcagagagaatagtgtcatgcaagggaagggtgtttgctatggaggaggaacccgatgtgtatagagtgtggatgcctgatgatgattgcccggggctcgcaatgtcgagggcttttggtgatttctgcctcaaagactatggacttgtctgcattcctgatgtcttctgcagaaaagtcagcagagaagacgagtttgtggttctagctactgatggggtaaacaacttgacagctttcagttttctgacaaatgcattccctactaaatggtttctgcgtgttcttttgatgaacagatttgggatgttttgtcaaacgaagaagtggtgaaagttgtaggttcctgcaaggaccggtcagttgcagctgagatgttggttcagcgagccgctcggacttggagaacaaagtttccagcctcaaaagctgatgactgtgcggtggtggtgctttacctaaaccaccggccttacccaagagaaggaaacgtgagccgagcaatatcaactatttcctggagatcaaataagagcaataacgagtgttatggagccgcaccattgtcaccattgggtctatcccaaagggtttcat

SEQ ID NO: 61340 - DNA, 289 bp, Arabidopsis thaliana landsberg
cgaagattcatgtagtgatgcgggaactaagtcccagtgtgattctggttaagccgacatctttcttgcatagtgtctcatcctggaggcagacgtaatggtttttggttcaaggagtgtatttttggtacggttacaggatagtgcaatccatcttgccatgacattgagttttaggaagactagacactgtccaacataaaagtccgtgcccaaagacgattggcctgcgtccacagacagtttttgtgggagcgtccaggacaccatagacatgaaggactgaatt

SEQ ID NO: 61341 - DNA, 810 bp, Arabidopsis thaliana landsberg
ccatggtcacatagagagatgatcttgtagatgaggttgcaacacgagatgggtcaaaattccgaaaaatctattgatccttgttgcttaggaacaagtgataagtcacgttaaactgtctaaaaattaagtaatactatagtaaaatccaaagttaattaatatcaatttccttgtgaactaatcattttctatgcatagccttcatttcttttttgtagtcataattacattgcaccatcacttggtaacattcaccattatatagacatttgaactccaaaaagagttagggaagtgcatcaacctatgatgatcttttcgatctttcgcaagttgagatatcgaatccttcatttttactttgatatgtgttttcttttctctatgaatatcctggttttttttattttatgacaaaattctataactacatgcacatgcatttatgtacatattcgattcaatctttgacgctagacgaattgatgtgatctatttctttatatctttaattctttatagtgaatgataattatacttctaaagtgttctttaacctaaaatgagtgcattaactactcgataagagtttcttgaaatcatgcatgtacccattaacttaaaagtaaagctgtcctccttgcattttcgagacaacaaaactattattggtgcatccatagaaaccgttgatattccttcagttctccatgtctagcttttatctgtaggtgtttggaatgagttcttgagaaaagagacagagagtccaaagatctcttcatatattcctttaaataatatttt

SEQ ID NO: 61342 - DNA, 959 bp, Arabidopsis thaliana landsberg
ctagttatatatctttgatgatgcaggggcatggttcatatcacacctacaaaagctgactacgtgattcaacatgcgccccattgctgtaacatatggcttgtatgtaatggaaatctcatccaaacgaggtgagattgaggattatacttctgcatgttttgaattattgtaaagtttatagaaaattttctttgttgattagggagggacggttcgaacatgcaggttcagcgtactcatcctcaagcagccttcatagcattgattctgctctgataccatatgggggtgcaggaagagctgaacgtgttaccgagccacatgccttgtcatcatctgaagaacaatcagtatgtaaaccccactttggtcagcacatagcattttggaggattgttttatgaatttggaaccttgcgaattgcttaaaacctcacaaaaccattggagaatatatgaagaaattgaatagtgatatattggaaaatctagattccaacacctctccctgttaagccaaatatgtctcatttcctgtaccgcttgtcttaaaacatgagtttaatgtcaagtttactatgtgagattcttgtgctggtgttctataggcgattctcatttgttcaattgttaaacaggctagagggattgagaaaatgtattacgaggagcagagacggagattggaaattgaggaattaaagagagagaaggagcagcgcgataagatgaggcgtgtaagagaggaagcactctcaagttcttctggtgtcactaagatactgtacaatgaagaagtaatgcgcaagagagaagtggaggcggaactaaacagagcaaaagcagaaatagaagatatgaaaagggtccaaattgaacttaaagaacagcattatgctgattgccgtctgttagagaaagagcgagacgaagctatcaagaacaactgagagctt

SEQ ID NO: 61343 - DNA, 1132 bp, Arabidopsis thaliana landsberg
  unsure (1)..(1132): unsure at all n locations
ctgtttagatcatgtctttcgtttctaatcactttctttctcataaaagacgattacgattttgaatattatataattgactaagaanattgtcggaaacatctttgcagtgacttggtaagcgaacgatacatatgtatattcatgtgttgtttgtgtattatcttcttgttttggaaaaagagagaatttgtctctctgcgtatctatcttatagagaaaagtggagaatccatggcaaaggctttgaatgacgacgatcctgtttatgttgcagtaagcgaagacgttgatcaaagtagattgactttgttatgggctttgaagactcttcgagcgaaaaagcttcaccttctccatgttcatcagctcatttccatgaccccttcatgtaaaaccatctcttccctaagttcacttctcctttttgggtgctaagaaacttgttcgggaatgtattaatcaaaaatgttacaatttgttagttttctctgctttggtaatacttatctaaatgatgcaaatggttgcagctctgtgtcttgtatttgtgtttatgtgtggttattatcaagctattaatgattcctgattatttaggaagatcatgctttacgttcttgaatgacttttctcctaacgtttggtcttatgtttgtgaattttagcaagtgggctggaacaaagcgagatcgatgcaatccaggagttggaacagactagtagaaatgatacccttctcaagtatcatgatatctgcatagatgaaggagtgagtgctcttccaactagttgatacaataaggaagctagtggaatcttataacatattcttgtggtttatttgttttacaacaacaatttcgattataagctataacattttactaaatcttaatattgcaggttattgaacaagatgtggatatgtcatgtttttcagcaaatagtgtgggggaatggattgtggaacttatctatcaaaacaatatcaagaagcttatcatgggagcaactgctgattcacactactccgagtacgtatatcttcagtatcattctctgtctccagaacaacgctgataaacaattcttctgttctgcaatagtctatgtgatgcaaatatgactc

SEQ ID NO: 61344 - DNA, 627 bp, Arabidopsis thaliana landsberg
tagttctcctgcatttgccgtttctggttaatctctaagcacacgcaaatgttgtttattatgttgagaattgctctgcttataaatcaaaccaaacattgcattttggctctgaagattgaaggaactaaactgaagctacaatgtatggcttctacaggtggtgggaaaaatggatctaaaggttttgagaagagggttacatcaactttcttcattaggaaaaagaaaaacacaacaagtgatccaaaattacttcttcctcgatcgaaatcaaccggtgctaactatgaatccatgaggctacctcaggggaaaaaggctcttccagatgttgttacaacaaaagacacaatgagaaccaaatctggacgtgtttcgtcacaaccaagacgtgaaaagattgatgaatccggtgaacagtttatgaaggtgagatgttttgatgacagtgactccatttggttatctatagattgagcgtcttcgacgtctattttaaaggaacgcacactatctgactagtttcatttctcatttgacgaaaagatcatataggggggatccagtgagggtagcttttctttgctataaataaagaaccccccagctcaaacaaagagaatc

SEQ ID NO: 61345 - DNA, 614 bp, Arabidopsis thaliana landsberg
tgttggtttttttttttttatagttttaagttattatatattgtatttattcaattcttatcttattattacttgggatccttattcatttatatgttataattgtaaatactaacgtaccacatttattgtatgcttgcaaacataaaagaaaataaaaaaaaaattgattgcgactcagagcaatgataaattggtgacttaatatcttggaattatttgccaagtttatttatatagtcggacaatagaacgaacgaaccagttgagtgaaggaaataactttgtaaggttatagtgcttgaaattaatatgatattgaatgaacattgatatttggtggctgagctctatattttatatgttcttttcgataagcagatttaattattaactcaacatatattaaaaagaagacatttattgatattattaaaactcgaacaactcacaagtccttctaacataggaaggaccggtagatgaaaacgatcattagaatacacaatgacacaaactgataatatcctcaagaacatcttcaagactcttgctactcaattattttgtcccgatatataggattcaagatttggattcttgatcacctaaag

SEQ ID NO: 61346 - DNA, 304 bp, Arabidopsis thaliana landsberg
  unsure (1)..(304): unsure at all n locations
gcgcatggtgaacctaaaccgaccaaaaaacaacacaggaagaccggaatcgtaccaaccatttcggngcgttatcagaggaccaacgaccngaaaaagtgaggaagcgtggaagcactggagcccgattcctagagcccccaccactcagcaaagaatcggagccggttcttggaaacaagtttaccggctcgtcatgaaatataaaaaaaagagctgcagaagaagaaaaaaaactagtgatgagcagtgagacaaaacagctgccacctgcaatatttacttttctgaaatgggacttaca

SEQ ID NO: 61347 - DNA, 694 bp, Arabidopsis thaliana landsberg
cacctaaccactatttcccggcgcactttggtgtgcggtttaacttaggcattgaacgtccgcttctggttattccagtccttgacggacagtaagccatcgagcgtgatcgcggcagcatgctgactgcggtttactggaacggtgatgatgttcgacggaatgcgcacttgctgcattcctgtgaaaacggcccgcatggcgggccgttttcaattcagcgatgcgtatcgctcaggctttgccgtggaacagctcgcgaccgatcagcatgcggcggatctcgttggttccggcaccgatctcatacagcttcgcatcgcgcagcaggcgaccggcggggaactcgttgatgtagccgttgccgcccagcgactggattgcttccagcgctaccttcaccgcgttggtggaggcgttgagcaggcaggcggccgggtcaacgcgcgacttcacgccgttgtcgaactgctgcgccaccatgtaggcaaaaccacgcgatgactgcagcgcggtatacatgtcggccaccttggcctgcatgatttcgaaggtgccgatcggcgcattgaactgcttgcgctcgcgcacgtagggcagggtgatatccatcgctgcctgcatcaagccgatcgggccgccggagagcaccaagcgctcggtgtccaggccgctcatcagcacgcgcacgcct

SEQ ID NO: 61348 - DNA, 308 bp, Arabidopsis thaliana landsberg
ccttgcacccaaaggactttcacaagccactaatagaactggcatacaatttcttggacccgcatcgacaggatctaagccctgttcgacgattgcaaaccatgaactgcacgtaccttaacggcgacagacgctgacttgaactggagaacgaacatctaggccacattttggccacggtcgaacaccaaacgtggctagtatactagagctgactctggtggactcctaacgagtacccgattgagattcatcgaccatgcctatcactggtcgacaatatccagggcctgcttgtaaaagtcaat

SEQ ID NO: 61349 - DNA, 779 bp, Arabidopsis thaliana landsberg
acaaggatcctctcgtttttttcttcaacttgatgcaattatcagtcccacgaaaaattgtattctttcgaagtaaatatttaaagaaatactgtagaaggtcaagatgttaaaaatatttccctacatattttagacatattgtttggtatagtgtctataactgtttcttaggcaaattgtaacaacgcttagacgtctattgaatatatttttttctaatgttgttactctttagtctttaacttcttaagagtgtcaatgcatactagcacgtctcaagagcaaaaccgtaagaaactctctgtgttaatgtattaagacttttgtttgtttgtgtagtcttagtgagatggaattgaagaaagaggttgacgttacatttctttgaggctttgaatggtagttatatgttaaaactttaaacaattatggttatggagttactgatagtcgtaacacgtttatagtaaacaaattttggttggacacgtttatagttaattatgctacatatgtgttggcattaaactctactcctccaactcgcaagtgacaaatccgcaacacctaatctttagagtatttgcactaagtaaaagagaaaatagactagtagagcgttaatttgtccattgaacaatattgctcatctgtttctgtactcttttcataacatctttaaaaaaaaattgaattctacttcgttttaatttaccaagttaactcataattttaccatcaaaaacacagtctcaacctggttcatgaggaacggg

SEQ ID NO: 61350 - DNA, 285 bp, Arabidopsis thaliana landsberg
  unsure (1)..(285): unsure at all n locations
tttccgctgcggtaggggatacatctatgnnnnnnnnnnnnnnnnnnnnncgataattgactaattggtgtttgatacacagagcatagatacgagatattacgctggactacatcgatctaattaacgtacgagcatcactatcaactgttccataggacaatcgcataatgcctcatactggtttagtagaatgcacatattcatgcactaatctcatatacctatactactaactaggactcagtgacatttatgcgtacctatacactgtatgagtattct

SEQ ID NO: 61351 - DNA, 184 bp, Arabidopsis thaliana landsberg
acatccattcacctgctgacactgcttctatatacacaaaccttattgagaacactacacaacatcaaactattatagcctcaacatcttcaacctacacaaacaccacacaaaagtcccaacggccctcattcacttcatcgatgaagcaaataaactattgacccatcgccaccgcttataa

SEQ ID NO: 61352 - DNA, 1050 bp, Arabidopsis thaliana landsberg
ggatcctggacttgtggtttcttttctggatcttccgagagaggcgaatatcagcgccttggtactgagatttgggggtgaatgtgagcttgtttggctgaatgacaagaatgctttagcggtgttccacgaccatgcccgagctgccactgccatgaggaggcttgagcacggttcagtatatcatggagctgtggttgtccagagcggcgggcaatctccatcacttaataatgtatggggaaaattacctggcagctcggcgtgggatgttgacaaaggaaatccatggaggagagctgtgattcaggagagtgatgactcctggggagctgaagattcccccattggaggatcatctacagatgctcaagcctctgcgctgagatcagcaaagagcaactctccaattgttacctcggttaaccgttggagtgttttagagcccaagaaggccagcacatccactttggagccaattgctcagatagaagagagcagtagttcaaaaactaccggtaaacaaccggtggaaggctccggtgaagaagtggtggatgactgggagaaggtatgtgagtgagagcatatacccaacgactgtgattggttttcaacttctttgtgatgtatgaaaacggcagattgttcagacgtatataatggagactgtatgcgtgtgcgtatgctgtgatgagtccatttcaaagcttaggtgatagccaacgacgtgccgtttttgttttggcatctttggcgtgcgtttggtttatttatgtagtaactaaaaaaacatcccattgttcagtaacttcagttattgtgaaacggcatgtttgtaacgcttttttttttctcttttattcttgacataatgatgcaacactaaggttggttattcattcattagtactctttatcttgaaatcattttctcctctgcaattaacggttaggtgctgaaatcattaagaatagtgaaaaaaaaactcttttatgtgtcatattcttttttttttttttttttttttcataaaattcccaataaaa

SEQ ID NO: 61353 - DNA, 275 bp, Arabidopsis thaliana landsberg
  unsure (1)..(275): unsure at all n locations
ggtcgctattggctaacaccgnnnnnnnnnnnnnnnnnnnnnnnnnnnnnnnnnnnncactaacgtagaagcttggtcacgtgtagtcatctgattccgtgccctgctcgcattggggcatgacactcgatttgaaatgctctatgcctctgcggcgtgaactataacttcaacagaggcacacatgtctaacttcatacgagcttaagacataagatgacatgatcgatctcgtcctcatgctcttggcattgccagagaaacgacgtgcctgg

SEQ ID NO: 61354 - DNA, 643 bp, Arabidopsis thaliana landsberg
acattaacattaccaacaaatatgacttcagagaaaatatattcatatcgaactcaaagggagaaaaaaatcgacagatctttaaagcccaaaagaaaaaacacgaagatgaagaaagagacgaaaaaaaagacacttgaaaaatagaatcaaagcgatccttgagagagaatctacggtccttcaagttttgaaaatttgattagaattgtttctctgattttttgcagaaaatttaacgtatgaaacctcaaaaccctctcatatacgttacctaaataacacattaactattaattctcaaatcaataaaatatctccagtaattaagttaagaacacgccaaagaactaaatccaatttattcacgatcatcaaaattacacagcactcaaaaacgatttgagattgtgattgccaataagaaaaagataaattaaagtaggcaaaaaaatatcacgagtaagaacgtgttttagaatattcgaatggtacctttaactctgccacgttctcttctccttcaaaaagaacaaagcaaacaaaccaaaaaaactaattaagaagaagaatctgagtctaaagaggccatggacgcacaaaaaactaaaaaaattctagttgtttttgttcatctgttaaa

SEQ ID NO: 61355 - DNA, 798 bp, Arabidopsis thaliana landsberg
gttaaagctggcagagatcttggaatcatataatctccaaaatgttcaggtaaagtaaatgagtttacttatagaaacacattgctttggtacttgatacgcttttcttgctttgaatctggtgcctatattttctgaaacattgttttttgtgtaggctctaacacgagctagggttccaattgtaaaacttatggatccggttactgggatatcttgtgatatctgcatcaacaatgtattggctgttgtgaacacaaagctcttgcgagattatgctcagatagatgtgcgtttaaggcagttggctttcattgtgaaacattgggcaaagtcaagaagggttaatgaaacttatcaaggaacactttccagctacgcgtaagttctcctccacactttgaagtgaagttactttggattgcaaattacaatcattacttatatttgatacttttgcaggtacgttctgatgtgtatccatttcttgcagcagcgtaggccgccaattcttccttgcttacaggtgtgtataataacatcctcctaaaatagtgtactgattactgaatgctcttcttttattgaagttattacttgatgcaggaaatggagccgacttactcagttcgggtagataatatccggtgcacatactttgataatgttgatagactccgtaacttcggatcaaataacagggagaccatagctgagctggtctggggattctcaactactgggcttacgctcatgactatgcgtataatgttgtatccgtccgcccggttcaatctt

SEQ ID NO: 61356 - DNA, 705 bp, Arabidopsis thaliana landsberg
tgcatcgcagtaaataatacatggtggattttgtttatttattcgatataccaaagtaaccaatagtgagggggcatgaaacatactcagatcttcacaattataactctctgtatttttgtcgtggacgatgtgtttcgagtagaatacagatcatagtgaagaaaaacggtgggcgattaaatggaaggaggaagaagtgatgtaagtgagatctttggatgatacaagaaagatcaaagtgtggtagagagagtatttgaagaagtcggtggaaatatgtacgtgaagaattatagatataaataggataggaccataacttcgcaatcgtgcgtacggggaagacgaggactcgtcatgaggttgactcttcatcaaccattaacaactcattcgtggaatacgtctatgtagatatgactatttttggtttagatctatatatgtcccatctaattatttctgaattcacgtaaagtcatcaactaaggaaatagtgaaaaaaaatttagaaacaaatccgaattttttagcccaagaaccttcaaccattgattttaaagcatatacaaagtcttttcaaacatggatttatgttttgttcttcttgtgaggaagaaaaaaaacccaagaaaaatgtatcgagcgtacatacatttttgctcgaattaattctaacttcatgagtatgatgagcccaaa

SEQ ID NO: 61357 - DNA, 337 bp, Arabidopsis thaliana landsberg
tccggcaagcccttcatggtggcgcagaccaccttcgaggaactgcccggcggcaagacgaagtacacggcgcgcgcgatgcactggaatgccgaaacgaaggccgagcacgagaagatgggctttcaccagggctggggcgccgcggccgaccagctcggcgagctgctgaagaccttctaggcgcgccgctcagatgcagcggccgccgtcgacctcgagcgccacgcccgtgatgaacgcggcctcgtcggacacgaggtagagagcggcattggcgacgtcgagcggggtcgacaggcggccgagcgggatcgaggcgcggaactgtgcgcgc

SEQ ID NO: 61358 - DNA, 801 bp, Arabidopsis thaliana landsberg
  unsure (1)..(801): unsure at all n locations
gttctctataggaaggagatgaagtctctctacaaatggctccaacacagcttcttcttcaggaggagcaaatgccatacatatgctcagctcttgtaccgcctctccatattgcctgctccacaataaaccatatctcaacaattcaagatcttctatttgatcaaactaaacagaccaatactcacagaaccgggacaagcaacaaagaaccacttaatgtaaggatttaaatctaagttaactgtacctgtcgtagtacagcatcataccaaggtctctgcgaagtgcccagttatgaggttgcaaaatcaacaacctttctgcagccgcaatagccaaccttcgatcagcagaaaccgaatgtgaggcagagaataatactaaagggtttataagatctttgttttttgaaaaacgtttttacctaagatcttgaggccgcaacaatgggaaattagaactactgatgttgttaagttgactaagaggagaagtcagcataagtccatgggatgacttagaagcacgtctccagtgaagcctctgaaaatgatcaaaaggcacaatatataatttctttcaatatgaaatcttttggagtcaatgatttgtagtttagttataagtgataagggcttacaatcaaaatggctagagcaatccctataatgtctctgtttagtgccatgtcgaggtcttgaagtgatnttgcagttaaatctgatgccattgatccaagatcatcaacacaccttccattgacaatagagaacaagctctgtcctgaagttgctttaa

SEQ ID NO: 61359 - DNA, 556 bp, Arabidopsis thaliana landsberg
aaaggccagcgcgccatgggcacgcatcgaggtgaacgcggtatggcccggggtatccacgaaagcgatcacgcccttgtgcgtatccacgatataagcgccgatctgctgggagatgccaccggcctcaccccaagccacctaggtactgacaatgtaatcgagcaccgaagtcttagccgtagtcaacgtggcccatgatggtgaccagcggcagacgggtgctcttctcatcatccactttgacactatgagtataggcggtcagagccgcctggaccatattggcgctggcgtttaactaagcatggccaatttctttgatcaccacaaccctagagtcactagccaacgcctggttaaaggtgccatcagagccatctcgaacacggccttgaccagctcgcaaccatcgacccttatctgtgtgaagcaggttcagcaacccgtttacagtcgacgaggttagaactgggaacatccgagcccagcccttagaggcaatccttttgcccaagacacggatccattttgccgacttttcttgcctacattg

SEQ ID NO: 61360 - DNA, 2193 bp, Arabidopsis thaliana landsberg
  unsure (1)..(2193): unsure at all n locations
tacttttatcccaaacgacactgatttcattgataatggtgagctgaatgttgataaggttgttttgactatttaggcgtgcattacaacttaaacttgtgaactagtttttgtccatcacctgattgcaagcttgtctgtcgcaggacgaattcatataattaccgggcctaattactcaggaaagagcatatatgtaaagcaggtcggctttacttttctaagtcttatttctcttcgttcaacnnnnnnnnnnnnnnnnnnnnnnaattgaccactcaagttctgacttgctatttgtaggtggcgttaattgttttcctatcccatattggaagctttgtaccagcagatgcagcaactgttggtttaactgacaggtctaacgtcatacattcctgttttgatctttttacaatcgctttttatgtatattttcgttactaagattagtcgtactacaacaggatcttttgtgcaatgggaagcaagttcatgaccgcggagcaatctacattcatgatagatctgcatcaagtaggaatgatgctcaggtattccaaactgcttctatttttaacttgatttcaattagctccactactgataggccttgtgagccggtctcagtctcttcagtcagttagtgacttctagttcacgaggtccattatttaagttcatggggacccaagaatgaagatatcaatcaaaattcaactgtgcattgctcatgacttatgatcgtgttcctaatcattgtgaccgatccaaattctccaggcaggcaacttcaagatctctgtgtctcttagacgagtttggtaaaggcactcttacagaaggtatggatttctccgccctctgcattggcataaaaggcatgtgtttgtgaaaacttctgccttacccacactcttttttaagtacagatggtattggcttgcttggtgggacaattagtcactttgctacacgtgctgagccaccaagggtaccgtatagcgttctcttgtctgtctctaagcttgtagattcttttagaaccctaacatgacattgcctattgctgcatgctttcaggttgtagtatgtacgcacttgactgagctacttaacgagagctgcttgcctgttgtatgtactccgactcaatttcagatagataactcagcagattttgaagtggttccttgcttatagtgagagtctatctttttttactttttcatttcagtctgagaagattaagttctacacaatgagcgttcttaggccagacacagaatctgcaaacatggaagaaattgtttttctttataggtatggagtctcattgactagcattctacctaaactgcctacattcttaagacttccatgttttgaccaatgattttgccggcaggttaattccgggacaaactttgctgagctatggtgagcatttttgtcctttgcgttattgtctacatgatcttcttgtgtatacaccgagcttcatcaaacctatttatgtaatgcaggccttcactgtgcgctactcgctggtacatttaggaagattactaatatctttaatgaattgaatacaattttgatggatctatgttcgactgtggattatagagtaacaaaagaaacttttcactattgttcatgcaaggtgtcccggaggaagtcgtgaagagagcagccatcgtgttgtacgcctttgagagtatcaacaacgtcgataaactaagccttgacaaaatatcgtctcaagatcaagcattcaaggtctttttgctctctctcacttacacaagctttgaccccctttatcttcttctgtcctctcaggccttaccaaacttttactgatttcgaatgaaatttgcaggatgctgttgacaagtttgcggagcttgacatcagtaaaggtgacatccatgccttctttcaagatatcttcacttcctaaacccttacttaaaagtcaagatcaccgtatacaaaatgtaaccaacgacagtagatttttaaaacggaagccagttttgtattaaaatagaattacataaaactattgtattggttggtttagatttcttcttctctttaaaagaaaaaaaccaaacaaaagccacactcaagtgtaccaaataaaaccaaaaccattttgctatactcttgtaaacaacaacttag

SEQ ID NO: 61361 - DNA, 427 bp, Arabidopsis thaliana landsberg
  unsure (1)..(427): unsure at all n locations
cggcaggcggccgcgtccacgcgcgggtcgttctcggtgtcgcgcgagtgcagcaggctgcgggtgtggtaggagcggcccgacagcgagcggtgccggtccacgacctggccgagctggtcggccagggtgccggtcaccgcgcggtagcgcagcacctcccgtgcgccctcgccgccgtcctgcggcaggtcctcgggcagctcgatgaccgccccgtcgccgtgcggcacgacctgcatcgccgcctggacgaccgcggccagcgcggactcctcgctgtcgagggtcgccacgtcggcgtgcaggtccaccaggtgccgcagggcgccgacctcgcgggccgcggcgcgctcacgcttggcgtgcangcggttgagctcgatctcaagcggtgctgggagttcacgtcgaccacctggcagat

SEQ ID NO: 61362 - DNA, 1405 bp, Arabidopsis thaliana landsberg
cccaccaaagagttctcctcctaattaattggatttaattagtgctgaatctagtcgacatattttacatattatacaattatacacatatcaagaattttttttttaagtgttcaactttttttgcacattaaaaaatttgttacaacatttaataaatatatttttcctataagttagccaaatttggtatagaaaaaaaaacaaaattaaaattccatattagtattcgaaaacattttaaaaaatgaatatgttattttacatcgataaagtcggcaagtaaattggtgtagcacgtaagttttgacttactgtaatctaaaccatgtagtcttggttttgtttcgatgactttaagtaatttgtctataggttggaatttgtttggtttccctccatacgacttttgttttgttttaattaaagaccaataagtatcaaccacgtaattgaaaacctaatacacatgtagttctcaaaatatatctatttgctttagtcaatacttaatctatctctagatcttatacacacctttctctttcagcttatgtctgaagagattaaccatggttgatcttagtcatatgtatacatgtgtacacacgtatatatacatgcatgaataatcaaatacgtatttccaatagtggcaagttgtttattttaataatgcaatataaaacacacacttgccaaaagtatatgttaaaaaacgaatcgttacaaaaagaaataaaagtatagtccacttggaaataatatatccatcccacttgctctttttcttctgacaaagcagccatgatggcctacccctgctgacatggcttgatcatggtcactattttgatttttggatacgcctacttgtcattatatataataagctttattactatagtgttagttgcaagtaataatttatattatttttgtgcaatttgatcttcggttcattgcatatgtccggttcacattccctgtaatccatgtgcgagccccaagaaattttaccccctcttgcattattatatacatactactttgtatagtatatgatagtaattggaattcgaatggtgaatatttctaagattctttttcaggaatccttattctctaccaaattggcgataattaaaatatatataagtagagagactagagacaaaggaaggggtcctcgagtttcgaagacgacccattctcttcttattttgtactaaagatttttaaaatcaaactggttattaaaatactgagataacaagttataaacctacattacattctttctttctctttcaatctaaatttgttgatggaagaaggaacaggtttttctctaggacggccaaacggaggccacggcgcaggaggagagcaagggccgtcgagg

SEQ ID NO: 61363 - DNA, 652 bp, Arabidopsis thaliana landsberg
gcctctttaatttcctctgcatactttatctctctctcgtgtgatattgaatccgtatcctcaacagtatcctcctcctggatgtcctctgggttaagtccatcaccttcgacatcttcatgcattttcacttcctgtaactctcctgataagtccatagctgtactattagcttcagtcaagtgctagtgaagattcttgttctggttcttcactctttggaacaaggttttaacttttcttaacttattttcaaggacccgtatccttttcttcatggtccatggagtctgatacaaaacatgcctggtctttctctacatcacggatatggccctgtaactcatttgactctgatcttaatgtctttaacaaagccttatgatacaaacctgttgtttccagagaaaccactttctctacaagctcatctatcttttctgcaaagtcaacattactcaagttctcattcaaatcaatctgtctcgattctttcacagattcataactcgattcttgaccatcaaaagctttcttggcttgtccttttaccttaatctcaaactttttcttgagtgcttcacacctttctgtggcagtactcaatcctttccttctcaattccggcgtcttaagaaaatcttttttgcgt

SEQ ID NO: 61364 - DNA, 107 bp, Arabidopsis thaliana landsberg
ggataaaatggcggcggaagatgttatatttataggctgacacgtaaaacagaaagagaggacgacaacccactttccgaggtgacacatgcgactgaatggttcgc

SEQ ID NO: 61365 - DNA, 1419 bp, Arabidopsis thaliana landsberg
caattaatatcagactggacgttggttttgagctggtcaaaaatcatagcagatgtgacccaagctcccaaacgtgctgcgtaaaccccagctctgtaagcaggccagtagtttctctccattaaaatctgatttgaacagtcaagagaaacgattccatagttaactatatcagcaacaagtgatacgcctgaatttcctgtatcatcattcacagagaatccccaaagaatcggggaatgtagtagcagtgtgaatatcatttgtgtgtggaaatcaatgaagctgcatgaacttacaaactcagtgatatgcttcaccttttcataaatttcagacaaaagattatcatctccctcgagattttccaagaacactatcaggaacttgtgtattgatgctagaaactctgacctcatgaccacccctcttttgtctttataattgataacaccaaatagcaattcatgagctccatctgcttttcttaagccatcatttaggctcacaatatacgttaagaataatctgactttttcaagaactagcagtctcagttcagaacgttttcctactaataggtggagaaccttcaagaggtcttgaacctcactaactacagcatagccagctcgaaaaagatcagaacataatcgccccagcaaggcgaccctgtccatgattaatacaacgagctgcatcggaagagatgttgaagatatctcaattgatcttttttccgctgtccgaactatttctgtccatatactcaccaagacactgatggctaaacaactgcttgaaaagatctgagaatgagatgcattctcagtaatagctatgagctgaagtaattcagatgcatcagtcatgcatagtttgtagacaactatctgcattcacatcaacggtaagtaagcatcgtcaatttgcaaaagaaataaaaatatttggcttatgaagtaccttctgaaaaatttgaagagctttaacttgcatatctgatgagagctcttcttgctttaataagcttgaaacacttgcaatatctctttcatgggcaagagagaagcacatccctctttctatgagaaagtggagacatctcaatactgcagctcgagcatgagaagttttatcttcacccagaaagggtatgataacctctgcctgcacccacattgaatactattatacttttctctattagtttgtttgtaatcaatagagggatagtttcctttcagagaaccaatgaaaagtgatgccttatttgcaatttatatcaaccaaccagtgaagactcaaactcagcaaaacagtggctttctattgtagaaattctattttcacaagggccaatattgactacaaaacatttaatctgtgtaaaccaggaattagtaaaaagtataaggc

SEQ ID NO: 61366 - DNA, 957 bp, Arabidopsis thaliana landsberg
aacttaacaaaatcacatttcttggttttggttttatgtttattgttgaatcagcagaatcaagagatcgggaacggacctcctccttcttctaatgatggcttggcgaagcgaaaaagaggtcgaccgcgcaaagatgaaaacttaactccaaaaccggacatgaatttggtaggcaaggtggttactggtgtaatcgaaggatctttcgacgcaggctatctccttaacgttaaggttaaagacagtgacacccaactcagaggtctcgtgttcataccgggcagagtcactccgatcactccagaaaacgacgtggctcctcttgttaaaatgtacggaagagaagatatcaagaacaaccaaaccgatcattctttccctactgatcaaccaatgcaagatgctgctgtcactactactgacatggatatttctgaatcctctcgagctttggtcctagttccacaagcgaccaatggccaagcgaaggaagctacgaaggatgaagatggagtcattgaaggacaagctgacactcggttagtggagttttttccaactccaggcacaatgatgatgactgctcaaccaaatcttgtcttggtaccgaaagagacagaacaacagaaaacaactggtgggagtcatggattcgatcttatggaagaggaaccagttcgtcaaggagagaaggtgccagaggagctattacatctagagcttggaaacaagacaacattgagtgtagacaacaacatctctacaacagaggcgcctgatctataaaacctctggctttaatttatagtgaacttttttgaaggacaagacaagaagggagataccaatatggaagaagaagctactccatcagtgcaatagttagaactctattcggctgttttggggatatgtaacaaaccccattatattttgtgttgtctctctttcagc

SEQ ID NO: 61367 - DNA, 507 bp, Arabidopsis thaliana landsberg
  unsure (1)..(507): unsure at all n locations
aaagctttgataggccacattatcttgcctattcacggcggctccgaccatcagtttccacggtgccggcggctatatacgatagtcgttgtgaagaaaaaggtccttttcgtcaaatcattttacattggagccgaaagtgtgtactttactttggtcggtttttgatattttatcattactttattctgaaaataaaattaagtttgatgtattcatttcttgagactttaaagacaatagtagaatatatattctccttgttataaatatgattgggtgacatggtacgaccgcgatataaattctatatatatcatcaactctgatattaagaaaaattacgataaaacgaaaggatataaaaaaatagtcaaactgtagcgatataacaaaaattattgattgtacaaagttttgtattgctgtcatattagaccgtaaaatttatgacgatcccaattcccaaccctanactaacaccacaattattgagcacattcaaat

SEQ ID NO: 61368 - DNA, 665 bp, Arabidopsis thaliana landsberg
  unsure (1)..(665): unsure at all n locations
cgatcgtatgacgttactaaaatttaaaaccaaacttttaataataaaatatataatattaactaaattattacctagtagatgaagatatattattttaattagtttaacctaatttttatagaacttggttatatacgaatatcttgaaattccataatatctcatccttgccaaccatgtgaaaaggatattttggaccccaacaatttgcaaagtgcattttagttccaacatgtacaagtatgtggtgctatatacatataaacattatatataattttgtcaaccgttatatatatatatatatatgtatataattgtacttatatgtatattatcgtttttagtaaaaatatataaataaatatatgtgtgattatctacaaatacaaatagaagactaaattttaatatgtggtactccgcatataatttgttttttttctaatagtagtgatttaatttttaaagtttaataattatgtattatatataaaagtttaccaattatatcattntataagatatttatattttatattttacaattattataaagtatcggtatatcatatgacaanttgggtttctttntatctaaaacacgatgatnncgatatgttaatattggtgatgtacccaaatataaaatgaggatttaa

SEQ ID NO: 61369 - DNA, 711 bp, Arabidopsis thaliana landsberg
agaatcttgggatgatgaaatggggatggtcgattggatggttaacatgttcatgtgcacactttatatgaaaagagaactatacttcaagaaatatgaactgtctcactattgtttcatataacacatgatatttaaaaattcataaaaattatgttgtaaatcataagtaagtctttacttgaaacatgaacatcttcttattgtcaacataacctcttgttatagcgttccattttttagtcaaatatttcattcacccgaaattatattttagtttttaaaactgataaaattttggttttaaattttaaattcaatgtttttttggtaagttatcttttgtttgtagtcatgtattaataaatttcattaaaaaaacttttgtaacatgtcaatattccttagaaataaagcaaggtaaaaaagaaaactacatcttttgggaatagttaaactttaaggtgatctttcatttttaaccataaattaatcctcctcaatgggattaatatcgtctcccgatatatattcgcaaccattactaaaacgaaagcagtgatgaaataagcccaatgccaagagtgtcctactgactcaatttcaaaataatagtccagcggaattcccgaagcaaatccctgaaaagggctaccatcattaattatattaggaatcctcaaagcccattccaacagggattaacctcaa

SEQ ID NO: 61370 - DNA, 530 bp, Arabidopsis thaliana landsberg
  unsure (1)..(530): unsure at all n locations
aaacccctccagagcccaatcnnnnnnnnnnnnnnnnnnnnnnnnnnnnnnnnnnnnnnnnnnnnnnnnnnnnnnnnnnnnnnnnnnnnnnnnnnnnnnnnnnnnnnnnnnnnnnnnnnnnnnnnnnnnnnnnnnnnnnnnnnnnnnnnnnnnnnnnnnnnnnnnnnnnnnnnnnnnnnnnnnnnnnnnnnnnnnnnnnnnnnnnnnnnnnnnnnnnnnnnnnnnnnnnnnnnnnnnnnnnnnnnnnnnnnnnnnnnnnnnnnnnnnnnnnnnnnnnnnnnnnnnnnnnnnnnnnnnnnnnnnnnnnnnnnnnnnnnnnnnnnnnnnnnnnnnnnnnnnnnnnnnnnnnnnnnnnnnnnnnnnnnnnnnnnnnnnnnnnnnnnnnnnnnnnnnnnnnnnnnnnnnnnnnnnnnnnnnnnnnnnnnnnnnnnnnnnnnnnnnnnnnnnnnnnnnnnnnnnnngcaaataaggcaaatcctgtcttgccaaatatttgaaatgaaccttatttacctgtcttccacctcttt

SEQ ID NO: 61371 - DNA, 247 bp, Arabidopsis thaliana landsberg
agtgttattctgcagaatctcctacatgcgggttctctaatttggaaatggagacacctagggaccagcaggcccagcttttagtgccaggggaattccagggagggacatgtaccctttaccttgattagtgagctctatctctagggatctgactaattctacaattggtaggctctgaagacctacctggggagcacttattattctacctcctactctacttaggccgatggatggtgatttt

SEQ ID NO: 61372 - DNA, 477 bp, Arabidopsis thaliana landsberg
agaaacttaaccagagacatatgtctctgtcctcaaacccacctcttgtctctatgggatcgcaactctcaaacgcaatcgacggtaaagataacaccaaaaccatcggatcagcggatccggaccagcttatggagatcgaatccttggagaagatcttaaattacaagttcatagacaagagtttgttgctgaaagcgtacacagacgctagctacgttgatgacaagagtgaatcgtacgaactcctagaacttttaggagattcgatcctaaacatgggtataatctatgattatattaagctctaccctaaagaagcacctggtccgttgaccaagctccgagccgtcaacgtagataccgagaaattggcacgggtcgctgtaaatcaccaactctatagctatctccggcataagaaacccttacttgaggagcaggtaagttacattcctaaaaaccctactcaattat

SEQ ID NO: 61373 - DNA, 1441 bp, Arabidopsis thaliana landsberg
cattggcctttatttatgggagttttacatatgtcggatggattcaatcagtttaagatcggtttctagaaaaacaaaacttaaaaaaaaaattttttattaaaacttggtttaatcttactaaaatttggttcaattttacaaaaaatataatttttaacaaatataactaaattttattggatatctaggttattaggatataactaatagttttagatatataattttattttgggttttcgaatataatttttgttttttggtttggaccggataattcatgtagaagaattcgaattttttggatcgtttttgggatgggtgtttggatttcgagttttatgctcaaccctagtttcacagttttcttatggacaaaaacatggatgttttacagtgttaaaaatggacatcttcgatcactctcctcgagaggaggatggcttgtggcttcgtcacaggagaaatcttgaaataccatatgtaacctcaagcgagtttggatgatatttcgcatgcaacattagattttggtggcttggtaaactgaagatacctatgaaagcggaaatttgggaaataaatcaccaatttttctcttgttaattctttcccataagatcagaagctccattggcttgagattatatcacaacgttgattggtaataaagcttcaacagctttgcagttataaactacggacacctcattggccccttttgaatacaagagttgggactgtccaacaattacattgttgctcaagctattgttttgaggtcgatggtgtattcctcatcaaccaactattcatgacaagttgacaactcatcttacttctatctctctttcttaacatgatgacaagagtttcaagatctgccgattactaggaaaaaggcgctaatataatattttctccgagatttaccatcgcatccgagatcattctccttattgattcaagcatgtacgtatggcataaacatcgaatacccaagcaaaaattttgttgttggctgtttgtctcttaaacatgaatccaactaaaacatgtttctcagattgggtctcaaagtgtatccaataagcattctttgcaagcaagctaatggattttggaatcaccttcttggagtgtcaattttcaggtatgatatgggtagcaattctacagaaaatgaaactccagtctccatgtcgatacttgtctctcattctcaactggttaccctttttcagattcatccactaagcaacctcttatgattgcgttacaagagacaatctttacattttggagagaaaaaccggagcattggggaaagtcactaactcattctttaatctaaaaaattgtggatcattgtgtgagaaacaaggcatcaaatcttagaagacaagttttcaaaatggagctcaaacatcctccaagc

SEQ ID NO: 61374 - DNA, 593 bp, Arabidopsis thaliana landsberg
  unsure (1)..(593): unsure at all n locations
tannnnnnnnnnnnnnnnnnnctccaatgatcgccattgaagaaacacaattaaaaatactaatccacaatcgaattagaccctgctcaccagataattccgaaacaattcaaaataggggtttccgaagtttatcaggaaccctaaatcaatgaacaccgaactggggaaatgaggaagaagtattagtgatgcagaaacaattaggcgcgtgtaaaggtacttgctttgataacttctgtgtaattacagtttgacccccaatagtttgttaaagttcgaatctatccccacttcccgctcaattattatcataatcatagaattagaatatgcttagctatagagtcctaattaattcaactgatgaagttagaactaacactcttatgcaattttgatgtctataaatctaaattattttttgcaagtgggtgaatacatccaacacagaaagtgataaagaaacgagaactcaatagaatagaatagagagtaaatagatgtgtagcaagttggtttaggtttgtatcacaccaatcacgactttcataagaacaanatgttttctttatgatgaatttgtaaagatg

SEQ ID NO: 61375 - DNA, 1245 bp, Arabidopsis thaliana landsberg
atgcctgtatcattagagactatttaaacccaagagttttctaatagagacaataagaataattcaaatcttgaaattgattagtttacgtgaaatgtaacatttaacgaactctaccgaaaactcgaatctttttatttgattatacaacagtgaccaacaagatgagagactgaaaacacattcatggtttggctagtagagaaatctcaatctcttgaagtgtttttcctttggtttcaatcacgttccgcttcacgaacatcaccgccattaaacagaacgtagaaaacatcgaatatagtagccgaggaccaagcttctcaagcaatctcagaaagagtaaacccacaaagaaatttatcacctgtccaacaagattcaacaatgttaagcaaccttaggaacgaaaacgcaacgatgataaaatcaacgagtttactattgttacccaatgcacagacatgcagaaagccatcgcttttgctctgattcgacttgggaagatctcagggaggagtaaacctggtactggaccagctcctaaggcgaatgttagcacaaacctgtatcagaaatgacaattttgtttagaacaaacaaattatgggtaaacatatttcagtttttcaataaacacttacacaagagtgccaccgacagacaaacacaacgccgaaaaatgtggtaagtatgaacttgtagcaccaacttgaagtgccattgctgctgcctaatatacatcaaaacataggtgggctgtcacgctaaaatcatatcagcataggtaataagaaaaatggaaaggaagcaaaacacaacataccatgccaataaaactccaaagcagaagaagctttcttcctactttatccatcaacaccatcgcgattacagatcctgataatcagaacaatgttacaatccaagatccatatgattgaaaagacagaaaaaaaaaaaaagtggaggagaaggctactgtacccaagaggtttgaaactccaacaaatatgttgcctaggtccgatggtactccagcacttttgaatacggtagaagagaaataaaaaacagcatttataccagatagctgttgcaaagcaaacagggttgatccaataaaaacaactgcaaaaggaacaagtgaataacaaagtactatacaggaaacaaatagacacaacaatcaacatacatgtttgcagttccttccgcgggacaaaagcaaagagtctacatacc

SEQ ID NO: 61376 - DNA, 564 bp, Arabidopsis thaliana landsberg
actacactttaaacaaatgagctcaaattaaataggaaaaattttcatttttttcaatcggcgataacaacattttacactttgtatgttgcctatgaagagatagttaatagtgaaaggcaaagttcagatcctgcaatatcttacagtactacaaaattctttaaatcatcgcattgtcacaaattcaaacctaatgtctaactgtaaaacccgtagaggtgattctccagtcactgatcaagaaagtgtggagaatatcaaacaactcagttgaatttaccaatctccattttcttcttaattgctcgccgcccatggtatatgaacgaagatactattcccgagaccgagaagatacctgcaaatcaaaggtataattttagttttgaatttgatgataaacatatcagcagggtatgttaaaactgaatggacaagggatatatatatatatcgattacctccaactatagcgcaaacatttgttaggaagtgcaagaactccacatgttgctcctcagatatcacctagccaacaatcaaaagttaaaatgtttctag

SEQ ID NO: 61377 - DNA, 1070 bp, Arabidopsis thaliana landsberg
aatcagattttcacaggttgtgaatcaaagtaaattggatgaatgatgcataatgtaactattacaggtgtatgaagcagcttattttggtcaaatgtaaaaaaaaaaaaaagtggtaaaaatagtagtcacgaggaatgagacttgagattttgaaaaatgggcataatcagaaacttgactcgtcagttgatggacgcctcaagaagtacctcagactattagcaaggacctacaaatacaaaatttgatttcatttcagtaaaaacatttcaacttatcaaagagaaaagtctaatttcagaattttaacctgctggagaggcttgattagggctttgttcctgtagcttacatgaaacttcaccttagccaacaaaccctttttgtttcacatacaacaagaagaagcaacatgagaaacagagcgatattatagcggagggtatatgttttagacattaaaaaacaggattattagatacctcggtgtcgaattctccagattcaacagcgacgctgatatctgaaatgatcttcaccagctcaactaatagtccaggtctatccgctgattctatgaagagtaaactgcatcatcaacaaataattatggatcaatgatcagatcatatatcataagaataaaagcatttggataaggttctagagttgagataaggtatgggtatacattacctgcggtctggtccatcatcttcaatggttatatgtgttgctatgtccacgtcaatctgtcaacatcccaatccaaaatacagaagaaggaaaatgaattttgaagctactttgaagttgcgtgggtattcccttcttcatcaaagcgattaatactataatgaagtttaatacttgtactctacattgacccgccaaatccaaatatgttgattattaggtaagtctttgctttctctattattgcttcttatctgtacgtgaccgaggaaacgacaagcagtcttgacctttatgttcgaggatgctaactacttgaagaattagtgcaatacacaagaagtggataaggttagtaaaagagcatcaca

SEQ ID NO: 61378 - DNA, 492 bp, Arabidopsis thaliana landsberg
aataatggattattaagaataatcctcacactaatctcctccattcttcccattttttccccatcttattttcctcaaaaacaccaaaaaaaaaagacaaaaaaaaaacaaaaacagagaaaaaaacagttagatagggttttaaaatttttcccggcgaaaaatggagaaatctggaaatcaccatcacgcaaatgaatcatcggaaaatcatgatcacaaatctgaagatcatgagaaaaaacatcattccgatgaatcggaacaacaactgcattcatcaacgccggaatcggaatcctccgaacatagccttgtcgaggtgatggaagccgacgacgatttcattcaaaaaatttcttccgagaaggatccgttaggagagatctcaccagcggtggagtcattcccggagacggtggattcattggtgtcaaaaatggaatcttacgggcttgggcggaacgaaacagaggactctgtattcatcga

SEQ ID NO: 61379 - DNA, 524 bp, Arabidopsis thaliana landsberg
ggatcgttacaacaaaaaactcaaatatatcataagatcaacttaatcatgaattattatcatttaaatcacaaattttcaaaatacattttaaagataatttcgtgcctttaaccctaaagtagttctaaacaatttcgctcacaacctgttcaaacaggaaatcaaaacatagacatatataacagtaagaaaaataataaaaactcaaacttttaaaagtaagaaagaaaagaaatcaaaaagttttcacggtagcttctcatgggttctataaacaagaaggtaatgaaagataacgatagaagttttgaggtaaaaaaaaagaagcaaaaggaacaagtgggtttttttttttctcctcatagcttaagagacaaggagttatctcttgcgtgccatagaagttgggttgccatcaaacaagtcatcaatgaaagattcaatatcctcaggctgatacttaacatacttatccgtctgtttccctgaatcaagatgttgcttatacctcccaaagaaga

SEQ ID NO: 61380 - DNA, 1434 bp, Arabidopsis thaliana landsberg
ttgtgactgaaccgcctggctcagcttaaggtttcttctacggaaattgccgaggtttctcatgttgtctccaactcttctccgtagcaatggcgtaagagtttcaagcaatctgattcaagattccatagaaccgttggattccttctggagaataggatctcgaatccgccatgattctttgactaccagaagcttctcttctcaaggtcctgcttctgtcgattacaggtactttaatattctccattttgatctcctttattgtatctgaatcgttaatttcatgagaatatgaacaaagtggaagaaaaaaacagttcggttttgcaggaggaagagtttcacaaattagccaacttcacaattaatcaccttcttgagaaaattgaggtatttgaagctggaacctttttctctctagggttcttcgttttacttgagattgcaatagcttacactatgttctacttgcatgattcatgttcaggattatggtgataatgttcagattgatggtttcgacatagattatggggtaaggattaaactcttttaagcaatttaagatcttgttcatatttctggaaatctatgtgtacttattatagtcagtccttttggctgtttccaacagaatgaagttcttacccttaagcttggatctttaggcacttatgtactgaataagcaaactccaaatcgacaaatctggatgtcttcacctgtgaggtaaagattctttcttgccttttgaaagttgctaactttaggcgcctagattgaatttcgcatctggattatcatgttctgctctctcttctgatttttgtactcatgatatttggagaaatgaaactgtttatgactgtatagtgttgttgctcttgactttgtgcttccacatcttagattcacattaatgtaatcttcattcttccttttgtctcggtgcagtggcccttctagatttgactgggaccgtgatgctaatgcgtggatatatcggcgaactgaagcaaagttgcataaactcctggaagaggagttagagaatctatgtggtgaaccaatccaactctcataaagaaggctttaaaacaatatttgtgagcgaaagggtttcatctatgaacttgaaactgctataccctgttaaaggtatatctatgaaacatccagaggaataaacaaacaaggcagaagacaaagttgttttagtgtgaaaactgattagtgtttgtgaatctatttttaaacagtaatgtctcatagtgacattgttgcaagtctctttgtttaatcagagctgaagctgccttttacagttttacgcgttttagatgaaaacatttcttttgaacgacaaaagtcctacatttgacaaaaaacctcgaatctcacaataatttcggaaaaaagttggttgcaatg

SEQ ID NO: 61381 - DNA, 491 bp, Arabidopsis thaliana landsberg
  unsure (1)..(491): unsure at all n locations
nnnnnnnnnnnnnnnnnnnnnnnnnnnnnnnnnnnnnnnnnnnnnnnnnnnnnnnnnnnnnnnnnnnnnnnnnnnnnnnnnnnnnnnnnnnnnnnnnnnnnnnnnnnnnnnnnnnnnnnnnnnnnnnnnnnnnnnnnnnnnnnnnnnnnnnnnnnnnnnnnnnnnnnnnnnnnnnnnnnnnnnnnnnnnnnnnnnnnnnnnnnnnnnnnnnnnnnnnnnnnnnnnnnnnnnnnnnnnnnnnnnnnnnnnnnnnnnnnnnnnnnnnnnnnnnnnnnnnnnnnnnnnnnnnnnnnnnnnnnnnnnnnnnnnnnnnnnnnnnnnnnnnnnnnnnnnnnnnnnnnnnnnnnnnnnnnnnnnnnnnnnnnnnnnnnnnnnnnnnnnnnnnnttcctttgtcaatctctataactaagagtagtgatgatccatttgtataattaacagctttcagaagcatgttggcatcacacccctttaggggggggcctccct

SEQ ID NO: 61382 - DNA, 370 bp, Arabidopsis thaliana landsberg
aaaccttaatggttagccaagtccatatgatctttcttttgttcttcaacaaggaaacactactgcgctgtaggatctttagggacactggacttaccactgattcacagacatgactgggaaaacttatctgccgcacatcactataccgagcctcattaagcttcataaagcctgggaagacctcatcaatgaacatatgcaacgcgcggtgagaggctgttagcaaatagacccctcttacgctttcacgatcactgactcgctgaactcgttcgattgactgatgcacgcgacatcaggtcactcagaggcggaaataccttactccacataatcaggctattacgcacgaaaaagcatgtgacca

SEQ ID NO: 61383 - DNA, 562 bp, Arabidopsis thaliana landsberg
  unsure (1)..(562): unsure at all n locations
ttcgnnnnnnnnnnnnnnnnnnnnnnnnnnnnnnnnnnnnnnnnnnnnnnnnnnnnnnnnnnnnnnnnnnnnnnnnnnnnnnnnnnnnnnnnnnnnnnnnnnnnnnnnnnnnnnnnnnnnnnnnnnnnnnnnnnnnnnnnnnnnnnnnnnnnnnnnnnnnnnnnnnnnnnnnnnnnnnnnnnnnnnnnnnnnnnnnnnnnnnnnnnnnnnnnnnnnnnnnnnnnnnnnnnnnnnnnnnnnnnnnnnnnnnnnnnnnnnnnnnnnnnnnnnnnnnnnnnnnnnnnnnnnnnnnnnnnnnnnnnnnnnnnnnnnnnnnnnnnnnnnnnnnnnnnnnnnnnnnnnnnnnnnnnnnnnnnnnnnnnnnnnnnnnnnnnnnnnnnnnnnnnnnnnnnnnnnnnnnnnnnnttgtggttttagcctcttttacgaggagacagtagttgatataggagggaacaaaatatccggtcaccccacgtgttcttcccccatcattacgacttttgattttttcttcgagctttcccttttattcaggctgcccccccaaaaaccgatttcc

SEQ ID NO: 61384 - DNA, 474 bp, Arabidopsis thaliana landsberg
ttcttggtgttactcttgattttttaggactcattttttgttgttttctctattagaatgctattgctcaggctggaggagtgaaggcactggtcgaccttatatttagatggccaaatggctgtgatggagtcttggtacactttcgctaccttgaagcttcatctttttcttttgtttctaaatcaaacaaaacctttctattttataaccaaaacaaataccgtctacagttattttatcattaaaaaacctactaaaaacggataaatcctaggatgcttatgtgaatccatttgttaagaagtggtcgtttcgataattcattttttaaagtggcgcttgcgataatacttagttaaaaagtgtcatttttggatatttcccttctttctattggaggatttacctaatttgtgtgattaggaacgagctgcaggagcattagcaaacttagcagcagatgataaatgc

SEQ ID NO: 61385 - DNA, 679 bp, Arabidopsis thaliana landsberg
cttagttaaccttaactacttaatacttgtgtttcctgttgccttaagttacattttcaaaaacagggttcatcagcaatctctagtgctgatctgtttggagacggtgatggagatttccctcttgatctcactgcgggtgatcttctcaaccgcctatctctccaggtctcatttcaatactgatcatgcttatttttctactacaaataacaacaattagttttgtcatcattaagacgtcttataaatgtgttaggcacaacaagacatatcatcattgaagaacatggcagaggagacaaagaagaagcttggctctgttgcttccagcttatgggtttgaaatgttcataattttctctaaagtccatcaaaacttttttattttattttttcttactctaatttccatttacaaaagcagttatcctattcttttactagggaaactctgttttgtttaattgaaagttaccaatattttgtataattgagattattttttgttactttgtaaaaattgtcaaataaaaatatgttgtgtgcatttcgacgtttattgtcttagatagttagatgcatcggactttactcatatacatcctgtgaaccattcccaactatttgaacacagaaaattgtgagcaatctgctatactaagtgaatatcgatcat

SEQ ID NO: 61386 - DNA, 1543 bp, Arabidopsis thaliana landsberg
  unsure (1)..(1543): unsure at all n locations
agtggtatctatggttttctacctttttggtcagattctgcnnnnnnnnnnnnnnnnnnnnnggcgcaacttgaggcaatgtgcgagagattatacaactcacaggattcagctgagagggctcatgctgaaaatagtctgagatgcttttctgtgaatacggattatatatcacaatgtcaatacattctcgacaattcatcaaaaccttattccttaatgctcgctagctcgagtttgttaaagcaagtaactgatcatactcttccgctgaatcttcgccttgacatcagtaaacttcttatgtcctcctaaccaaataactagaatatctctttttggcatttaatatcttacttgtttctggtgttctttctgttgtctttaggggcttatattgtgaactatctggctacaagaggaccgaagatgcaatcatttgttatcgcttctctcattcaactgctttgccggctcacaaagtttggatggttagatgatgatagattcagggatgtggttaaggaatctacaaacttcttggaacaggtgattcatcttctgggggaatacagtgctttgtggacatttttttgtagaattttcagatatttttaacaagggcttgctgaatacgttgcttacatcaattttatttcaatagggttcctcggatcactatgctattggtttaagaattttggatcaacttgtgcaggagatgaatcaggttagtgatgtattgtggttgattttccatgtcacagacatgtcctaacataggctggaataactctcttttaagtttgagttcttggcatgtattgctaattgcatttgagtcatgtttttgtatattagctttgagttgcctcatatttttgtttcttttcgatctagagtagcagtctgttatagatacaagtgggaggtttgtgctgtatctaaataattgtctgttttcaccattcctttatttttttaattaaaaacatttaagatggctgttttgttagactggccagaattatatgtgcacagtgtgcatgcttttagatagatagcgtgtcacaaactatattttttcgagggtatttatttctaactttttgtttttctactgtgttccaacttaccagggtattttttttaaatgcttattgacattttttcatcccttttttgctcaattcttagcctaatccaggactgccatctacacatcatcggcgggttgcatgcaactttagggatcaatccttatttcaagttttcagaatagctttgacgtcattaagctatctgaaaaatgatggtaatatgagtcatctatgtcaaaattttcgttatattccgtcatgccaagtatgaaaacttctacataccagcttcataatttatgcacattggaatgttttgtaatcgttaagtatgtaactatctctgtcgatgtatatctgttggttttagcataggagtggaaattttcattgtaatgagtcagatatttttttttaccagccgctggtctttacaagaattg

SEQ ID NO: 61387 - DNA, 391 bp, Arabidopsis thaliana landsberg
cgcacaatccaccgtgagcgggtgattggcaatgacccccagggcataaaaggccgcggtgatcaggaaaatagtggaaaaagcgaattccaccctgcgcatttcctcgtatacccaggagctcaggaaccagcccccgttccagatcgaagccgttagggcgctcatcatttcctggttctttttgcccacgtaattcatggtcacttccgaggtcatgggtgctgccatattcatgagcggctggcggaccatatagaaaaacccggcaatgaaaggcgccaggtaatgcccgctgaacagctcggtagaggccaggccgatcaaggcgatgatggaaacactctgcgtgagcggaatggccagctggtagcccaattgctgtttgacc

SEQ ID NO: 61388 - DNA, 486 bp, Arabidopsis thaliana landsberg
cggaaggaactaccagcaaaatgccgccccgcttgtgcgcccgcatggacacggctatctggatcagcacatttacgttgttgttccataagcaggaaggggtaagccccagcagcgaccggagtataggcggactatcgggcaaaaggccgctgtcttcattcaccaccttcacctggtcgccccgcagcatggctacgttggtgaacttgcccagccccgcggcgcggcggtgtttcaccaccagcagccccggctcggaaacgtcgagcacaaagcacaggttgggcagcttgatagtggtgccccacacatacagctcttcaccttcaaaccacacgcctatatggatgccggggcgctctacgcccggcgccagcttggtgagcagctgcggcgtaagcagcagcggccgctcaaacaacagcggcttccctgcctgcgaaggcggtaaaaatgccagtgatatgcggataggattacctt

SEQ ID NO: 61389 - DNA, 472 bp, Arabidopsis thaliana landsberg
acgtcttgaagcctcagcagcctccagggcctttactttgacatcccttttccctggaggaaacataaattgggtcaaatcaggtgaataactagcgcaagatggtaaaatgatacctccaattaattggaaatttcaaaagcctcatactggaaagaaataacaattacctgtaattagtgcaggtgctggtttttgctgctgcactagtggaacgaacgaagtgatgtttgagacaatgttgttgtgcctaggttctttttcttgtaaccgtggacctacagttgtcaaactcgagttgcaagacaacttaggcttactgaacctgctactaggcggtttaacatttcttttagcacctgctccaccttggttctctttacctttacccgtgaatcttcggttactcagctttcccactttacttttgacactgttgcacttaactgaaaagttgatgcagtactgacag

SEQ ID NO: 61390 - DNA, 757 bp, Arabidopsis thaliana landsberg
atgtgccaaggttcttctcctgcacccaaccacacacaataatcagttaccacactttcttctatgaaaaaggaaacaaatttgcgtatacagaaattctcatcaagatattaaatcaacctaattaggccatgagtttttaattatttcattatcttcatcatcttttttgttaattacgtcagaaagaagaatgcttacgtcagcaacgatttcatcaagaacgggaagagcagggccttccctgaagtcgatcttgtgagcaacgccggctttctcaatgatcggtaaacccaattcgtaattctctctgttgacatccatagccagaatctgatgataaaaaggatgaaactttcaattcccaagttcgacaaaacccaccaaaaaaacagaggaggatgaagagattgatttactttgccgtcttcagggagagcaagagcggtggcgagaagagagtagccagtgtaaactccgatctccattgtgttcttggcgttaacgagcttgataagcatgtttaagaactgtccttcatcagctgatgtggtcattatgttccatggatgttttgctgtcacttccctgagttccttcattgattctggttctctaggatacacacttgtctccagtatatactgtgttgatttttttaattgagatttagattgctgaaattgaattgaaaagcagagtttttgagttaaacaaaaaaacagacctggtagagatcatcgctctgtaagagact

SEQ ID NO: 61391 - DNA, 958 bp, Arabidopsis thaliana landsberg
gagattcatattagcaagcttcttgaatctgtggttttacaggcgtgtctcaatctcattatgtgaaagctaatggattgtctacaacaacaaaactcagttctatttgtaaaacttctgatttgactattcacaagaaatcaaaccggactcgcaagttttctgtttctgcagggtatcggtatgtatgtatgcatttcgttcgctatagcgttctctcttctattgaattgacttaaaattgttgaaacttaattcagagatggaagtagaagcggaagcagtggtgatttcattgctggttttcttctaggaggtgctgtctttggcgctgttgcttatatctttgctccacaggtaatgatgatgtttactctttagaaacctaaatgggaattagacattatctcatgttttcaatggttttggtttatgttactgactgttttgatctagtcttttgaaatgatgagtagactgtgcttttgttccctacttatgcacattccactgcctaaaacagacagtatctttgttgttctcattactgcttcgttggttctattttgattggttcttggagctttggatgatataactgtttatctttctcatgcaatctaaaaagctgatggttatgattattcttgtgttgtggtgatttagatccgaagatcggttctaaatgaagaagacgagtacggttttgagaagccgaaacagccaacgtactacgatgaaggtttagagaaaacaagagagacactgaatgagaaaataggacaacttaattcagcgatagacaatgtctcttcgcgtttacgaggtcgagaaaagaacacttcttccctaaatgtaccggtcgaaactgacccagaggttgaagctacgacttgaaggaagaaacaaacagctttcttcttctgtggttcatttgtaaactagagttaaaaaacca

SEQ ID NO: 61392 - DNA, 1584 bp, Arabidopsis thaliana landsberg
acttggcgtaatatgcaactagtttgtattcgaccttgcaaaacaaaaccgcgtaaatcaaactatttgacgctgagtataaataagcgtgaccggcttattttttggcaaaacaagaaacaaaccattatatttacgcaactagcgagacaattttattaatgttatcatagtcaagactattagctcattgtcacacgaacaatgaactaatggctacacgatcaataaactaacatacatatggcctataaaatggaaatatgaggtgagtcggtgtccattgaataaatcaagtggagatcgagtgggccttaattcgagagatatactattattttctcttgagatctcttagacttatactgtttgtacattgatttcactctgtgtctataagccaatcaaattctcggctgcgactgctagttcatgtcgtgttaaaacctcctccaagtgtgacgtaaacccctatgatctttttcaatatcttatcatatacataaataataaaaatcggttacaagaataaagaagtattatcttttggtcactacttctctgtatttcagagcttacaaaaaccataaattacgatcgatttgtgagtttccctatagtacatatatatttatattattgtctcgatctcatttttttcccccaaattcattattttcccaacgtggattccaatgttttctaataaacgagccattggatttcttttattaaattaaaataaaatatgagatatttactttgtaaggttataaagctattgtaaatcttaggctaacgtagctaaaaattttaaaaacttttgataacactctcttaatcttaaaatatgtaatgtttttaaatgttaatgattttgacggtaattctattgttaggtttacgaacaatatgcaatatgcggttatggatccggatggttacgaatgacgatatcgatattactagctagcacaaaccacttaagatacaaattgtagtcgatattttaatggtaatttggaattatacatacaagaaaaagatatactaagaattatgagtaaaataaaataaaaagaggaagatggctaaccttgcgagtgagggagacatcaggagagggaaaatcggtgaagcatgtgtcatgttgaccccaagttgatcccatcaccggcaagcatttgcatcgaggcgttggtttccgatgatcaaacgacattgaatccactctcatccccgtgatcaacggtcctcccggtgttcccggtgtccccggcgttggaggagccatcaccattaccgcacccacctcagcctccggtggagccatttccaacgtttttttttttggttttttttttggtttttgtttaaaataaaagtactaaattctaatttttttttgtttttttttggtgaggggaaataaattgatagagatgaaatttacatgatttgaagtttttataaatttgattttacacttgtgttttaaacttcgccagtaccggtttcacccaacacaagttaaaactagagagatcaataaattgagaaaacttattcattcgatcaaaaact

SEQ ID NO: 61393 - DNA, 462 bp, Arabidopsis thaliana landsberg
cataaaatccaaactaatctccaactcttatttagatccactagagaattatagtaaacattcttgagtacaagttgttttcgtattctcttgattctttaaaaaaagcatatccaataaacaaatgatgttctcgtagaatcggtaaattgcaaaaagatgaaaaaataagaaatagacgcaattctgtgacaactaaaatatccttttcacatatagcgacgtctcagtcactaaagaaccgatagaattggaatttgtaggtcccacatttattaatatacctcttaaattaaccaaaaataattcaataagtaaactattacttaaataaataaaaaaataagagccattcgtgacttcgtgagaagaagccagcaaggaacgatggagattattacggcatcatcatcatcatcaacatcatcattgtaattcgtaatcatatcttctttcggaatt

SEQ ID NO: 61394 - DNA, 591 bp, Arabidopsis thaliana landsberg
acagttcaactgaatttactagtaacataaagtactaaacatatgtcatcgaataatattatcacaaggaacgaaggttttattgtttttctttgctacttcatacatcccttctctcagccactctcgttttcagctatttctcttacattccatattactccttttacgtttttaataaccaaaaccacacctaattacctattaaccaacagagctaatgacaagtttacttcttttatgttgttcatatatcacatgaaaatgaattcggaaaccacgacttctaaatcaaaatatccttatctaaagatacaaaacttcatatatcatttggttccggatagttactgattcattttctattacatatactcttcatttaataatctgttaaaattttatgttattaaaaccgttactggttagaataacataaagtaaaagagtaaatatttttctatcttatttatcttatctaggcataaatgcacacggcacacctaatgaaaaagagaggaaattaaataagatgagtccacatgtgtatagtagagtagcgcatgagctttttagggcttgactaaaaac

SEQ ID NO: 61395 - DNA, 1384 bp, Arabidopsis thaliana landsberg
ttttcctaatttcttggagtctacagatttcaaagttttttggttactaccaaagtagaatctcagtttttgtctaagctaatcagatttctgcgattctgattgttaactaatccaagaacgatcgatgggggtttaaaggttagttttttaaacttgtagaatcaaggaatgtgattttgttactgggtttaccaaattttaaaacttttttgcattgtggatattacagttgaatttgggtctagaggaggaacttgttttgtttttgtgaagaatcagactttaaaagaaatgggagaaggagaagaaaatggaaatgaagcagattcaaatgagagatctttggcattgtcacctacttggtctgttgctattgtcttgactgttttcgttgttgtttctttgatcgttgagcgctccatttatcgtctcagcactgtgagtagtctccattggatgctcctctgtgatttgatcttcttgagaatcatttcttacttctgtttttgtcacagtggttgagaaaaacaaagaggaaacctatgtttgctgcattagagaagatgaaagaaggttttgttcataaacaaaaaaactcatatatgatccttctttgtgtctgtgtgtgtgtggttacataaatctttgatgtgttttgaaatggtattttcttacagagttgatgctgcttggcttcatttcacttctattaacagctacctcaagtacaatagccaatatatgtgtcccttcaagtttctacaatgacagatttcttccgtgtacacgatctgagatccaagaggagctcgaaagcggttcaactgtcaagcggaatcttttaacaaaatccctctttttcaacatctttaggagaaggttggatgtcataaaacgaaccacctgcagcgaggttcaaacttaaatgactgagatctttagcattggctttagaatcttctgatcatttctaaggaactaactaaattcaattttgcaggggcatgagccgtttgtttcatatgaaggccttgaacagttgcatcgcttcatctttataatggcagttactcatgtaacttatagctgcttgaccatgctccttgcaatcgtcaaggtagtatctttcaacagctgaagttttcttttgaatttgaatgttaataacagtgtattttgtgtgtttataggtgtgcgtttttatctgttttgatatgggaagaacctctgttactaacaattttgtttgatctgcttctctatgcagattcatagttggaggatatggaaggatgtagctcgtctagatagacacgattgcttaactgtgagcactaaatgggttatttgttctttcaagtatggcacgaaagatacatct

SEQ ID NO: 61396 - DNA, 2542 bp, Arabidopsis thaliana landsberg
aacatacaacaacacatggctaccaacaaataaaaagaaagacctatatggtttttattaaaaaataacaaatacattgtgtcacgacaaataatttcaatacatatatacaattcaacaaaattacattaagaaaaaaacccagcgacttggcgcgagtttcgccctaatatacctaatttgtatagcatctaagtaaattttccttattaatatgaaaattttgacaaaaaaaaaaacagagggctataattttgggcatattaattactaattttggtcattattaatatttttggaaaaaattttatccaacataggatagtttatatagccaaagtattttgtttattttcaaaattttttttttttttttcaaaatctcattaatataaaactcaaataaagttatataacctgacaatattaattgttaacagtaaaaaagaaaagaaaaatggaagaaccgcacataacaagttagaaacactaaaaaatatatgtacagatcattcattttgtcacaaaactgaacaacatgtggttcatataatttttttatatttaaatataagaaacaagcttttgttaataaaatgaccaatggagaagaagaaatacggttcctccacattagcaatagaaccatactgtctccactgttcggttgaaggtaaaaaaatgtaatgggctctctctctaaagaacggtttttctggcagagttccgtctaaggggccgggtgaatccgagctttggtatggggcttatgacacgactaattcagtatcttatttttgttatttatatgaataatgtccacggttttaattatggggatgccactttatacggtgattcgtttaggtgaaggttttacttctgcttgtactattgggtccgcggttgctaaatactatcagatatgattgcatacttgcatgtaactgataaaaataatatttgttactttacgtattttgaattaccaattagcctgtatttcaagtaaccagaactactagatactaagcaagcagttgtgcacttattagatcataataataataagtactcaataactaaaatcaccttaaaacggaaattaaaaaaatgatcgactttgatgttatcatatccgccacttttgtttcgttctctcgggctgaatcgtttgtttcgttctctctatcgttactagctctctgtttcttgttttgtctctattcattaactttgcttcccttattagtaattataatttataaattctaaatgatgtctctgtaaaagagaaacaaagtagataaatattaagggagaaatgtaaatgtaactgcataatcggtttgctacaaacttatttttccctcctaaaatgtttcttttctttctttgcaaaagattcattcgctatatgcctgtattggttaaacattagtagaagtatttttgcaattggcgtgcagaacatgggaagttagtagctactttatatatggccacatgacttcctcgcacgtcacgtaatcggtgaaatgctgtccatgtgacagtcagactcttcgtaaaacaaatgttccgaaagtagtaactacggataatttatttatttttgccaaccttattgtagttacaaaataaataatgttcctttgtaactttggcgtgggatttccaaaaagtctcttgtcacaatgaaacggttttgaaaaatttataatctcactttgaatttggtatatgtattcagacgaatgataagatcccaaattattttagtcgttttaatttatagatttattactaacttttttttttgtaaatttaaactttcagattaggcaacaccaaataaatgatatatttaatagaaaatgtatggtcgaaaaaaaatattgtaatgtctctacaccagaagcttttgttttgacttttgagtgtttgaatcatttgaagttttgaacagaataattccacaatcaaaaccaaataatattttatcaggcgagcgaaagacaagattttgacaggtatttgtacaagtactgagtcggtcaacaaaccccgtctggactctggacccgaagtaacccaacaaacgttgcgacaactacattagcaccaccaccaaggcaccaataatgcaacgtaagagggacgcagcaaaactgtcgcgatgtgagattcacgcgctctaatttaaacgttgactctttgtttcatcgttactctctcccatttatttacttcgcatactctcttcgttacaagtttccatttaattactcttaagtctctaactaatagctttagggattcgtcattaatttaaggcaacgtaaacttaaagagtttcgactaaaagccgtttcaggaaacatacatcatcacatactttatctaaataactggcttattaattttatagcaaaatgacgttatttagtgttaagatatacaaatatttaatatttactaaattagttaaggtaaaattgtgttcctttctgtgagttttccgcaatattaaagagcccta

SEQ ID NO: 61397 - DNA, 551 bp, Arabidopsis thaliana landsberg
  unsure (1)..(551): unsure at all n locations
cganatataggtgacccaaatatactaatcttaaataattggaatcgattaaaattttcaattgtttcttatccctctttgaaattgaagcaagagaggatgaaattaattcagatcaaacaattcaaattcaaaaaagctatggaagattaccacctgcatcgtcgaggaagaagattggccaagcatagatctgaattttgtaaggtgatggagaagcaatggacatcaatggtgagtttagaggcaatagattccatgccattagagaaagagaaagagagagaaataatcgcacatttctgagatcgattgatattgatgaattctcctcaattagattgaaggtacaaggagaagaaactcaattagattgaaggataaaacagtcatccatataatataaaaatacctaaatttgtaagaaacatgagatgttcctatatctacaaaagcacagacttcaatatgctaatcccataaatgatccggcttatagttgccaagaaaaagaagaagtcgcaggcttgtttgtatatatttttgctgat

SEQ ID NO: 61398 - DNA, 1375 bp, Arabidopsis thaliana landsberg
gcaggtcgactctagaggatccccatacaatgaccatgaaaaaaatacactatgggtttggctgttttcgttccaaatgttggcatgacctccaccgataatctgttgttgattaggtatttttaagttctgtcaatcgtgaatcgacatctgattgtcatcaaactcttattctataagatgcaaaagtagtaaagcataatcatttattttacataaacacattgtttattacttttgtacatgttgcaaaccgtcgcacggcgcctgaaattcgttccctatctccttcacttcaaaagtcactgaagacatcaaaaagcaatattgtcgacatttatccacaactcttttaaaaacgtgtcttattaaatttatcatccaactagcttagcatgcaaggttttattatgtcgagtgtcgacctcaatattcaatagaaaaaaaaggctggaataaaagaatatcatcgtttcattttggttttacaattttccctatttatatccccactcgtccttgtttcttccaccatctacaactttcattcttccactacatttctctccttgagtatcttcttatcctattttccaaattccaaaacaattcacaaaatggctacatgctggcctgagccgattgtttccgtgcaatccttgtcccaaaccggtgtaccaactgtaccaaaccgctatgtgaagccggctcatcagagaccggtctttaacaccacccaatccgatgctgggatagaaatccctgttctagacatgaacgacgtttgggggaaaccagaggggctgaggctcgtgaggagcgcgtgtgaggagtggggtttcttccaaatggtgaaccatggtgtgacccactcgttgatggagagagtgagaggagcgtggcgagagttcttcgagctaccgctagaggagaaacggaagtatgcaaactcaccggacacgtacgagggatatggaagccgccttggggttgtgaaagatgctaaattagattggagtgattatttcttcctcaattacttgccttcttccataagaaacccttccaagtggccatctcagcctcctaagatcaggtacatgcatataaattcttgtaacttttttgtccatacatatggtttaggtctatgtattatattcctgagtgtaaatgtttataagttatacttataacggaaccgtttactaaaagaagtttttttactaagtgaatgttttgcatggggacacgttgcgtgtgtgtgtttttaaattttaggagtcaagcatctgaattatgtggaagtacacttgcataaacgtaccacatggccgtttggtctaaatgttaattaggcacgtgctcatgtgtg

SEQ ID NO: 61399 - DNA, 165 bp, Arabidopsis thaliana landsberg
gctaacgatagatcaaggagaccaagatggaacgagtaaatcactaaccaaagaatggctatctatatgcggatattgtgtacatcaactctgtaaaaacataaaggatagcacatgcatgacaaaatgcatgtgctcttttgctttcatatttggtaaattgct

SEQ ID NO: 61400 - DNA, 737 bp, Arabidopsis thaliana landsberg
  unsure (1)..(737): unsure at all n locations
ctcggcatataaaattcaggagatgaggttgttctgataagaaagtctcagttagaggtttaaccataaaaacaaagtcttaatggtggttcaactcctagttgtcatccatatgtcccatcgtaaatgcatcaagccatcaagacaagggaaaataataatcctaatcataactaattacttaagaaacttatgattcttaaccaagttgatgtaccaaccaatagcaccatctctttattagttgattattctgatttttttaaagctggacggattagatgactgaatcgtttatgaaatttaaatattgtataagtacaccctatcaccaaatcaagaacacgaagtatattaactatggatggtaggagttgttaagctaaataagttgttacaaatgacgaatgcatctagaagtgaaaggattagcatgattaagatagcttcgtccttattgcttaatgattagggtttcgagtactctattctatataattaactaattaaaacctctggaattttctgtaaccggtattcaattatgtatttgagacaacgacattgtactagctcaatacatgagacatactattgaacattagtttaattacttattacatatggntaaattattcctaattacatataatatggcatatatagttttcgtctattttgatgcacgcatgtccaacttcaaatcccgtgaagagggattagaaaattcttaaaat

SEQ ID NO: 61401 - DNA, 593 bp, Arabidopsis thaliana landsberg
ggtaaaaaaggaaagtcaggagttcctatcaagcttttcggtttttcaaactggggagagtgcagcgcacgggcaaaggatgctgtaaatagctctgaatggtcaaacgcaaaacatggagttgattgtgatttgcagccttgtgctcttcctgatggttaccctcgtcctcatggtcagttctatgctgtatccggattctttgtggtgtaccgttttttcaacttaagtgctgaagcatcccttgatgatgtcttggaaaagggtagggaattttgtgacaaggcttggcaagtagccagaaccagtgtttctccacaacccttcattgaacagtactgctttagagcgccatacatagtctccctgttacgagaaggtttatatattacagacaagcaaatcataattgggtctgggagtataactcggacacttggagtagctcttctggaatcggagaaggctctatcttctacattgggactgaagagctatgagactctgagcatgaagataaacccaattgccgctatatctatcttgctcttctcattgcttctgcttctctgtgcactatcacgtgtcagcaa

SEQ ID NO: 61402 - DNA, 482 bp, Arabidopsis thaliana landsberg
tattaactgcggcttcagtttctcaagcgccggaatgtgttttttagacatcagccgcgatatatgatacagtatgaggggtgttgtagcataatgcggcgaaatatagctggcagaacgggcatacttccgggtggcaatggtgttctcgataagatacaggctggctgagtctgccgccgtccatggcaggtggtaccactgaacaaaatacaggatattagacagcacacacacatcaaaatccaccggcatcttccggccgaaccaggtggaataggcccctatattgctgaactcggggaaggtattctgtattcgttttgcatcattgttggtatactcctgcatcaatgcatgaacctttttagttacaaagtcgctttcccgttgcgccagcagcatgatcaccgtatcatcaaaatcatcgggcagcgactggttttaataaaaccagttgagccagcctgaatgagggaata

SEQ ID NO: 61403 - DNA, 1136 bp, Arabidopsis thaliana landsberg
ggttatcagttcctaacaggttagctttcactgccaccaaagacaaaaataaaagtaaaattcaaagtcaaattcctaacaaaagaacctaagtgagctttacataccgttgtcaggtaaatcatagccaccaagagatgacctactgtataaatcggtaaaacgcatcgacaagcgtttcaaaatagaataattcatgtcaacgccattctcatttccagcaaacgaatcaccattttcgtctctccactttaactcaatctccccagtttcttcgtttctcgatatcgataaatccggaagattctctttaaagaagtctaacacaggagtgtctagctgttcctcagtaaaatacgaacgaagcaaccgcaatgcagttaacatttgttcaatctcaacatcacggattgctctaatcgcagcaatttgtctttcgactacacaatgttacccaatacaccaaaaatcagatcatgataatcctaaatttctgagttgggtattggaataattgataccttcttcgtcgacgaagtcttctttcttctcttcgattcgaattcgtttctcgtcgttcctatcttcttcagtgagtttgacacactcctttgcttttcgcttcggcattatcgatttctttcgaagaattagatgctcaattcgaggaattgattgcaatttcaaatcacaatctgaaattcaaaaccctagaaacagtgaggaagatgaaaaacccccaaaatcaaaaggggttttgaaaataatattaaataaataaatgggcgggagttacgcttaaacgaaattaaagaaacgaaatacgaaaatatccataaagttgaatacggcccatgggctcaataatattatgatcaccaaataacatttctaaataaagcccgaattgtgatatttttttaaaaatagttatgtttctaataaattcgatgtatttaaaagttgtggtgacaaaagatcggaaaaagaaaaagaatgttctttctttcacggtgtccacaaggctgacaagcatgattaagacggccactaaagttttcttgacaccaacattgtacttactttagatgctcttcacgagtttgcttcaaatgtaataaaaaaacttcttttag

SEQ ID NO: 61404 - DNA, 1369 bp, Arabidopsis thaliana landsberg
tttgccaagacatctaccgaaacaaaatcagaggggcagctaacacaaagcaaatacaacaacttcaagaattaaacactaaaaggcaaaccttctctgcaaggctgctttcaaattctgcgttgtgaaaaaagtttaacccagaggtggaagaattctttcggatgctcaaataagcttgtatcccaactaacactctttcaatctcatcaggaacttgctgcaaaccaaagggaaattcagcggccatacaagttaagataatagatatgaaagcagactaacaaagttggttgcagatccaacaaggatgacatcattataaaattggaaacgcatatccagtattctaatagccttcaatgtaaataatttctagaatgtatttagtccaagagcagtacctcagcgagttctgatcctccccacgggaggctggacaagatgcatataacgtaaaagtcagcttgtggctgccatgatggatttcctttctcttcatccacagtagtggcagcagatgatagcaatgtttcgaagacgacaatcaaagaagcaggttgaataaccttactgcacaactaaagaacccaactaaaacatgttagaaaatagacaaaacatctcaaaattttcacaaatactgttctatatacttcgcacttttattttttagacgctttctgtgtattagaaacatgaactaacatattaaatagacgaagcaaccatgaaacatgattagcaaccataccagggaagtcataaagcgaagcaatatacggatactgttgcagttgccagaatctaaagcgacctggcatgtttgaccaagaaaaacagtcacattagaaacaaaagtaactgagaaaacttatgttatcaatttatccttggcctttgatgtacagattagattattcacctggaaattagcgtggacactttctactagcttctggacaaaatcttcattctccaagttcaacaaaccaatcttaaacatgtggaaagacatccatcaaacttcgaagtatgtgtatcagattaaatcgaactaatttataacagggaacagggtatctcagttcaaaaatagatccaaatgctacttacacagataagaattatacacagaaaatattcaagcattctttattactcagaagttagcaaatattgatgaatactatgaataaatagattcctacaacatgttatatatgatataatagacacaaaatgatccaccttaagggcatttccactattatttgtgtttctgaagtgttcatttgtttcaagttaaatgccttccgttattgcttcgagctaattattcttcgataagaatcagttaacagatacg

SEQ ID NO: 61405 - DNA, 703 bp, Arabidopsis thaliana landsberg
gcaaaacatcgtataaaactatgctgaggatactatttggtgaagatagttaattatatttttttcactagtgtgtagtgttttatgatgtacatggatctcttccttctgattttgatgtgtttggattcagaagaatactaattcgtcaggtgaaaaatttgaagaaacgatttctaggtggctttgtcaaactcgaattattagtgatgcattaatggctaaaataaataggtacaaaataaaaagaaggggctaatgattatatggttgattaaaactaaaaagaagaattggtccaccagtgtttagcaatcaatttcatcttaaatctttgtttgccatgaatgttttttttttattttttatgatgcaagtctatttatgcggcgaactgaaattttgggagtaagatttggtattatatcgtcataagaaccgatacatttaatatttttgataatcgaaatttatcattcatttgaattttatgattaaaaactcgacgcctggaaattcagcaacatatactttttttttgataaaaactttcagcaacatattggtacaaacaaatttattggtaactaaggcagactttcttgcagtcttataaaaacacattaagagaaagtcggacataaaataaaacaccgaaaattttactttagtattctcttgaaagttacatgtaactgatcta

SEQ ID NO: 61406 - DNA, 1479 bp, Arabidopsis thaliana landsberg
gccatactctctcttatacgcatattaacacatatagttggagtataatcatgatgaaactagaattttccatgttaattatctgacggctaacataaatcatttagaaatagttgaacagtttaataattttatgtttgaatgatctataacctattttctaattatttcaagttaaaatatctctttcgtttaaattagtaagataaaaaaatattggcagtaaatataaatcattgaattcatatgaaatctcaatccttagatgaaatagtaatgtaaaatagtattttctacaatgccattaattcctggatacatgttaattattcatactttctcctaaggtcaaaggtaggtaggcattaatatatattggtctaatatgagtcttactatttttgatactataagttataaaattttgttaataaattggatatatatagtatcatgttcatttttcactttgctgttttaaaaatattatattgatgtgcactgtacgaattctcacgtagtgtgaatattagtgtgacaacctttgtttccaagttttgtaagtaacttgcttgctcagctgctaaacctctcagtgttctcactagtcattttctctaattatatggctcgacaatacttaaatgttggatacgttatcgtaaacttccagctaagaaacggtttaattatacgtagacaaattgactatttcttgaaactttagaatataaacaagtctactgatccatgaaatttaatcaacttgcagaatattctaaacaaatatcgtatactataagatacatagagcctatgtatctagtgtgtgtatttatgtaaaggcggcaatgttgcaggtcttctttaatttggtgcagaaactgcagattttacccaacgagttgcttgcttttgcttctgtttcacgcaatattatataaattttagtttgcagttaatgaaaataaattatacaaaacttgaatttacaagcaactcaaacttcagttgtatattagagcgtcttctgtcttcaagactccaacccacctctaacaataggaacatatttttcataggcattcaattatcaactcctaaattcaataacgaatggttaaatatgaaatatcattgtctatcacttccccaaatatgttcatccctccattttagagtttttttttttcatttgttttaatcacatacttagctaaaattataaaataattgtttcaaataatgattaaaaaatatgtaactgatcattaatgtcgattttgaaaataactcttcggagatgacctgttttttatggaggacactatagttttttttctccatctttaaacaattaggtttctagctatctacattcagcataaaagttaggcgtatgctatacatcacaacgtttttcagaaatcgacttagtttctgataaaaaaaaacacttcgaaatgatttacggtagtt

SEQ ID NO: 61407 - DNA, 2057 bp, Arabidopsis thaliana landsberg
tacaccttttcttttatcaattataacgactacatctttcttccttttcatgaatcgatgcagaagtagttgatagtgactttagtaaaatagaaaattatcgttgaacagcaaagcaaataaacattaccgatcgagatggaacaacatcttgaggtatctccaaatacgtgcctatgccaagtaagctgaaacaaagtttcccatgttttcctatttcacatgcgtctcatccatatgacaaacattttagtcttcgacagtaaaaaaaaaaaaaaataataataccgaagaggtttcgtagggtaaacatgaaacacgaagtgataattcaaaattgctagacaaaaagaaaaggtttcaatttaacataaacaataaaagtgaatactattgcactgtatgaaaatgaaagcattttttaactggtttatgacttgtataagagagtgaactatcttattcaagtaataaatatactgaagcatctttttcaagtattaaatatagtaaatacttgaacaatatatgtagtgaagatatctaccatggtctcaattacatttaatataaaaaaatgaaatgaagacatatgctagtgaaaaaggaagagaagtattagagcaaaaacgaagtactggtttacaaatgattgtatatatcgacctaggccttgacattcaagtacttgagttgggtccgggtctctccggtaaaagagtccattatccaagtaaattaaaaaattggcttggtttcggtttagattctattaaatttgggttggatcggatataaattttcagaagcactaaatacctgttaaaagaacttacaggtaaaaattaggatttaagataaaattttggatattcgagtattttttgattcaggatctagttagaacttttagataaagggttttgagatccaataagataaatctaatttttgagttcgaaagggggttaaatttttgggaccatttccgcttccggttaggatactcattccagtttttatgttcaaaccaacaccaatgtgttttgtcgtcagtttcaactaacaataccacttttcaagtggtcttctttgttgaagttaggtagactgcgtctgtaaaggctcattagcccaactataataaataataggtacatattaacagttctttgatctgacctaaaaaaacaaaatttgattgacgaaatagttgttatacacaaccaaaaaaaaaagattgaagaaaaagccaaatttttaggtgcgagtgaatggggaagtatcacagtaatcttgattatttgactttaatattattctaatctttttcgtttcattttattttacttttggtacaatgcaaagagactaaattagattaaaatttagggacaaagagagttcagttaatttctgctggttttttgtttaatgtccaatctaacatgtatactatcagtctatcatgtatttatttagtcatcgtaaataactaaatgtctgaattttataactacatcgcaaatatttggtgtagatgccaatttttcatcaaactactagactgctatgtttgacagtttgagtaactattttcgtaaccaaccctataaacaaaaacaatagttcatggtctaaacccaacattttttgtttacgtaactttttagataattagccaaaagatagatttgaatgtgcataagaaaaatccatgtcttgttcaccgagtctgaatgtgaataagcattacttgtctgcttccacaagtaaagtattaaactacaaaaaacataacaaatctcacaatttccaaataaagttatttaaaaccacgtgtcatgttaagatcatgacgcgaccgtccattcaatcgcggccgtccaatgaaaaaatatctaaagattgtgtggataatatctgccttcttactatgttcccgaacgttcttgaatcttgagacaagatatttttggtaagccgaaatcttctagaacttcttttgaaaaatctttcttcatataaccgccattgaacacaacttctgttttata

SEQ ID NO: 61408 - DNA, 653 bp, Arabidopsis thaliana landsberg
taaactagacacctatattaaaaatatggatagcgaacaaatcgatgcattcttataatttaaatccacacccaaaaagggtagtgggcagtctttaggcattattgccaccctttttatgcttttaccggcaaccgccatttttgcccaggatcctgaaccagctaaaaaatcaagtgacctgtttggggacaccggcataatcattacgatcgtattgattatgatacccatattagtcggcctcattttgatggtggttaaaacctctggcgtgcttaggcaactgtccaacagacggcgcctaaaagaagccgatcggctcgctgaaatcctggcagataccaatgatccggcgctgatcgccagcctggaaaaaagaaaatccgcgctggattttgcattaagtaaaagcgaattatctggtaccttacctcctgaggatacaagaggcctgattaatataaaatctaacgcaaggctgcccgttgtagaacccaagaaaaaagccgtaaaaaggccaaaggtggatccaaaactcacaaaaatggttctctggtatctgggctgcgctactttctggctcttactgggcacaacggtgggagaatacttaggaattaaaatttgggcacctgatgccgattctgtgg

SEQ ID NO: 61409 - DNA, 423 bp, Arabidopsis thaliana landsberg
gtgataatcggcacccagcataccatcgtagaagaataggataggcactcctttcttcgcaaagttataatggtcgctacggtaatagatcatttccttgtcattgggatcatcatatttgtaatccagtgcaatattggtgtacttcctgttggcagcttcattaatgggcgccaggtcggaactgagcttgtcatggccgattacatagatataattcaatgtatcttgttttcttgaagtatcacctctgccgatcatatctgtattcaggtcggcagatgctttggaaagatctactgtaggatgttctgaatagtattcagaacccagcaatcctttttcctcaccactcacggtcatgaagatcatggtgcggcggggtatatggccctgttttgcggctttggcaaatgcttctgc

SEQ ID NO: 61410 - DNA, 1291 bp, Arabidopsis thaliana landsberg
cttttgcgactttaaaagatgcagatccgtctagactttatcaaaattatttatctatataatacgttcattgtataattgtttagtttgtatgtttatgtgcaattgtgcatgacatgcgtgtatatgtatgtttttatgaaaaaaaaaagatacacggataaattttataaatatatttaaatacgtaggggccaatcaatctaaagtagataagatgaattgattagggtttgaaattttgtagcccgtgattgatctagttcacgaagtcagtcaaatacaacattgacattgcaattagttttagctctttgtataaccattaaaaaatcatcatttttaaactacattgcaaattgcaaggcaatgtttacacatttaaacatttatttatcgttgttgtatcatttaacagaaaatagtttatttcacgaaatactatgtaaagtgtaaagtatacaaagtgtagaatatacaaacatgtaacatttaatcatagatatattttgaacctaaattaatcataaagagttaacaagcgtagaactcgacaagttcgtagaccgactcggggcgtgactcatcggcgtcggcgttctccaacatccaaagcaaatgctcaaacaagacaacttcgcacgacacagagatggaaccgtcctcgctgccgcatccaccatccaccgccgctagctgctggaagagcggatggctcacaacgtcagagctcacgtggtacggcctccgtgttcggcctacgtagacagtttgaaggtcttcagaggggaacgcactcacggcggaggatcggccgtgattggtttgagcttgtggctggttaggcttggtgttgaatgaattgagtttcttcaaaactgatttcagcttcatcaatttgtttcctcctttcgccatttccgattcggtttggagaagtttgacgtcggagatgtaagtccgagtgagttttccggtgagagagatagagagagaagcgaggaagaggaatgtcgatgtcgaagagagaaaggagaatgatgttcttatataacttgctaagggtagattcgtaattatagtattatttttttcagtataatttcatggttttaataagtttgagaacgtttaggttatcaaccgatttttgaatagccattatccaatgatctaaaagtttccaagagccggaagcaattattcgacaagattatgattatgaattggaaagataaagcaaaaagtatatattaaaacatgcaaacccacatcactccgaaagggtttg

SEQ ID NO: 61411 - DNA, 229 bp, Arabidopsis thaliana landsberg
gactttgactcgcgctctttatagcacgtgtcctatactgtgcatttagctatttgcattgtggttagcttacaagatcggtttgtgtaaaataattaggataaatcaaaccagaccgatttggctaaggaggttttgtaccgaagacaatcagctatcaactgtgaattaactcatctacatcaatattctgagaaatcatttgttgggttagtgcatttaggaattt

SEQ ID NO: 61412 - DNA, 1649 bp, Arabidopsis thaliana landsberg
aaacaaaggttggcttctatttccattacacaattctccttttgcttttgcaattttgtcttatgatcattccgacttgtaaatggttaaatccatagatcgagagtatccatcttatgcggaatccagatttttgtttttgtttcatgtgtatcatatgaaagaaattatacagtctgcaaaaagcatatgtaaattgaatggtggtggtgcacaaatttgtggaaagttcaaagttatattgtttaatttgtggtgcatatatttcttgattaagtttaattttcaaggtttacgtttctttggaggctgagaattaaaggctgcctccacttagcgtgaaagaagaagagaaaaaaaattccactcaaagaaagtaataaaaagtttaacaacgatgttgttagttgacaaaagtgacaattaaaaaacttgaaatagatatttaaaattaaaaacaaggacaacgaaatgcttatagtgacagactactgataaagttctctgttctgtattatagtttccattgcctaattgtataaaaatgattgaagatgataaatcatattcatggatgataaagaacattagttattttgataatcatttccaagaactcgaagcttcgacggatgcatttaatatttattataccctaaccacatgtttcttcataaattatattttcaaaactttcttattagtatgaatagcaatcgtattaatgtcaaacattgcagtcggtttgtaaaagcatataataataactccgggccaattttcggaaatacgcgttatctggggtctgacagcaaataattaaaagtgttttaaccaaaaaaaaaaaaaaaagagacttcttcttcaaattgattcaacgcttcaatctcgattgaatcagaaagagcgatcagatcacggagaaagagatgggtcacggagaagaagataaaagcaaaggatttgcttcggaagaaggtaaccagcatcatcaatacggtacctttcaaggtgtttccaattaccctccgccgcagaattctgctccggtcactgggtttcctcaaccttctgcgccacctggcgtttacgattctggagctccttattacgctcatggatatcaaactgttccaggtagcttcacttcctgtattggatattctgatttcatattttagcagatttgggaatttaggctgaactgttgtaaaattaatagtgatcattcattgtcttcataagattctaatttgattacgggatcgtgtttgtttagctacagaaacaagttttggggttgttctttgttttaatcaaaatgttataacaagctttgatgagaattttaaagtttggagagctttgattacttctaggaacagctcagttaattagttaggttgtattggtttgtgctatggaaaatttgtaaggcttatgtagtgtctcattttctcttcttcttcttgttcaaatccaagtcaagagcataaatagatgtctgttcaaccgttcttatgtttactctttcttgattgttgtatttttcagtccatggtggtgttgatgaaggaagacctgtcagacaacgtcgccttccttgctgtggaattggtcttggatggttcctgtaagttcatttctac

SEQ ID NO: 61413 - DNA, 1547 bp, Arabidopsis thaliana landsberg
accaaagaaggaaagaggtttgttgatataaataagtttaggcatcaccgtaaaggcaaaagacgtgtgaacatcgcttattcagattctctcgtttacaaggaatccaaggcaaagcaaaacgatggcatttgaaatacatcattttctcatatgaattattaagcattcatattctatgaacgcaattcttatcttaagttatgaccattcttccaaaaatttgaaggaaagaaaggtgatgttataagtatcctagttctctggtattttagattaatttcctttacataattcaaaaatactttgtacaaaagagtcatgtacaagaaatataaaataaatgtttgtaaatcatatatatatacaccagtttgttgggcggacaacgttgaaattatttcgctctttaaaacatagtagatgatcacttggttggttattatggagattggaattgcaataaaatcaaatcatgtatggtacggcagctacccctagattattcttggtgattccaatgaaattatgagctcctcggagcactctcgttttcaagattacatatgaaaccgtttgggtatatttgagtttcagaatgctgtataaatgtaataaattattaaatttttatatttattttatctatatcaacaataagtatacttttttccctagatgacttaaattcaaagcaaataaacaataacaatcagtttgaagattatttttcctaaatataaatataattgtataaactttaattagatttttaaaataataagctaattcaggatattcaaaatatatagagaaatcttattaaaaaaaaaaattagttgaaaggaaatagttaacctaataaaagcaagtaatcaaagcccaaaaatttacaattaaaacccttagtgataaggattaagtgtcattagtagttaataaataaatgttgtagatagatggagtcactaaaaaaaaaaaaggtcaaaacgagaggcgcaaggtttggtgtcttgttaaataaatcttgtggtgctcgtgttacctctttagccaaacaacacccccaaacaattactcttatagagagagtagaagaagacgacgcttaccccaaaactcgaatccctaggaggtaacagcttaagctctccgattaccccaaactgcaaaatttctcatctttctctctctttatcttgttttcaacagcagcctttacctttttcttttaacctctgatcttgttatcttccatggatccatttccttaaaggtttgctctttctttcagagatattcttatctctacgaatctcatcttgatttgggttcttcttttttgtgtggtttaataaatcacaaatctgtttttttctatcttggatttacttaaaaatcttgtttttaataaagggttttcttttatttcagtcatttaaagatacccttattctagagtttagtagttgtgtttcaaattttaagtctttatgtgtttggctggtaagaactataaaaaagcttgcatgggttttgacttatga

SEQ ID NO: 61414 - DNA, 591 bp, Arabidopsis thaliana landsberg
  unsure (1)..(591): unsure at all n locations
tttttttctacctttttcgctaacgtattttttggactcatttgcgctagtttatataaaccttgttataaccatttaaattcgtatacgtacgtacggagcaatacaagaaacacatataaagcaaaatcctatagaccacaaaagatagaagaaatagtgtgtggtcaaaatcatggttactcaaaaagcaagatcaagaacaagggattaaatttctagggtttttcctaaggacgaagaaggagagagactttacgaaattagggcaaaaaaggagcgttgcactttggtttggatatcattgccataaggaagcataagtcgctcttgtaatagttactcaacacatgtctccatttttagtgctcattattttgacctaattttcttctctctctcctcttttgacaactcctatacaccaaaataggcaatttaacatcattggtcttctatttcttgtctttcttctaaaccccacggtttcttcgacattttcttaccaagcccttcaacggccttgattngatcttagctaggaaatatgagctgggatacgataatgacttcctcaacgttctctttatg

SEQ ID NO: 61415 - DNA, 1496 bp, Arabidopsis thaliana landsberg
tgtaatgttccaaatatgatatctagttgcctcaaaatgaattctatccttgtaaccaatttattgctttaagtgaatatgtgttgaaaaaaaaaaccctttttcattcccacgacccgtatgattatcttaatcagatactctttcgaatgagctcaagtacaccaattaggaagaggacataagattcaagtgcgtaaacaaaaatagcacactataaaaagcaaaaagcaagaaaatcaatttgtaaagagaagttaggaatatgtcattttcttaaggcccttctcccaaaatagttaattatactaaaaaggtactttacaactaggataaacatgttcatcaatcgtccacatttcccattttattcaattaatattttcgcattcttagaagtctcacttcgtaaccacttgcttcgggattaacacaatactgtctggtgtcgagttacagactatgtataataggagtatctgaccaagacgtggtttgtttcaaaacctaggaggatgcacacgtctgcatagagagtggtacgacaggctaacatgtaacgcacgttcacaagttatccagattactctaacaaatataaaagtccagatttacacgtgtcacgtttatcaattggtctgcaaaaatcaaaaagcactaactctaaagaaaagtcgcatcttgtcacaaatcaatcaaaattttatatcagccactcacttatgttctttgacctttgagcttgtttagtagattcaagtatttctctcacaaattgtcaatgcatgcatatggcactggcacaactattttagaaaatttaataaatattttagtagctcacttacacaattagttgtattagaagtaaacgaattaacgtatatcctttttttttttttgttaaagaaacgaattaacgtatatttttgtttgtcatcccctttaacgtatatcatgtacattcttaacgtatattgggtatttgaatcagttatgatctttgttcaagcaaaataagaaacagagaaacaataataatgatagctcatggaaacatatgtttgccatattctcgttgacttatgtcttgaacagaaaaatgtacatctttatgttatcctcaaaggacaagtgacgaattctcaattttgctatatcccatcttctattttacacattttttagctatttacgttaaatcgtttataataccgctttgtgtcatcatttagagttaacgttttttttttggaactaatgactatagttttctgttttgttctatagattatatattaattcttttttttttctttgacaatataacagatttatgtgttttattgacaaataatgaaaaatgtataacagattatataataaagttaatgtataatttggttgtgggttggaaaaggaaagaggaagagagaaaaaagggaggaagaaaaggagtgatgtagagttgtgtgtgtgcggcatactgccatact

SEQ ID NO: 61416 - DNA, 1529 bp, Arabidopsis thaliana landsberg
aagactaatggagtttcccaggaatcgaaacaaaaggaaatagggcgacatcaacaacgtatgcgattagggcaccgaattggagaaccgctgtgttgttctggaccatctctctgaaagtcttctactctcttttccgaatgggtattcgaaattcgccatccccttcatctccttcatcaggtaaaaatcatttttttaagctcttgagggttgtttatttatcaatcactgacttttcctttccatgtctcgaaattaagtaccttttgatgttttaatttttctaaccccgatctgattaattaactaaattgtgtgtctgtggtttttttaatgaatatgggtttcgtaaatggaagatcgatgttgacttgctaactgaagggttcatcagcactgtctagttatggttgcgtaaagaactagtttttaattttctatgttttttgtacttaagattttgagtttgctattggttctttaagccgaacttagtttttagggatcaaatgggtacttacatcaccgttctttatttgttcatcaacatgtttcttattgataaaagcaaaacttggtatgcttctagaagcttcttaagccaacaagattagtggttcaaatgcagaacattctagattgaatatctgatgcaaagggaaatgcttgatttggggatctagtgcctttgtttaagggttttctttatctgtatcaagattgtatctgaggtaaatggttattcatagcaataattagtcggattggtatgtttcagattcctttgtctcctatgcggagcaaagtactaggttgtacaataagatggaacaggatttacaagaaaacggacccgtgtttcttaaacaaggtgaaacgtctcagtcattgtcactttcagatctcttcacactgaaagatggaaagatagcacctgtccttaaggtagaatgttatatccttacttttactattgttagaatggaataatggtttgtataacgatagctaaatatcatgtatgattgtataaaatattcaggttgcgaatccccctgtgcgagctaatgtattacatctcagcacagaatactctgtcccagtctcgtgagtgtgtaacttgccccttctcaatctcaatgcaaatttaccctcttttcaaaatgttctactgctaaaaggtgtccttctatgttttattgcagggaagtcgtaaaaaatgtgttcagtccttacttcgaaaatagtaagcctgccgctattaccatatatgtgaattatatataatgccgttaattgtattttcttctctcatactttgtttttttttagcaatttggtttcaggactctaagatgtaccacttcagcatgtttcatgcatcgaatcacattttctctgttccagctactgaagttgaggtctgttgtttttactttatcatttatcttatcatcagtccacttttatcttgtgaagattctagtctctgaatctctttttcattatcaggttgaagcagaagc

SEQ ID NO: 61417 - DNA, 554 bp, Arabidopsis thaliana landsberg
aaaactacagcgtaactaaacatattaacatacacacaaattgatcttactcacgcgagtacaagaatataataaaaatggtatttagccatacatgttcttgattttcttttgtgatcgttttaagaaaaaatgtcaaagaataataccgcagaatagcgacatccaaagaataattgacatttcgctctctcttaaaatccctatcacagaattagatagttttaatggtctttgttttttggtcatcttgttttatttagctgtggttatgaaaagtttattattattccataacattacaatccaaaacacttgaagattggtgaaaaaaaaaaaacttgaagacaaaaatatggtttaaaaaaaggtaaaactaagtagataaattaaggttagtcaagtcaatcttaagacttggcattctccaacacatatttttcttggaatatatatatatatatatatatatatatatatatgcataattattaacttagagctagatgaaattatatatttcttgaagcattgacatgaaagaaaaatgactt

SEQ ID NO: 61418 - DNA, 507 bp, Arabidopsis thaliana landsberg
aatgcaacgtgcttcatgcattctggcaaactgcctggtgctcatgttctaatgtaatacctggctggacaaagctgctcgagaatcaaggattgagttgcactctgcctaagggtaacgctgtacctttttcgacctgaacatcctcgaaatgcagctaatgactttcagtttgaaaatatatttgcaggacaacttgggtccgatctactacggcaaaagtgccaacacttttatagactgtcttacatcaaacatgttactttgactaccgttattggtaacctatgatcctacttgtcttactattatgcctgttaacactcatataccatctttactatgggcaacagattatggacatattacaattgtcttgaattacataatgatgtaagagcatgaactgcttatatgcatcacgtaacatttataaggcagtttcagggttcttttcgatctcgacgacgatagtactagagaatacatcggaggctatccttcttt

SEQ ID NO: 61419 - DNA, 1352 bp, Arabidopsis thaliana landsberg
catcttactctaatgtcacgttatctacgttctatattccatgggttcttatggatgccattttttttgagcagcggtatcatgcctactttatggaagatctcaagtcatggatggtcatttcagctggtttgtcttacatctatgtgattttttttactttgtagtcacggtttattagatttctcttgccattcgatatggtggtacagccaattctgagcttgtgtggaagtttctgtgtaatatcctgtaacaacatgggaaaaaacagatatgttatatgcatatgaatctaagagcatatctgttagtggattagtgtagaattagaaagagtgattgcattttgagtgttttcgacctgagggaagtcaaattgcgtctttgctagtacagtaagataaaacaaattatggtcatactgaaaccttactgccttcagaagactttgttgctttatcttcaattcatttttggcttcgcatgttatttgattactagaacaataaatcttttatcactggatttttggatcagagtggatcgctatcatggcttgctccctctccattgtcgggctacgagataagaagaatgatcatagacgatggttctggtactcttgtgttgttggatctgcattgaccatcttttggctttattacttgctgaggtacactagagagtatacatttcttttcttttcgatacaatcttgcacttcgcaaactttcattattataatgccattgttagtggcatgaatccttgtgttagtcgtttatgctgtattcaacatgaaggacatttcttgtctattccttccattcgtgctctttgtaaatttatgcttataaatctcacccgtgttctaggcttccgaaattccggtgggatgctatctggcttccgtttgggccgctttggtatgtgtatctatcgcttagatataaccttgtgttgttttatatgcccctgtgtatgtaaaactaaagtttgcatcaacttttctgtacttcgaaattgcagtggagctggaatttgtctatacgtggaccatcttctagaggagtcatctgaggaagtgaaaaaactgaggaactatatgtatgcatataaagcacggtagagagataatagctactttcaaacctcgtcagagtgaatttgtgatagcaagagtgcaagttttgactctattatcccctaaagaacattcttctgttgttgtaaatagatacgaaactctgaagttcgttttgtttaaaaactcatgattgactcgaactagattccagttcatacatgtaatactcttgatttattcaagcaattcacttagagaggtg

SEQ ID NO: 61420 - DNA, 379 bp, Arabidopsis thaliana landsberg
tagctcacttatctgtaggatatatattcacttatgcggatttcttgattgcctccacatcgggcaaattcggttaattattaatgtattctatccgcaatcatatattttttttaataaaaaaaatataggtatgcactcttatatttatttctacatctaggatccgatttgtatcattatcattgataataagaggaactgaagcattatggcaaagaaaagtttgatttatagggagaagaagaggcaaaaattggaaaaaaaatatcatttgattcgtcgatcctcaaaaaaggaaataagtaagattccgtcgctaagtgagaaatggaaaattcatggaaaattacaatccccaccgtgtaataattgcacc

SEQ ID NO: 61421 - DNA, 751 bp, Arabidopsis thaliana landsberg
ctataaaattaaactcgtaaactcatataatttacacggtaattaggttttattgacggatgcaaaaactatccacaagcatattatgctcttttcgacaagacacagtccttttatctagtgcaaatgcataatcataaatattgctcattcttttcataaagttagtttggcatttccgagaaattaggtagagaagaccttaccttaccgtctgtcttttatcgaacaaaaaaagttgtggatggtaagctaatcatttaaggaatttttagatacttcttttgtataaatggtcgaacatatagtacttgtttatagcaaaagaaataaaatagtaatatagtactctctcatcattaaacattagataactatctttatcttaatgtacttatgtagctagtaaaacatcaaaccagacctacaatttgatcaagagtgaaatattttatttttgaatagtgaagatcttagagaatttttgaagatttgaagaaaggaaaatgatacgcgcatatatgcagcatatacatactggcatcacacgaaacaaacaagcaatttgaatttaggaatactaattacttccgattcgtaatcattgcaatgattagcataaatcgagttatgctataacttaattatataaaggtagcaacatgtattacttaatattctaaggtgtgatacttttagaaattcagttttttggattagattaaatattactaaaaaggttagaaactta

SEQ ID NO: 61422 - DNA, 567 bp, Arabidopsis thaliana landsberg
acaacaccatatcaagatcttcagatcaaacccgttaaatggattgacgaggtcctgcaaattgcgctgcaatacgctccggagcccttgccggatgtggctccggagattgtcgcgaaggaagaaaagcgagagtctgactctaaggaaagaattagcacgcattaatacgcatttgcctggggggcttccttgacagttttttagagcccttgttataaagcggctcttaagtgtctgcaggccattcagcactcgtttttgctttcaccaaaaaaacttagaatcatctcaaatagatataaggggacttagagtgaacaagtcggaactgattgatgctatcgctgcatccgctgatatcccgaaagctgctgctggccgtgcgctggacgctgtaatcgaatccgtcactggtgctctgaaggctggcgactctgttgttctggttggtttcggcaccttctccgggaccgatcgtcctgctcgtatcggtcgcaacccgcaaaccggtaagaagctggaaatcgctgctgcccaaaagccaagctttaaagctgggaaaag

SEQ ID NO: 61423 - DNA, 736 bp, Arabidopsis thaliana landsberg
caaacgacggttgtgtttatggggcattggtacaagaggtgattttttatagatatgaggagggtaattcagtaaattaaagtgtatactgaaacgccttggagttgtggggacgtttcttctaataataatagctagtgggaacgagtgacttctgcctaccaactaactcatttattgccttcaaatttcgtttttgttttgtttaaaattaaaaaccaaaaaccaatttccaaattcagaaattcgattttattttatttatttgttttggtccagtgaatgattattttcagtaatttgaaacaaagtttcagacaatgaatcatgtttcagtttctgaattttagcacattttagaaactatgcatcgctttgatcttgttttttctttgataagctttaaaaaaattgggtacagttcagaatcaatgtaaaactaaaaagtttaatatgtcaaataagaaactaagctttattttcgaaattgcctttttcttttaactataatggttagttgtgaaagctatttttttgtttaaaggttttttttataacttgggctgcttataaagaggagaccggtaatcatatagtgaaaataaatgctaatgtaaggatacttggcagagatatttggtgggggtaatacccctaaataagaatgttacttgacaattggatcaatattagcaacttgggcttttaagtttaattccctcgaaaatagattcgg

SEQ ID NO: 61424 - DNA, 843 bp, Arabidopsis thaliana landsberg
tctctttgttcaaatcttcataatcttcctctcctttgggatgagtatcaatccgaccacaatccggcgagtttttcggtggtgtgtcgatgcctttccgctgaatatctatttaagtgagtctctttgttctttgattgtaatggactctcatctacatcgtcgattcgttttcgacatgaatttctttttgagagatgatttacaatcccgaatctaggatcctggagactcaaatgttggattagatgatggcaggattaagattcagacagatcttatcgttaaacatcatctccatctatgttcagcgagtattggcctctttctctcactcatggaagcaaggataaagttcgatgatgacgtcttttcattcttgtgctcgaaaatctttacgctaccaactgttctttttggatataaagattgattttatggatccaaaaatcccttgttaaacagattttccggtacgttatggtggctttggaggcagttaatcttactctgagggaataaaaaaatcatcgactacaccaataaaatcgctttttatcgaagtcatatgaagaaattacaaaatcttttcaattctggccattgaaatataccaacaaaggaatcgagattatggatctatcacgggtgatatttacaaccaatatcgaaccatcgcctaacgcgggtaatggaaatgtttgtgtggttagcgatgtaactgatggatcgcaaccctttgattttcagaaaaagttttggtgctatgtaaaaaagaagatagcccaacaaggagatcaaaatagaccggtgacgaaggaggtaaaagaaaataagagattg

SEQ ID NO: 61425 - DNA, 1634 bp, Arabidopsis thaliana landsberg
  unsure (1)..(1634): unsure at all n locations
tgttcggttgcatatctttcttgagtaatcatttgacatcgtttctttttattgattcaccagtaagtttttgggttgagtgttgatattgtagtaaggaaacaaagaaagtggggaagaaagagcatcacttgtggaagaagaatgactctgctgggtctggacagaaagcacttaatcttgttcgaatggtaagtgaggaaaagttctgttaaaacatatgttttcataagtgaaacgatgataaagtagtccttgttgatatgtagctctctggactcccaaatgaaaaagaggctgtttatggagctttgaataaatgggtagcttgggaggttgaatttcccattattgctgcagctaaggctttgcaaatcttaagaaagagaagtcagtggcatcgtgtgattcaagtaagtaatacggcttcctatgtcaagtgtaaagatttgctaaatatggtgtcctgagttgattggtttagtgacaaactcagttggctaagtggatgttaagcaaagggcatggtgctacaatgggaacatacgatatcctcttattggcatttgatatggacgaaagggctgttgaggcagagtccttatggaacatgattctgcacacacatacacgatccatcccaagacgcttgttcgctaggatgatagcgttgtatgctcaccatgacctttacgataaggttatcgaggtaaaacaaggttctttcttccctcgagaatttatcttgatcttacacttaagatactcctcaagatactatacacctctctgcaagaagtatgacgtggttctaagatacattttctttcggttgttctcttttaggtctttgcagacatggaagagctgaaggtgagcccagacgaagactctgcgaggagagtggcacgagccttcagggaactcaaccaagaagaaaatcgaaaactgatccttagaaggtacctctctgaatacaaatacatctacttcaatggtgagcgggttagagtcaaaagatatttctctgaagatagttgatttcattcttatgaacacacacaaccacacacatgtatatgtagaagttacccccaagttttttacccttgattgtaatttctaatttgtgaattcatcaagaagatggtaaaatgaatctccatttataaagttatcttttattctcgagaaaacaaacgaattgtcaaatgttcaatgacactcatgctttatagtgttcataattccttgcatgtggttggtagtgtagtagatatgatcattttttctgttctattttttgaaatgtttctttatttgaaaaagaatccagcatggctgctttaacttatttgctctgtcacaaaaccccacaagatcatgcttcaaatttatgagtcactgactccaaacctcaaagtcacattataacagcaaattcatttataagtttttctactggaccactctacatcattacttaccaaatctattttaaaatcgtcttataaatcctttgggtggctacttagnacagaaaggtagaaactgtgtggccaatgcttcacaatttattcccaagagattattttctactgtgtactgaccagaagagatgcttgacaaaagac

SEQ ID NO: 61426 - DNA, 615 bp, Arabidopsis thaliana landsberg
atgatgctgtttgtcttgtgatgcaattaatatatgtaatatagtattatcgtggaaacatattattcacatattttagctatctttttttttgtagtccatgatttcaatctatacagctgctaagcatattatttattgatgtgaaagagaagctaaacaacccctttttactttgcttttacctaaatataggtagaacatttttttaatatatgtactaagcatacaaaataggactacaaaatttatctatcatatatggttatgttgatttgaaaattaaaataaagtaaaagacattctagtaattaccaatcagagaatattttggcttattgattaacatagtaattaagattttgtgaaaagctaaagaatctaaatatcttttggccgacagataaagacaaggacgtaagcctattagattaaacgcattcaacggtcaaaactagtgttgtgttttaatattaggatttagagtgcattatgaataacaaagatagaattgaatatgcaaccaaaaaggtgaaagaaagtaaactctaatttgattgattacttctattaagtggtaaatcaaagaagcaagggggacaccaaacaccaatg

SEQ ID NO: 61427 - DNA, 1318 bp, Arabidopsis thaliana landsberg
gaaagaatatgatccgttagttgagtcgatcattctaataagagcaatcacgaatgatccacaccacctacaatctcatacgtacttgtccagcttcactgcacctaccatatccttaatttagttggcagatattatgtagatatatgtatatttcaacttggtgttctccacaaccacccatacatacaactttcgacaattgatgagacaagtatacaaataggttgggttttaaagcatttagtactatcctaaatagaaacgagaagggatcatttaatgatgaccttgaggaaataaagttggtttgcatttagtttcccattgatatttatgtgaatagtgaccatacgtaactgtaccatacttttatgtttccaccatcagggcaacacaataaaattgaattgccatctaaaataaagcaaaaagatttactattattattttcttactcatgcatgtactcccaatctcccatagatattttcgaaggtatttttgtggtaacgtacaagtcttggcttcgtaatctaaataccgaaaaaagtaaatgcctctaacttcccttcctctctctatatatttcaaccactctctgtctctcttcctctttgtagtttctcaaatattttcttcagagttggcacgacctcattaataataatcttctctacacctatcaataagagatatattttaagagtttcactttggtgcacacacaaagctcgtacaacattcttcgtatatggctcttcgtcgctgcttacctcaatcttcaacaacttcatcttatctctccaaggctcgtactttctccaatataccatcatactgttcttttttctttttctttttttttctatacactaaggaaactgtacaacttacataattttattttatttttatgtaatagtaaaaataaaagacatttgctttgtttgtaataacacagatctggggatttcgtatgcatgggaccaaggcagcagcttctgttgtagaagaacatgtctcgggggcagaacggtaacagtaacctccaatcaaattcaacatttgtccgttcttattcattgttaccatttacaagaaatatgcaagaaacaaaatgggggaaaaattaaaggaaataaaaaaaataaaaaatagatgctaaaattgtatacttttagaaaaaaatattgcgtgacggaaagcgcttattggtgggtggttgcacaatgcagctcaagcccgtgatcgtttcgatggagtaaacaaattttgtaaaaaaaagtgtagtatggtttttaaaaaaatcagtaaa

SEQ ID NO: 61428 - DNA, 617 bp, Arabidopsis thaliana landsberg
acaatgcttaattaaatggattactgattaattgagattatggaaagagaacaaagttgtttgaactttgctttaatgaactgattcgtcactataattaatgttcgacgtattattttatggttgcacataaaaaggagtaaagatgatgtagtggatgatgaccgtaccctcacgattcttaatttcagttttgtttgttttatttatttatttttgttaaaaatttcagttttgttttgtcactaatttttttaaggctggtatgagtgcacgtcctaacaagaaaccacaactcatttagaagaaaaccggcctaattaattttttaaatggaaccaaattctggattagaatgttatagatagcataatttatcttgttaaacaccgctatatatttttctattacaaaatgagagtcaagctgtatattaatacaaaacaatcatagtaaacctgttgggccggttaaactcttgaatgggcttcgtagttagttagtacacgtaatagacattagaatcaacaacatactgtaccattaacatttgcctcgggcctatgttttaacttacttgggaggctttataaatgttttgggcttatttataaaaa

SEQ ID NO: 61429 - DNA, 439 bp, Arabidopsis thaliana landsberg
gaattctggttgtactgttatgtgctgtttagtctcatcacatggtattctctcgagatcacgcatgagataatggcaaatcaaaggtatatcgacaagcggattaattaataaataatggctgccaactagaccagctaatcaacgtatcacactgcgctctctgtgggaatgttttagaccgcccgagcttcataatattccacaaccatggtcgtcgtttggagaatccccttgtcacttctcccgtcatcgatacttgacttgacatccaagctgccccccgactttccctcccgccgccacccgaagccaccctcagcttcagccgttgtgctgaaggggtcgtcgaattgggtgtagggtgccctgttggctgatcttccttccgtgccttcttcgatagttcggagcctcgtgacccgaggagaggcctgtt

SEQ ID NO: 61430 - DNA, 1731 bp, Arabidopsis thaliana landsberg
gaatagaaacaaaaaaggtgctaaggataaaaaatatctcgttcacttacatttctgtgaagcaactgctgctgtaggcgcttcgtcttgcgatatgagactcttcagtgtaaaagctgcataatgtcaaacaccaacagaaccatattgatgtgaaaaagacggttctcgatgttatgggataatgtaagttaaatccacgagcaaactatttagggggacaaactcctaaacatccctcagaagaaagccaacaaactagacgtttgcttcttctgagcaactactgtaaaagataaaaggatgtaacaaggatttaccttttcttgtcgtggcagcagttacagctggttcatgatcctcattgctattaaaagatgcattattagactcggtatggtgttcacttacagaagaagactgactcttctttccaaatttcaacagttttctgagcccttttgacgctgactccttcgtttgagatttctccgaggcctcacttatcttcttctctggtacaaggactttgacagtttcttgctctgtctcatttgaatataagcttggtggaggtgcttgggaacagtccgagtacactgtacatggatcttctaacgaagaaacccgagcatatggagcttcatatggtttcgcaacaatactttgacttgtcagaaactttggtgtttctgttactaagtcactcagagtctccaatctaacctgaaagcaaaataaccattcctttcatcaaaaccgttgaaacaaaaattaaaattgactcagctagaataagagtacttactaagactagatcattgccacactcctgcattgtttcaatgccttccttatcaactccttctcgaatggtggagttttcagagactacatcagacttctcgtgttttacctgatctctacttatacttcgagctgaacttggcaacaccatcactactgtcttctcaaccactggagtttcatcaatatcattttggcacaaggatttgttcttgttaccacttggttcaatcccagacgctgatgatttagttttctcgacccctttcaccataacattagaaggacctttggttggttttatcttcagttccggaagagatgcaatttttgctatatcatagttaacaatggcagatagtttctttatctcaggagcgtcagatgcttttcttgatgctattgtgcgccgtggcctcactgacgaacttggtgcactagtattacccatttttggttctgataatcgtcttgtctgtgaaaccgacttgttctgcgtatctagactaactctggtttccctcttagacaaaggtaatggtgaaatcgacctggttagcctaattcctgttgctatgctttctctcttagctggaggtaacggtgatatcgaccttgttagcatatttcatgttggcttacttacggcactcagtttaccatttttggggaatttctgaaagtcatttgtccataaagaagtagttcttctagcgagacgtttaataggttacaatcaccgtggttcagagtcgctgggcttaaaggctctagcaccgggagaaaacttgtttagtatttgtttttttgtttgttgtgcaggcaactgtgactgccctacagctgagttgcttttgaaagcaatccgcttttgaaaaaatttttcaaaaatcgatgcgcttcctgtcttcctcttcctggggg

SEQ ID NO: 61431 - DNA, 417 bp, Arabidopsis thaliana landsberg
atcagactttgatacatgaaaacacatgttttggaattttacctcgtaggaacgaatcatcaactgtgaattgttcttctgaagtgctcccccaggccggcttgctaagattcgatgaggttagtaagaaccatctgtggaagcaaaacaagaacattaatcacaaaaggtactaacagagcaactacagattgagacttgatgaactttacgcaatcttctggtcgttgtaacgtgtgaacgtctttatatgtggcatggcacgactgttacattaaaaaggatcagaattgagtagtactcataagttggatttgtaaaggtttggtttttctaaattacccgcgagcgctatgatccgctttccatctagcccaatactttttcaagaatggtttctccacgttttttcaatgg

SEQ ID NO: 61432 - DNA, 605 bp, Arabidopsis thaliana landsberg
  unsure (1)..(605): unsure at all n locations
ttctttgattttttgacataacctcgggtcttttctggagagcaaataaacctacgtaattcaatcccccttttttttcccctcataataccaccaatagctttttatatattctgatattttcttttttgaaaagaagacggacctgctgcgcgcatgtcctctcttcgagttttctgttcttcgcgatcccccctaggctgtgtcggcccttcacgaccccggtcgcggactccatccacatctattcttcctgtgattgctctgcagctgcagtgtcccgctgtagctgaactactcgtaagactggcgggcccaacccccaccaacacccgccgcccctcctcaactttctccctcgctgcgcaaagaaccaccatacaaccatcacataacactaccacatcacagtcgcggacggcacaggtagcacgtcatatctcggcgtcttcgacctcaccctctattctaaacttaaatacctcttcccgccgctatctcactggaaaccacagctccgaaatggcctnccatatagcgtccgcaagatcggcgcagcgaacactctcgagcaccgcgtctacatcgagaaggatggcgtcccc

SEQ ID NO: 61433 - DNA, 576 bp, Arabidopsis thaliana landsberg
tcttgtcgtgaggccgccgtaactcgtggcgaccactttctgcgtgacgtttttcttctctattttctgcgtgttcttgagccgagcgatctccgcgtcgacattttccttaagctgctcggttacgtacacgcccaaatcgcgatactgccccaaaaaactcttggcgactgtcattgatttgtcgtagacaacgtcttgccacaccccatccttcaagtcgatggtggagaatttatagacaacatagtagttgtcagcgtcctcggtgaccgacgtgatctgcgcctgcggcgaataagtgttgagatccttgttcgcgatgtaggtgttgcctatcgagaccgtcgattcgctctgcgaatagatcgcatcgggatttgtcgcggcgaaggtgcttcccgcacccaagatgagtaccgagatcgcaatcggcactgcgttgttgcactgaagaaagttcaggagtcgcataaccctgtccctcaagtatagcactgtgccgtacgaggggtggagcgctagagacgctccattaaggcgctgcatccgtatagtcgggcttcaaaagcagcg

SEQ ID NO: 61434 - DNA, 499 bp, Arabidopsis thaliana landsberg
  unsure (1)..(499): unsure at all n locations
tcaccgcagcgctgggcgcaataccgccctctagaatctcatcccatcccatgaatttttatcctttcgacagcacgatcttctccagccgtttttcaaaataggcctgtacctcatccatcgttttcaggcctttgcgctgcatgagcgcttttacctgttcacttttctcccagaaattcttggggcattcatcgcctcccacatgtatgtactcaaagggaaacagttccgccacctgggtcattaccttgtcgagaaattcatatactttttcattcgcgggacaaagcgtattatccaccagtgccgtaggtggattgccttttgaccagtccatgatcacttccccggaacgcacgcggtatttatcagcgccttcggtgcatgagagttcgggatacgatacgatggctgcaaggctatgccccggcacatctatctcgggcatgatatccacgaaacgttctttggcnnnnnnnnnnnnnnnnnnnatatc

SEQ ID NO: 61435 - DNA, 1842 bp, Arabidopsis thaliana landsberg
atcagcaggcatcaaagtgacctgaagatgcggatgatttgcaagaagcctaacgatctgcaattcaataaataagagtaaacttaccatctcatgggtttgaatgaaaccttgaatgcctcatccattctttaccttgtaattttaaacaactttaaagcaacgactataagacttttctctttcttttatcgagaaaagcttaactttgcatatgtttacagcttaagctaaattagaaggccaatacccataaagtcaaaaacttgcaacaagatgcataccacttaagctctgattcattgcaaaaccaaagagatcactaaaacaaacaattccaagaaaattaaacttgaaacagacagattcaacattgcacaaacctcagcaccagtgtagccacttgcaccaagaagaccaatcctaatatccttttcaggtttaacagaactactagctgaaactctgaagctcattgaagatggcgaagccacatgggatcccaaagtaagcctcttggctcgcttatccgctacacgaattttcctttcgcccttttcaaaacaaagaaaacccacatttacatgattatcagattgcaataacacaacacaagctacaatgagcttgaatgtggattcagtgggaaaaaaaacagagattttgaagagttttaggaattgaccttgaaccagcatccttggattgaactaaaagccgacgcagtactcattattggattcgattctgcaaaaaacaaaattcaggaacaaaaaaagactaatctttttgctaagaacaagaagaaattagcttctctcaatgtgatttgatattgagagtcaattatggtagtgatgaaacaaatacccgtaaactcttcgtcactctctctctctatacgaagtggtcggagaagttcgacggagaagaagacagcagaaaaccacgacaaagattgtgggacgaaaacgcaagaacgacgacgtttcagctagccctacttaaaacctatcaaagcggtgccgtttcagggatcgaacccgtttactgaacaggctacccgtggttcaacccggtttatcgacgaattaatcgtttgcagaaaacgcgatatgtcttggcgtttgcatcgggtgacgacaaaaatctggcattttggtaattcccagactaagagtaaaggcattcatgtcaattacttgagtaagcgccgaagcggttagatgaatttgtttcaatggagtcaaaagaaaatctagagaaaaagctccgacctttttatttcctctctgtttcttcttgtgtcatcgtcaaatcaaatccaatcactaacagtagaaactgtttctctactgggtatttttttttggcaacccttaaattctgaagtaagagagaagaagaagaaagtgtgagattccgacgaacgggaagaaaaatgataaattttcgcagcatgaatcaagcttcttcgaggataaggatcgctctttcgggtcggattgaaacagctttagagaatatctacagaaaacacaatcttactccgattaatgatgagacgagacagagactgtcttcgattcctgagaatttgggttttgagttggtcaggaaagtttttagtttgcaggctggtttgatatacaacctcgacagcttcatcgtttctaaggttaaccaagccgttagttttactggctatccacagccggcgaactctcttagcccctctggaagacacgtgtcccgggttcttcaaggttagtatcagaatcaaactctctttgcatgtaaaaatgtgaatttggatagtaaaaatctttacttttcttatga

SEQ ID NO: 61436 - DNA, 1570 bp, Arabidopsis thaliana landsberg
tgcatcagtatcagacaattacaaattatgtttactgcaaactaccacaccacatcaccaaggtgaatatgacaaggaggctagcaaaatattggcgagaaacacacatgtaactagtacaattcagaaatcttccactaccaaaaagtctcaccttctcaagaatagtactaagaagtccaactccaattggcctcatgttttcaaactgaatagtgcttatctgaataatttggtagatcttgttagaattctctcagggcattttccagaatacttgaaatggttctttacaaagtaattccttttgtttacctgataagcaagagatattagctcttgtagttgaaggactaacaagtcacctgagctttgtctattagaagcaagattcctcgccaataaaatatcaaaatgagcagcatcattgcctacagcctctggcaaaagactcaaacacctacagttgaaaatcaattgggctaatttagaacacgaacaaatataaactcttatgcagtttgactgagagctgcaaccattaagttattaagtgctcaggattaactaaacgttcagatttcatttaatattggctcaatgctgaaacccttgaagaacttgtgaaaatttggttctgcgtcaacatacatttttgaaatatcagttgaaattttattttccatcaaattttagttatggtcacaaactacttcagagcattagttaaaaaatatttatgtcaacagtattcactagagaggtagggtaagaacaaagaaacatctcccacttactcagctgcaaaaactctggttcgatatctcaaggttttgtctttatcaggattggcccgtatagatttcccactagagctagaaaccatgtcttcatcatcatcgccaaggttctctcttgtgtaagcaggatcattttctgcaatgctcgtttcagcactccttccagcggatgctgcaagggcctatcagcagagtaagtaataaatctccattgattgtgggaataaaaggcagatctcgagatataatagcagatgaaaattcaaaactgctagtaacattttgaacaaacggcagcaatcatgagaaaacaaataaattgccatggtcccatttcagatagttcatactgcagcatgaaaagtccatagaaaaccaagattttagtatgaaaaactcattgctattaccatgttgcggcatatcaacatccatcgagatgggcgtgatgggcatgttgcataaagcaggcgtatcaaggtactacggatcaggttcccaatcctacaagagcacaacatctctaggtcatcaataaagcaagttaatcaaaaccttacataagaaattaacattccataaaacaacaacatttactgaaagaacaatttcttactcagaatcagtttcttcatccaacatctgaaataagttatcctctatttgctcatcaatgacagaaacctaaaacacacaagaatgcgataaattccgatggtgccatttattctaagacgatgaatctggaaataaaatttgggtcaagcatg

SEQ ID NO: 61437 - DNA, 1320 bp, Arabidopsis thaliana landsberg
atattaaaacctttatagctaaaaacacagtttaaaaaaccataaatattttgttattttacataaaaatataatcatctaacatttatttaaaaattttaaccaatagaaaaagttagtggaatggaaataatcataatatactaaataaccataaattatgaaaaaaatatttatcttttatttagtaaaaaaatttaataaaatgaaacaagaattttttttgaaaatatatatttatttagttgtgaagttttttttcctctcttttccaatgatatatagattttttattagacgaaaaaaaacaacaatttaaatttgttctatttacaaggcaaagattgatatctgagtcatatttggggaatgttgacataaatactttcgataacaaaaaaaaatatactcataaaacagaacaaacctcagaaacagaatttaattaaaaacccacaaaatgaatctaagatagtttgctttacaattcaaaaaccagagattattcaatccctaaatccagagatcgaactctcgatcatgttatcgaatcatctccagaacgggatcgaatccgataacctaatgtggtctcgtgtacctgaatccgatgatacttccaccgacgatattactctactcaactctcaccgtgacggtgacggaggtgtcaatagtctcgattacgaagtcatcgagaattacgcttatagagaagaacaagctcatcgaggaaagctttatgttggttactacgttgctgtcaaatggttcttctctttactcatcgggatcggtacttgttcttgttcttcttcgattattattggttggttacttcttcgtagatatttccagaatcagatcttgttttttgattcttcgtaggaactggattagctgctgtgttcatcaatctctctgttgagaatttcgctggatggaaatttgctcttacttttgctattattcagaagtcgtatttcgctgggtttattgtttatcttctcatcaatttagtcttagtgttttcttctgcgtatattattactcaattcgctcctgctgctgctggttctggcattcctgagatcaagggttatctcaatggtacatcaaactttcttacttcacattttttgttttgttttgtttgaatttttgttatccacagtcttctttggattatgcaggaattgatattcctggcaccttgctctttagaactctcattggaaaggtgagttaaaacttttgaggaattgatggtgtttaggaagatttcgtttcatttctattttgaagacagtgttttatagt

SEQ ID NO: 61438 - DNA, 420 bp, Arabidopsis thaliana landsberg
  unsure (1)..(420): unsure at all n locations
gaagcagatgctgctattgnnncaggagctgatttttctccacaggtaaaatcatagcatgtgggatagatttttccttgtgaactttaatatcttttaactgctgtgccttatatgtatctacagctacttactgtgcaagtataagcacttccgaaactcttaccggctctgatgatgcccagttaaagctatttataagttcctaaagtagagcccttccctgtatcttgttcgcctactcggctttctgtcatggcttgtgaagccttatatatatctttgtccaagctcaaatcgagacggctttaggaaggtgagataagagaatcattttccaatgcttgtgttcagcttactagagaatgccctcacttaaaaaaggggtctccgagtacatgatgaatccttgcctgtttt

SEQ ID NO: 61439 - DNA, 509 bp, Arabidopsis thaliana landsberg
attttactcatccaaagacaattgctacaaaaatactatatagatgtaaacctttgttattagatatataaaattatcaatcattatatctaagtctcattaaatttttaaaattccatcttcaaccacaataatacccactacataaaaataatttatcactattgtcaatcaattcaataattttaatttaaaatttaatatttgatcaattggatgaattatttatgagttaaaaaaaagatgaaaacaatatatagaaggaaaaatgtcctaccaaaacaaatatatgaaaggaaaggcatatgaaaggaaaggcaaatggaaacttttgttgttaagaataaataaaataatttatattagtctcattaactgataaaataagagaccaaaatcattgatgatactgaagcatagttaagattttatgttatagaagaaaaaagtttagatggaatatgtatatggaaagaagaattaattactttgttatatatattatatat

SEQ ID NO: 61440 - DNA, 641 bp, Arabidopsis thaliana landsberg
  unsure (1)..(641): unsure at all n locations
ggacttgcatccaccagccatgtgagccggattttgctcaaaatccggtttatccgtagggaggggttgaatctcaaaccggtcaagtatggaagccacaatatacttcatctgcacgtacgccatctcttccccaagacaaacccttgggccggcttggaaaaccggaaacttgaacggattcacctttttcaaaactctgcagcaggttttatcataagactcagcccaccggtttggtttaaactcatcccaatcttccccccatagctcttccattctccccataccatatggaaaatatgttacccggtctccggcacgcaccaacgtaccgtctggtaaccggtcatcggttaaggcgtgtttggagtcccacggcaccggaggatacaatcgcatcacttcacacaaacacgctttcaacaaactcagtttcttcaatgattcgtaatcaaaaccccccgttatctcctccttgaccgatcggatttcactaaccagatcgtgctcggtttcctcgtgaccggtgatcaaccaaaacagccgtgtggctaccgncgacgtggtgtccctccccgccattatgatacttattaccatatctctcaccgtctcgtcgctttctccggcgacgatca

SEQ ID NO: 61441 - DNA, 664 bp, Arabidopsis thaliana landsberg
  unsure (1)..(664): unsure at all n locations
tgctcacggctcacatggctggtgggatgcaagtccgcgttcatcggagagatccttctctttccccttgaatatacaaacaaagtcaattatcatggctttttattttatgtaaaacgtctctatgatcattcatacccaaaattattttctcctttgggtaaacaacccaacttttttttttttttttcaatccaagtcataaagtctctactaaatttttgagttttgaagaaaattcaaccaatattagctcagttattatatttttgtttgaaaatgacccattctgcatttgttatcatcttgggatgatgactatattaaaagttcaacgtgagagcacaatgccttggtctttttctatccataataatacgtacgttgttattattctacaagactagatcgagccaattggaagtcagtacgtggaatctacaaaagaaaatgaaaaagtcaagtatttatctttcttatatnnnnnnnnnnnnnnnnnnnnnnnnnnaaaccaaagtaaaaactcttgaaacttgagtaacaatgttttacttagaaaaaaccctataaggaacgacactgatcaagtgtcctggacctaagtgactttttaggaaaagtagtgaactcatgaactttttggcccatttgcattttaccccgc

SEQ ID NO: 61442 - DNA, 601 bp, Arabidopsis thaliana landsberg
ctgcaggtcgactctagaggatccccttccttcacatcttcctctactgccaaagttgcatatgcttggttgatgaaccacaatccattaagcttggctccagtcccatcctcttctccttaaagatacaagtgtgctcatcaaataagactgtgcacttgaattagtcaataatcgaactaatagaaaggagattaactggaaatgaagggacatgaagaacagaaggaatgtaagatgtggtgtgcatccaactaaccctaaacctctaataggctgagaagttctatcagcagtttgaattgtttctaaatgagtgtacgggttataagatgcaaatgaattgaatgagcctgtcacatgtttagatgcgcctaaacctataatcctgtcgggctggacccaaccatcctgtggcacggcgctgcctacaggctgccccaggtgccccggcagacgacacctaccagcaccagtagcggtgccttcgctgccactgctgggtcacgatttgacatccactcagtcggcgcccgcgtccaacaccggctccagcgccgcagaatggatgcctcagcctgcggacgcccctgcgcgggag

SEQ ID NO: 61443 - DNA, 1674 bp, Arabidopsis thaliana landsberg
ttccatccatagcactaacaaggccttccgtgaacactaaatgttttatgtcagcattgaaggattttcttcaactctaatacgtgttttcgttagcacttaaggacattcctcaacactaatggatatttgtcactataaatggtctgttgccaataccaaagatcattcccaaaacactaaagtttcatttcccttacatttcgacactcgacaattgttataagcaaaaggcaaacaaggtaccaacaagaatattgatgactttgtaacacattttttaaaaaccacactcaagcacttggtgtgtaacacattttttttaccttccagtaaaaaaaatttataccttacaaataaatttttgtctcttggtttgttttacaaattacttacaactgttaacaaagttacataacaacactccgttataattgatatttttttattccattcatttgcttttcgtctaaacttttctttgaatcttctcacttggcacttggatattctcataccaaaaatgcttttcgctttcgaatattttttccctaaacaaggcagaaaaggaacaggtttgacctccgttgaagtgttgaagaacacttttgccatccataacaatgcttcagaaacggtttggtgtttgtgtacaatattagttgcattgtctcgattcttttaacaagactttttttttccactaagacttggaacaaacatccactacttcaatcgaatgagttttaacagaaacataatgatggatttagaaagaagcagcatcatgagattaactatttcgcaatgtgtggaatggtttcctttgaaactaatgctgtccataatcatgatttaaattaaacccacacgattcgtatatattatttaattttaaaccttagttacttattgccaaatatctacttttatttttctcaccaaatattcttacttgttgtttgtcgcttaccaatcaaataaattaaaaaatattaccaagcatacgcatgccaacataaacttaaaattacagctgaaagtgaagagacaagaatgatgagtttggtttggaaataataagtaatattctttggaacaagtatggggttgggacaagagcccaaagagagagaagagtgtgtcactgtgtcgtctctaaaactacaaataaatattgtcaaagaagagagagtttggttttttggtgggagctatagaggtccacaaaagcttttcacgcgtgctaaaggagcaaccaaaccaacggtcacgatcaaggccgcattaaacggaaaccatttgtgattgtttcatccaacggctcacactttcccttgtttgactctcttctgtccatcccctcacgcgtgctccctcctcttgttttttttttccatttaatttccactatttattattttattttatcataacatctattttatttttatgttttaaaaaacttttcattcaagaaaatccacttacatagtgatatacatgggttaaacactgtaatcatagtgtgttccatctttacagaaatggataacatattttctacatacagtaattcttttttcctaaagagaagttgtttgagtttttactatccacttacatagtgatatacatgagttttttaatagacctattctaaagcatgacacc

SEQ ID NO: 61444 - DNA, 461 bp, Arabidopsis thaliana landsberg
  unsure (1)..(461): unsure at all n locations
nnnnnnnnnnnnnnnnnnnnnnnnnnnnnnnnnnnnnnnnnnnnnnnnnnnnnnnnnnnnnnnnnnnnnnnnnnnnnnnnnnnnnnnnnnnnnnnnnnnnnnnnnnnnnnnnnnnnnnnnnnnnnnnnnnnnnnnnnnnnnnnnnnnnnnnnnnnnnnnnnnnnnnnnnnnnnnnnnnnnnnnnnnnnnnnnnnntccaaattttgacctttagttaagcgtgcttgggggagagnnnnnnnnnnnnnnnnnnnnnnnnnnnnnnnnnnnnnnnnnnnnncctctttttcttaatttggattttttaggtttaaactttttgactttttctcttctataccgtgtggccaacctttgcatgttattcttttctgtaaacccatattgagccctctcccaaagatgcttctttaatgtaccttttctaatgacttttttttcacttctaatttttaccctta

SEQ ID NO: 61445 - DNA, 647 bp, Arabidopsis thaliana landsberg
  unsure (1)..(647): unsure at all n locations
tttatctaaatacaggtattcgagcttctctcagtttccacctaaacagctaaacagttnnnnnnnnnnnnnnnnnnnnnnnnnnnnnnnnnnnnnnnnnnnnnnnnnnnnnnnnnnngtaccaatgtgcaatgtctctattttcttttgttcccaaaaaatagagaatttagtatcagatacatcatactagcttccaagaatgaaatcaatcaatcattgtttgtatgcattttccatcataatttgataattacatataaataaatgacgtgtcgtttattgaatggttaccaatacacataatggtccatagaacagaggaagtgggtgcgaatataaatatacttaacatcaaaaacttatgaggaaatgataattacttttgtttcttacaaacttaaaaagagtccccaccacatagaaccacttggcctcagttacatgaagacgcaaccattatgttggaattccgactcattgctttcaaatctaatctttcataaatacaaaatttatattatttgtcttatggtatttaatttgacaattcagctttagaccatgtgggtcctttctctatataagcctggcttccactttggcttcttttttttaattcgatggtctaccttttgattccaaat

SEQ ID NO: 61446 - DNA, 172 bp, Arabidopsis thaliana landsberg
acactctgcgccgctttttcaagtttgttgcactctcgactctggctgcactaaatgcccacatagttccactctcggtgtattccagtttagccagtatcacatatccttccaaatgatttatctagctgtccaactgagggatgtctatcactatcgaactctaaaggct

SEQ ID NO: 61447 - DNA, 457 bp, Arabidopsis thaliana landsberg
  unsure (1)..(457): unsure at all n locations
acacttgctgccatgatgataggttacctgtttggtgtaactgccatcccggtatggatctcccagcaaaaagcttttttctactcaactctcggggggctggtggttaccttactggtagtgtttgcacccggcatcggttcactggtagcgcttgcattactgggcttatgcaatgcattgttatggcccgcgatctggccacaggcgctcgatgggttaacaggcaaacaactggctaaaggatcagctatactgatcatgggcattgccggcggcgccctgctgccgctgatctatggcgctataggcaaatacagcaataaccagcttgcgtatcttttactggttcctgtttacctgttcctgatatattacagntacattggtaaaaaatcatcctccaaaaaacaaacgcatgcgtgaactaggaaaacctgcaggcaattatcgctgg

SEQ ID NO: 61448 - DNA, 327 bp, Arabidopsis thaliana landsberg
ggcttgattgagatgtgtggggggaccggccaggtgggctcaaacttacaagtcgtgcaatcctacttgaaatgaaatgggctctggaatcttcgccttaacctgcaacaacggcgatatagagaaactagataaatggtctgatatcatacattctgtagagggtcatgcactattagaactgactagagattgaacgaacttgtaaacgaagctaatcctaaaaatataaaagagtcgagatttatttatatttcttgcctatgaacagggcggaggggcgaaaatcgtatgaatcgctcttgacggagagcccttaatagacca

SEQ ID NO: 61449 - DNA, 516 bp, Arabidopsis thaliana landsberg
agcaaactcctcctgaaaaaaagatttcaccaaatatgtttttcccaccctgcgccggccattatatagcattataacacaggactttcttcctgccttaatttgtctaataattcctgctcttcctttcgtcctatgatttcattcattaataaaaaatataatatgcaaaaattgttgcttataacctatcagaccaattccaatatctggctgataattctaaacaaaactagccaaattaaaataaaattaagacatttggctgattgtgcaaggccttaccagccaaaaatgaacaaaaatataccgcaatagaatatatccaattgattttaaatcacttaaggacaatccacaaattaattaaaatcagctcttcatcaggtttgaaatagtattcatatatgaaaatctggccggttattaaaatcgagccccagaaattctacaagactaatcttcaggcaatttcgacagcctatgccagccaaaaatatgtatttcatctctttt

SEQ ID NO: 61450 - DNA, 704 bp, Arabidopsis thaliana landsberg
ggcacttttccctatttgcttcttcttacctcatgattactgtttttctatctgtttctattttggggttttttagcagactaattatgttgaccagaaaccaaacaacagtaaaaaaaaatttcatcttttgcaaattgcgattttgtcctaatatttgttagttcccctaattataaaaccaactttttcaatgaagattgaataactatgtatgtattgtatttaaaaagcaaatgttacttatctagttatttggtgtgatttgctttgacatcaattagaaagctttgggacagtactaaaaaggactagtaaaaaaaaacgaagaagaaaagattagtttcaggaggattgttgttctgtttgttcgttctcgcaggtttgtgtttgatttcatgcttttgggcttttggccgtatgggccttttgccttgtaatgttgtatttttagtggaaaaggtgtttgcgttcattgatttattatgtgaaaccgattatacttttatttcctctctatagttaatgttgtagttttatggagtttcagctctatttgaatttataaaacgactaattaaagacctaattaaaacatttctgagacgttaaactaagataattcagatcacaatttcacatttcatttcttataaataagcaaagatttaattgttggttatcaataaaaacaaacagaacat

SEQ ID NO: 61451 - DNA, 2037 bp, Arabidopsis thaliana landsberg
  unsure (1)..(2037): unsure at all n locations
tatctatcatggtcttattaattgaggatgactgtcaatctttatcttaaaacaattatactgtatgtttttgtcaatattacatgttaatgtatataagcatattattaaaggctgtgtgtgtaacgtagtacaatatagtcataattagtatagttacatcaaagaccaacaacaacgagaatatcttgttatagatgtctgtttgatctttaagaaacacatcagttttatatttacaaaatcttcagctgggttgaggagaagattccaaaaatgttggtttgattaagatgcttgtgtccgtggagtttactaatctaataatgaatatccacattcacggtcttatttaaaatttctcttatcatcatcatcaaactaatccctattgaaattaacgcttatatattctggtaagtggtaagattattaaagtatttantntgtctcaaacctgctgcaagcctgctacacgcgaataattaacggaaacagcatgtaaagatattactttacacatactttcgatcgtgtcaaactaattcaaatgtgattggtttatcatagatcaagaagttatttcaatctaccaaatttcgagtttcagtctttgactctgaagttactttcgaataaagtaatctaaattttctgctgtccttacaaatattatcaacgggttatttcttagaaaactcttattttttttgcatgtggatatcaatccgtgatattcttatacttgtcgagattatcgatcaatttttacatgacacacttaaaccactatgtagtgtggttatctcaaattttatctatatttcaatccaaaacaacaacaagaagagaaaaaaaaaacatttggtcagatgacacacttgcaccttcgcttaaagttcggtggtggccatctgtatacggacaatatttaagtgatacactaattaattattctgatcggcatgtatactataattatactgtctgtcgtaagaccaaaacaaaacacttacagactgttcaatcatcaaaagaaaactataatgttataagttaaatattaaacttaaaagtccaacgcaattaggattagcgattggtggaattataatatgattataaaactagttgttcattttaaaatatgattaatagttaatggacggcttcttgattaattattaaaatggctccgccgatgatcaatcgatagcacaagaagccgtcacaggttgtccgccgttgttgagtctatccctttccatataattcattaattatcgtcgtattgctttgtgcctctcatagtttatttattaaacgctcctattatttaggtagttatatagttcaaaattttgaaacaatactgttttatctcatttgttaaatttagagtatttacaccttttgttcatctaatgatagttgcaactggagctcgaagtcttaggtgctcatgatgtgatgggtgaactataatcaaattttgctaaagaagaaataacgcaattagttccttgtgttttatttgtgtaatcttcttcatgtgaacacaattatacatagttgatcagctatgtgacaatttcaagttcttggtaaaagcttgcggataagatttccaccgagattgtatccgtaaaacatgtaaaacgacaatttgtgcaattcaatctaggaacaacttgataaaccatacaatatatgatatcataatttgtttggaaaatttaaggggcatttctcgttgtgacaaaaagctaaaataaaacaaaatatttttattatattgaaataaaccaaacttctttctttcactctctatttcattcatgtatctgtttaagttttaaccaagaagcctgaatcaatactttttataaaaataaattgatgaaggaaagcaaagctcatcatagcgtggaccaacgcgcccctgcgcatccgtcactttgtccgcatggaactccgcgtttacttcccggttgttaatgttctctctccttaatattggataaataggaaaataat

SEQ ID NO: 61452 - DNA, 716 bp, Arabidopsis thaliana landsberg
cacaaccttaaataaaaatataacagttattagttattatatacactagatttcacaagttatgttttaaattttggatttttagaattatgggtgaatttagtgaaaacaatggaagatttcagaattacataacataaaaaattaaaaatgacaaataaggtgactaggtgagtaataaataattaaaaattcgcttttagagacatcttctcatttcttttcttttttgtttttgttacttcatatttctctctcccctctattttacaaataatttatttagtataatcaacatatgtcaattatcatgttaaactattaatttttgttatgtttcaatatgaaactaattttgaaggcatcatcgattatatgtcatgtatataacaaagcgtagatttgtaatttttgtaatgatgttcctaacatagtttcctggcggccaaaatagtgcttcttagtcatacttgatcaattctgcttacaaaatcattcattgactttcgtcattctcgtattcgtattgcaatggaaatcaattttgatatgaaccaaaacgaatttgtgaatggtcaaattcttttaactagctatcacaccactctatacgttttgaattgggtcacaagattctcaaaagcgaaatctttctttattaagaacagccggtatgtatatacgaatatgtattaatatatttctgtcggcgatat

SEQ ID NO: 61453 - DNA, 1281 bp, Arabidopsis thaliana landsberg
atgtcgaatattaagagattaaacttttcatatataacgtttctccttttttcttaagtatttgtaagattaactctatctttacattctacatttagacatcactctcaagtctcgtaaatagactgacgtatccaaatccattgattttcgtcttttttataagtagaaaatctaaaattgttagactacaataaaatcaaatccatttaaaaaaatttttataaagcaaatggaggataaccacatgctttaaggaactcgaatcaaagacctcaaacataaaaatagtcaaatcaaaaatcaaaaatcaaaacatacttcctttgaacctccaaaacaaaacaaaaatcaaactttaaacatcttttcttcacgttctatcataatttacgaaactaagaaaactaaaacacaacaacacaaaacaaaaacaaaatgatgctactatttaaaccgtctttaactctaggaagaaggataaaaccacgtccatgccaaagcttctctgagtctcttctaatggatagtattgaagcagctgaaactctcacacgtaaatggatttctccagatctctctagttcatcttcttgctccctctcctcgattttctccaccgataatcgcgtagaaggacgaagattcgtcgaagttatcaacagcttacaatacgcgattcaaggagtagtattggtgaatcctgaatcaccaaagcttactagagcgcataatcttgtaacaatcgctatgaaacagttggaaaaagagttttaccggattttaaaatcgaatcgacggaatcttgatccggaatccgtatccgttcgatcttccccatctttcaatgcaagaaacaaagtgtctatttattcccaagttccaaaatctgaagaagctgatgttatgacggatttgaaaatgatcgctgattgtatgatatcttcgggttacgaaaacgaatgtatcaagatttacaagaagattagaggatcaatcatggctgaagcgttgagtaacttagggtttgagaatctaagttttggcaagattcaaaaattggattgggatagtatggagaagaacctcaagaaatggttagaagctacgaaagtcctaatcacaaacttgttcgagggagaaagaatccttagcgatcacgttttctcgccttcagtctctgtcgcggagtcttgtttcacggagatcacgttagatagtgctttaacactctttatcttccccgtgagtgtagctcaatgtaagaaaaccgtcgagaaa

SEQ ID NO: 61454 - DNA, 433 bp, Arabidopsis thaliana landsberg
cagtgctaatggatgctaaccaaaacagatcagatttcaactgtacattttgggaaccattcggttacgtgccagagagatttgtatctacctatttgaccctcacagagaggggaggtggtaccacttaaccaacgcgagccggtacggtgagaccaagccatacgataaatctgactgcacagtatgcgaaacgggaaaaccaaactgaaagcagcgaaggccgaacctatctttatctagaattttccacaattctattgcacgagataaatatcagttatggttctgacacctagacataaggctttttactcaataacatcgtttgatcagatcaattacataaatacaccaaatgggcattactgcacctcgaagcaaactttatatgtctattgaaccgagaacaaaaaccgatgcttaagatggt

SEQ ID NO: 61455 - DNA, 1694 bp, Arabidopsis thaliana landsberg
agaggggttaaccagtaagattccctttgttgaataattgattaaaggaagaatatggtagacaactatgaatatatatctttttaaaaactaaaagtaaacacttatttttggagggtcaaactaaagtaaacactttaaatggtatatttagtgctctaataacgaaattaatgatgaaagtaatatctctcgtaattattttacagaaatgaaagagaaatgttaattaagaattgagagtgaaaaacgatttcatttgatgcttttttcatgcttaagagtttttgattctatgttggttagtgtacattccatgagatggcggtcgatagacacccatatctcaacaaaatcaactacaaaaatgcgaatccctggtttagacggatgcataaacaaatttcttttcttgttgatgtttcgattagagaagtaatgtagtaattaacttttatgactccctattttgatactataaactcaaatgtcatagctattacagagcgtattaacttttttttttctttttttctttttttcagagcgtattaacttgtgagacattacatatgaactcgtgtcatgcatgcatttacataggtccaaactgcattgaacataactccatcgtgtacattaaaatcataacgatgattatgtcgtttctaattaattggcttattgcattgccatttcgtaaatcttcacccttagtggcatgacacaaaacggtgacagtttggtttgttgagtaagcaaacaaaaggacattgcatggctcgtgagcaagatataaatcctcgtaatagtgcagtacaacctcattccattggagacctctatgactcaatctatagattgaaaaggaacatgccaaagccaccaacacatgtcattccatatgaacacttctaggtctctcatatacaatgtcaatatgtaataagaaatttctttccaagtctaagaacgtgattgacaaaccaatgaatcaaacaactgctccaccaacttaacgagaggaaataactaaaaagccttaaacggtattgagtgaaagatttgagtatcgttgtaccttgattagaatctcaaagagtcaaaattgcaagttagtcaatttagttatacggcacataaataaagtaaaacaaaaacatgccgaaattgcattacgattttagtgttttgactagttttgtacgtagtactctatgtgcaaaccaataaaaaagaaaagtgtacagtaaacacacttggttccacgacataggcccaaccgaagattcataagttatgagtcataactcatgaaggcggtgagatcaggttcgatctcatgcgctataatcacgtgcctcaactaccaccaaaccaagatattttcttccttttctctagactgatcgcaaccataagtattatataactcttttacccaccgagccttggtgacaaacatgcatatacataatacattaatggtatgcacatatgtgtatattcattagttgtacttattgtatacaatattttatatagagagactttgatggtgcacattcttatctaaatggtgtcttcatgagactcgtcgtcaagagggaaacacgtgtcactcacccccggtattccacaagaaattggcgtaattaacaggcgtagtaagagttggtcggatcggcatcaat

SEQ ID NO: 61456 - DNA, 1488 bp, Arabidopsis thaliana landsberg
  unsure (1)..(1488): unsure at all n locations
atttctttgatcttctcatctcggagttcttttaagcatcctttgtttcatataaccttaacagtgaccaacttcaaataaactttgctctattttattggttctgtttcaatcaatttgatctacctctggaccaatatcgagtgaactagccataaagtacttgaaacgtaaggttgcaactctatgaacgtttctggatatgtggttaagactttttatttggtgaaggattaaaatgtgtgtttggccaaatgagtaaatctctatttgggaagataacaatgatttcagtaactcagccaatccaaatgagtggatgttttgaaacagtttgctattcgcgggagaatttcacagcttcaatcacagcagagaagtcgagatctcctagtcccaagcttctcgccttcttaaaagcctgtcgagaaccgaaacatatattttaagattcaagctaagaaaccaatctagaggagggagagccaatatgttattgtctctgaataactaactaactaactgacctcgtttgcagccgcggctacaggcatggaaaccgcgttttcatcgccaagagcaagagctagcctcatgtctttctgctgatgtttcaatggaaatgctggtgggtaactactcttgttcattgaaggtcctttccccttgaacatcgggttagtcattgctcccagatcctgcccatagcagaaaccgattcaaaccaacaccattatttcagagcttgcaaaagtttgatcacctcaccagaatatccaaaagagtgtcagagctaagtccactcttgtcagccaatacaagcccctcagagaatgcattcatcatgctgtatcagacgaaaaacaataagatcatgaagccatgttccattcctactactaatggtagtaattgtaaaagagacgggacattcaccttcccattatcatgttcactattagcttcattttagctccgtttccaacttgtcccaagtaaaacgatctcttccccaagacatcaaaagctgggattgattcctcaaagagtgccttacaaaaaaggattaaaacacaaacggattatagccgcacatcgagagctccttcctactaagtccaactaaaacagttcttgagatctatcaatcaatccataagtacagttttgagttgtaccttgtcaccagcagcaaggataatgagttggccatcttcagctggctttttgctacctgaaaccggaccttctacgaaccgaccacccttcccggtgattgcctaccaatgcgcaacacagctcaatcaaactaatcaaccttcttctaatcttatcatcagcatctaaagtacaaaagattcaacctcattgatcttcaaagaagtctctgcatcaacagtcgacatatcgatataaccttntccttacatatctgctccaaacaccgctttatcgaaacaacctaatcaaacactacttctatcatca

SEQ ID NO: 61457 - DNA, 1570 bp, Arabidopsis thaliana landsberg
aatattggtaagacaaagctaaattgatgctccgttaatggcatacaagaacaagaaaactttagctcacatgggtataactataaacacaccacgctctatatgaagaagcaaacacatcaaatttatcatacgacaaacttaacttgactcaacatataatcaaggttctaaaacggatggaacaatatttactaactcaaaacatgagaaacagtatcttacatgtactggatttgtggtgcttgtgagatttcttatccttcttatcacttctcctacttctcctttcatcatctttctctgttcctcgatgcctcttaactttctcttcgtctgtcaattcataaatcactatgtatcagattatgtcattcacaacaataagtcacactctcaacgccaactacaaaatctaatcgaaaacacagatagataaattgatggcatttctcgggaatcggaagaaaaagtatatacatagaggagaagaagaagaagaacatacaatcggaagatgaagaatcttcgctccgagctctgcttctcttcttctccttggagctccgttcgcttaccattatttcccgacggactaaaataaaagaacggaggagctgacatatatttatttggaccccgcggcgatcaggattcataatcccgggtcgggtcgggtctcgatgtcgaaattacacttaaaccccttactcttttatattttgcatctcgcccccaatgtttttatttaccccaatacaattataatccctttttactagctttttgctcaatgttacacttgaactatattaccaagtttttttttactgctgttttcagaaaagtatttactacaagcaaagtattaacaacgcatttggtctacaaagacaagagactgcattttcttaaagactatctcaacggagctaaactccaactcaaaaccatagctccgaccaccgtattctacatagagaaactttgtacgagaatcttctggcggccgagaaggcaaaacattagagatatctggaaactccggagacggtgggagaggcaaatctttcttcttgagagaatagtacacatcagctaagagaatccaaatgagatcaggatcaatgcaagcaagtcctctcaacgcattcaaagccgcttctcttaggccagttacactgctgtacgcaatccccacgaccaatcctgcaacttttttcaagactgcatctaacgctgaagcactgcgtttacctctggaaatctcggcgatcatatcgagaactgctgcctgcacttttaagctggaaacttcagcaatcgtagaagatgatgactcggaaatggttctgtaaggaagtcggagaaccgatttgttgtcttcccggaggatcttaggcgccataatgtggaatggagacgttgttaaaagcttccaaaagtctgggccatcattgcggaaaccacgtgagaagaaatctcctccggatgtttgaatgattccgggttatcacggactaagcattctccgtaccggcctgtgaaaaatgccagcaggttttataat

SEQ ID NO: 61458 - DNA, 367 bp, Arabidopsis thaliana landsberg
accttctccgctggccgaaccactgctcatggtctagacccatacactactaaaccgctggtgaatcacgtttctcttgataatgatggcatcctcaggagggaatatctcctcatggtcagttttcgaaatattaccaaatttaggcctaagtttggcaccctcgctaaggtcgtaactcaaattatggcgactgtgaatgttattatatggatcgctttggagatcaacaaccatggtaccacccgtttcattcctcatctctttcttcaaatctttatcacacaagtaaatcacttgactattttcaaaaaatatgaaaacagaataatgataaaatctctccttaccttcttttttctgatta

SEQ ID NO: 61459 - DNA, 1840 bp, Arabidopsis thaliana landsberg
tcctttctctcttaacgtttttacaatgtatttacaattatgatgtcgatagatcaattccatatatgataagaataaagtactagatcttgtcgggatacacctttttccccttttatattccagattctcgttagttacaaaatttgataaacaaatgacaaagttacatgtaatatgtataagaaacaaccgaaatgacattccatgcgttccattagaacgcttcacgtaataagtgtatggatttgaatagaacaaaacttttgaataagaaacaacccaaatgacatttcatacgttccaagaacatttctaggtcgagttttaaaaatgttgattggcttgcgtataggcacaatccaagaagaaactataactttaaactcacatggggtgggacgtaatgtgtgctcgttttagttcattgcttaagtcgttggtccacataaagatatatcttttgagaatcgaagtggcatgaggacccaagaaaagaaaaaacaaaagtgcacgtatgtacttgttcgatacatacataacaaataatatactatcaattatgaaaactcttgaagtggactagcgtacgatactgtcctaccggtttcagaaataaaagtggtaaaaagacatgtcttcctcttgtcgatctctcattcgttgctccattacgtcttccttttttctcctcgtataaatgtatctaacttgcgtctaacatgcgaacatgcaaaaattgggtggcccaatagactagctaaggcatacggcatacccataacaatttgtgattaaaattgttggaaaatggcatttgcccataacagttaatgattgaaatatttaggatttggattacaaaaggccccaattaaacgaaaaacttccagagaataaagacaaacacttaaatgggccaacttcttattcaacttcaagagcctagttctaattaaattcttatagaatcaaatcaaggaaatgatagaacttcaaattgtaaatggatagaatcaaatactcaaatagagcgaaataactgagtctccaagatcttaaatatgatgtggagacaattaacaataccaatcacgtgtaaaataaaactaacacaagtagaaaagaatcccaaattcaaaaagtaattaataacacttgacatttggtcaatcaagcaaattctcgcgcctgcattctcatctcatcatagaacttttcgatgaatctctcagccttcaagtcaatcgaatcatcttcgctgaagtaatcgaacggctgcagatgctcccttgcaggagaagcaactccgagggcataatgaaaaggctccatctccatccaactttgcgttattgtgtcatcattttcattataccggccgatacactgagaaagaaacaataacccgtaaatgcgtttaagacccgatctagatatctgaatgctcttcccatagcatttgataaaggatgtacttgaaggagagaattgatactcttggagaaatttatagttgtgttgctgaaggagtttgacccttttggatcttctttgttttatgggaattagcttgagtcttgggatgatgggtcttctcaagatcgagatttttagtagtttcgaaactctttggaaaattggtcttcttctttgggacattttgatttaaagtattctatggtttcattcttggaagggacattaatgttcaagatttatagaagatgaaaagttttgagttttagatctaagaaggagcgccaagccaacctgtgaaaagtcatatggtcggccggctactttttcaatttatatctatatgcaataaatagccgtt

SEQ ID NO: 61460 - DNA, 1291 bp, Arabidopsis thaliana landsberg
caaaaaaatgcatttacaaatgaaaaaaactaaattatcataagacgtcatatctattgaagaatatgtgtgctttcatcctttttttttggtagggttatgtttgctttcatcttgatttgaaggaaatgtgtgatagtatatgctacagtaaggattaagttatagcgaagaaagagattcatatctaaaatttaggtgtatactattttggaaacctagttcaattcaacaaaaggttgggtgaaactaactttctagttaccaaaattgaatgttttaaaataaaaatcaaagattcgtcatcagacaaccaacaaacttctacacaaattactataaatgggttttactgcagtactttagtagttgttggtcatcagttactaacttactatacatagattcactctaggcttagagtagttgttggccatcaattgttgtagcctttttttggtcaaaggtaaattgagaatagacagtaaatatagcttttgactatgtatagatccacaactgcactcaatttaaaacattaatgcattttgcatgcattcatatcatccgttcatgagattttatacattagtataagttttacacgacagatgttaaaatgttgaattaaatctgttgtcgccattgattttcatgctcacttaatagaaatgtctaaaagcgtgacaaaatgttatattgctacttaagattttttttttttgccaaatttgctacttaatatatgatagttcaaaaccatgtttagctatggttatagcattgaaattatttggtattacaactaccaaaccatccaatttaaaatagtccataagtaaaaagccaagcatgacacaagagggctatgtgatggtattggttcgagaccgtgtggaatgcataatattttatagacgtttttcaatactaatatcttaaacttatttaaattaaacataatttattatcttaataatcatttataaaataaaagatacatatagctaacttaatagcctataaaatccaaagtataatacatcatttgtgtttaccaatatcaaagtaggataaatggaccagttttgagtcgttagacaaaatgatatataatataccatcaacaatagtaattaactctgaaatgcagaatcgcagaaaatagttgataaatcatttgtcattttctaatgtgatttcagttccctatatagtatagttgctatttaacaaatggtgttggaaagttgaaaccattaaactaaaagccaaataaataaaatttagt

SEQ ID NO: 61461 - DNA, 2495 bp, Arabidopsis thaliana landsberg
  unsure (1)..(2495): unsure at all n locations
acaagccctacttaagccacagtgcattgttaatataagtgcttactttcttcgagagggaacctattccaccagcaggtgaaaaacgcactgggtaacaagaaatctcacctgatctggcattgctaatgcctttagtagggaagaaaaaacatctgcattcatctcctgaaagcataaagcaattaatcaattatgggttcactagacgtaaattgctacaaattttaataagtgactataatatatcatatcgcagcaaatggttttcttaaatatatatatttcggtgatttacagcatcaagaagaataagttaaatttacacctcaggtaggcaagacgcaagctctccaagtacccaatttgcagatgcaaccaagtaaggtgagcaatcaggtgtagaataaatgggtagcacacgggtacggacaaaagatgccacatactcaggattttgttcttggataaactgccggaaaaaaggagccatcgtannnnnnnnnnnnnnnnnnnnnnnnnnttaattccaaagcaaagagaaccagatttgctcacctcttgcaggctaccatatgccattaggacaccgaaatagctgacatgtcgacatagcaacaaagtcagcttaataaaaaagtaaaagggaatgaaacaagatatactaaagtgaaagagaacagttaacaagaagcacttccaacccgatattagattttcaaaatgtttaatagttgtctgaggagtcttgcaaagaagataagagagccttgtatatactttcagtctactgaaaaaatatctatggcaagatgatcacgagcttgcaaaacgagtttttaaagttcaattgcaagaacatattttctaataaccaatgcaagcatttaacataacgttactcaatacgtcaaacaaacatgtaccacactgctcagagcttgcaaaagcattttttatttggtttaggcatctgccaaggatttcaatgagttagaatcagaagtaatgaaaatgtatagaactcacgctgctgaagtactagcatccagtttgtaactcttcgaaggcacaggaaattttgacaaaaatggaagcaccagtagatcacccatgcatctttggttatttcctctgttcttttcacctttcttccgcttacatgctgctggggaagctgtatttgtagtagatactggtggtccctatgagaaatggatcacaacctataagaacctattaacaaatagctggaataggtaaatgaacaactatagtttcttcacctttgacatggcaaggacacaaagtaagttcatagcgcttctcctggctgtaaacaagtcatccctccacccagaaatttcttcctgccaaaacgagagtgctattatttcctaacttctggaacatagacaaaataataatccgtgtagagagagatagagataagtttccatactagttcagatggaaggtttttccttatgaattcatctgcatcttcctcccactcagagatgtcctacttgcaaaagcaacccagaaagaccactaaagtttttgaaataatggtagtaagcaatgcttgcaacacagattacaaaggaaagcgtaccctctcattaagcaccagggctggaaagattgcggagtccaacaaaaaggaaaaatggggtgaaagtaatctccatccctgtttacaaggtaccaaatatttgctttcataaacatttgataaaatctatttatatttgctgtaaatttgctaacaacttacagggccaatttccatgacgcgtgaaattacgtcaaaagcaagtgatataattctctcagttaggcatccgagcttctgcacatgatagtaggccctcatagcattagattaagaagatagtaacattttgatgagaagcagcaatttttgtagtaacaaattgctaaacatacatacaccgatgtttgagctatgtttgacaatcttcattgagcagtttattatttccggcaccaatctgcataaatcaaatatattaggcatgggaaataagcattgctaagaggacttggggtgtttgcatacttatcagagtattttctatgtcggctgacaagcgtgcaaaagaggagcaaacttctttttccagctttcgatcttatcaagtacccatcagaaggagttacactccagtcaaaactcaaggagtccagaattctgatcatatcttgacagaaggaaccgagcagaggtgacaaagcagatggcatatgggacttcacctacaacacaaaacaacacagtagatagtacaacagaacatgaaataaaaaatgataaattatgagtaataatcaatggcaattttcaatcactcagacatgcaataacaattctggaaacttcgtgtatctgcaatataaactgaaaattgtgacttactgaaaagtataggcatttgcaaataatgtggagtgtcttttccgattcccga

SEQ ID NO: 61462 - DNA, 1244 bp, Arabidopsis thaliana landsberg
acaacatacctgacacatcactacttattgtgaatgaactattgaacttctttcttacattttcgttttaacaaacaggagctgtcgctttacttctccttcttggtgttgccttactatgtgcgtatgaactctgtgctgtctatgttacggctggtgcgcatgcatctcagcaatattctccttctggtttctttttcggtgtatcagcaatcgcgttggcaatcaacatgctatttatctgccgcatggtctttaatggtaaagtttacccagtccttaatcaacatgcaattgctgtgtattcaactttatcagtctacttaattctttgtattagctcaaagcaaatctttcgtatctattaacatgcatactttttaacctccaacctcaatttaagttgttgaaactttgcgaaattttccatcaccgcaggaaatggtttagatgtggacgaatatgtaaggagggcatataaatttgcttattcagattgtatagaagtgggtcctgtggcttgtttgcctgaacctcctgatcctaatgaattatatccccggcaaaccagcaggtaagttcttgttgctctctacctagaaattcaataatattttggcatagctggcctcttatgttatgattgttcctgaattttgcaatcaacaaactattgaatacttggaaccaacctaaatctgaacaggattcagggctagtaatcttgccgtttctctctagcttttttttttttcgcccaacaggtggtgtggatggtgttatgatttgtttatactgagcgctgaaatgttctcattcatatttttatcaatcagctataatcttttttcttgcatatatgtagggcttcacatcttggccttctgtacctgggctcactcgtagttctccttgcctactcagtcctatatggtctcacagctagggaatcacgttggcttggaggaatcacatcagctgcagttattgttcttggtaaaaagataaaaattatttacttatatttaaagttgaagcaggctacttgattattcctcaactcatcttcatgcttaatattttcatgtagactggaatattggggcatgcttgtatgggtttaagcttcttcagaatcgtgttctggcactttttgttgctggcctataccgtctcttcctaatatgttttggcaaacactactggaaagtttctgagctaaaaagcttgctcttatcgtatac

SEQ ID NO: 61463 - DNA, 663 bp, Arabidopsis thaliana landsberg
gaacatagaagtgaagcatgcaacatggcagcatcataatatttattttcgtcaattattactatttcttgtaaaaatccattaggtaactatacgttagttcaattaattaaataaagatttggggttcccaagtaatatgtttctgaagccgagccgacatagagatgaggccaccaacgcaagtgctgtgctggatcacgaccatgtgtttttgcaacgcgatcaatctgcccacaaaaccaaaatgtgtatcatcttgattctatgcttgatcactctatctgtctctacatacattttgtaattcaccgttagacattaaaggagacaaacttttatccttgattgccgatcttgtgcatttatttgatcctttgcatactatgttttgtctaatggactctgatttgcccagagatttaaagctgttattggtatcaaaaatcatactaatcaaaccaacaacacatatgaactatacaacatggaacctaatcagtaatatattaaaatcgatcgatgatcttaatcaatagattcaaaagactatgagatgtagatgtataacacagtttacatataatgattaaatatattttagatgaattattttatcccctcattggttgggcctaccccatagggtttttttgcccattt

SEQ ID NO: 61464 - DNA, 644 bp, Arabidopsis thaliana landsberg
agaaactttacaaatgtatcataaacaattttaagttaatcaaaaagtcatatttgagtaacaccaaatttcaattccctttagaaatttattaataaaaaataaaatattaaagtacaaaaacttttaaaattagttagcatacaactatacaataaaaaaaaaataaaaaaaatatcaacatcaaatttgtgtcccctagacaatgaaagctcaaaactacttaaattcgggtcctttgacctgcactctgttgttagcacacacacagagaccttaatgcatttgtctctctgcctctctctcattaagaaaaaaaaagagaatcagagaagaaataaaaagaaagcaactcaaatctttaacctacaaaaacccagatttgttaactctctcattcttcttcttcttctgaacaacatttgatctttttgattctcaaagtaaaagagaaacacactttgttgtctcaacaagcaagcaagcaaaacccatcttgggaaaatctgatttctttcccaagaaaatctcattttttctgtgacaattttttcctaagaaaatgagagatttggtgtcatgtttcagtgagaactcaataaacgtgacacatccctgatcaatatcatcttcatcatcatcat

SEQ ID NO: 61465 - DNA, 601 bp, Arabidopsis thaliana landsberg
gctgactctgaggaggccacaggagaagaagaaggaggcgaaagctcaactcccttggtttgtccccctttcgtatccaaaccattgggagttgtctgcatctttcgacgatgtaattggatttccaacaaatccgtagtgagtgaagctgctttctcaaatggagatgctgcaattgaagtctggccgctcatcaaggactttaaattacaaaaaatacattcacaaggaaagaatctagaaatcacttttgtagacaaagaaggaaaaaccattgccaacatgaacgagtactttctacttctgaccaacaaaggcagtacccatcatctcccatggagtatgcaagaagacgttgactacaaggagcaacaccacaatcatagcagtttatggatcgcatttctaatggaatgtctacaagaagatatgatagggaaatgtctcctttcccagtggaagtcttcttcacatgtagatgtagatgcagattcaacatctgaatccacaactccctggctaaccaacaatcccacaatgaagaagctttttttaattgctacagttggaagtttgagctgctcagaatccctgacaagaa

SEQ ID NO: 61466 - DNA, 1389 bp, Arabidopsis thaliana landsberg
aaaatgggaaaagggtttttcaaagggaaccccctccaagccaccgtgggggtatggttatctttttggccttgatttttagaaaaactttttaaactctcctttgtgcaattctttcccttcttcccttgaatcattttttttccaaactcagaagaacatggacttgcatttattcattcctaattagtccagatgctgtgcatttaatgcttttgtggtttgttttagagaaaacagtaacaattctgcaatcatttttgcttccctttctttgaaaacattccattttcctttctatttttttgcttatctctgtactaagaaccaaactaacccacagtagaactaaattacacttctctttcaatcatttgcgtctcaccggctaatctcattcctctgtcatttttacagttcttcgatcgaaaaccggatgtgagaagcctcgaggttcaaggatttgcagaggctcaaagctttgctttcaaagaaaaagaggaagaaagcttacaagatacagttctatttctacagatgctgcaaagtgaagacccctcatcgtttttttcaatcaaagagccaaactttctgacgctactgtctcttcaaaccctcaaggagccttgggaactcgaaagatatctttcacttgaggattcacaatttcattcaccggtccaatctgagaccaaccgcttcatggaaggagccaatcaagctgtgtcaagccaagaaattccctttagccaagcaaacatgacactcccttcttctacctcatcaccactcagtgcacattcaagacgaaagcgcaaaatcaaccacttgctgcctcaagaaatgactagagaaaagagaaagaggaggaaaacaaaaccaagtaaaaacaatgaagagattgagaatcaaagaataaaccacattgctgttgaacgaaacagaagacgtcaaatgaacgaacatatcaactctctccgggcccttctcccaccttcctacatccaacgagtaaataaccaaaagcatacatgaaagtttcaacctttaatcatcaaaaccttatcaaatgttgtcctgcagggagaccaagcttccatagtaggaggagcaataaactccctgaaggtgctcgagcaaatcatacaatctgttgaatcgcaaaagagaacgcaacaacaaagtaacagtgaggtagtagaaaacgcacttaatcatctcttaggcatttcgtcgaacgacctgaggacaacttttgaagatcaaacttgtatccccaagagcgaagctccagagatacaaagccatgtcagccttaaagttcaatgtgagaagaaacatggacaacttctcaaaggaatcatatcacttgaaaagcttaaactcact

SEQ ID NO: 61467 - DNA, 622 bp, Arabidopsis thaliana landsberg
  unsure (1)..(622): unsure at all n locations
ggcgcaggcctgtcggttattgattttccctgacagaataaatctatcgaaatagcgccctgatgtccttgtgctacggttgtaattacgtttttaggtcctaatgccgcatcaccaccgaagaatactttaggatttgtcgattggaaagtatctgcattaactttaggcatttcccatttatcgaactcaatccctaaatcacgttcaatccaggggaaactattttcttgcccgatagctacgagtacatcgtccgcttcaatgaatacatggtcttcgccagtgggtaccaatgagcgtttgcctttttcatcatataccgcatgaactttttcaaacatcatcccttttagctgaccattttctaccacaaatgacttaggtacatnnnnnnnnnnnnnnnnnnnnnnnnnnnnnnnnnnnnnnnnnnnnnnnnnnnnnnnnnnnnnnnnnnnnnnnnnnnnnnnnnnnnnnnnnnnnnnnnnnnnnnnnnnnnnnnnnnnnnnnnnnnnnnnnnnnnnnnnnnnnnnnnnnnnnnnnnnnnnnnnnnnnnnnnnnnnnnnnnnnnnnntactggtatgttcaaaagctacacttgccagccactcgataccgatat

SEQ ID NO: 61468 - DNA, 1343 bp, Arabidopsis thaliana landsberg
tttcctttgaaaattaatgagttaaaacaaaaagcatatatccctctttacagtatcacactatagaggacagctcataagttcagttacagtattaacaaacttgctaatgaagtgaaggttttaacaacttaccctgcaatgctgctgaaacataggaaagacagaggtatcattcaccacaatttctgcgtgttttctattcagaacgacccacttagagaagacaatggggtaaagaaaacatagcagataatattgtcagcttaactgcacacattcagaatgacagaattcgtagtcattcagaaacacattttacacaacaagtgatttggaacttcacctgtgatccttttctccagttacgaacaggaataatgggattcattctaggattataacggctatcttttgtatctgcaaagctgcaatacagaaaaatatttagtaatttggtgtcaaagttgaaatatggagttatgtaaataagcagcacggacctatcaacgaaactagttggtgttgacatgatgtagttatacgtgtagctgaaactgtacagaggtatgcagatgagaagaaaccaaaaaaactaaaaaattcgttaagcaagtcatcaactacaatccaaacatgaaaaggtattaacagaatcaatctcacctatcagaaagaaaaacaaagcggtgattaaatgaatctctaagtgcatgtctaagcaatacacgttctgcttcaatcatggttgattcaccccaatctacctgtaattagcaaataaatcatacgacttataaaaaacaatgctgctaatatctaaattgatacattctcatagcagcaacctgtatactgtcattaagttgccgatccaaaaagtacttggatcgcgttgtagcctcgttgagaacaaatccaggtctagaatgaacatatattgagaactttccatcctcaccctgcagaagcacatgtcattatggaccaagctcaaatacgagagtcagtgtttctgatcccaattagaggaggaggaggaagagaagagtatataccttaaagaaagcatcccagacaaactcgagagggagtcgattccgggcaatgaagaggaaggcaatctgtggtctctgatctagacgaggctttttaagcgaatcgagagacgcagagattcgattgaaacgagcttgtatagatgcgaaacgagcttgtataaatacgaaagtcccaaagcagaaagcgaacatcaacgtggcgtataccttcctcttccatctgtacagtaacttctgctgagacaccttcttcttcattttggatccacacagaaaatcgcg

SEQ ID NO: 61469 - DNA, 183 bp, Arabidopsis thaliana landsberg
ggggttacccaacatcagagccttgcagataatgggccattcgacagctggcgtaaaacccaatatgcccacaccgttcgcccttgacaacacttgcgcaacctgaatggtgaatggcgcccgatgccgaatttgctacttacccatctgtgcgggatcttacaccgtatatggggcacgctc

SEQ ID NO: 61470 - DNA, 589 bp, Arabidopsis thaliana landsberg
gacagtttttgagaacataaataaagttaagatagtgcatgaatattggaagttgctaggtcattctccatggataatgaattataaaatgattcttgacttgaccacaaataaatagtcccttcttttggagtttcttgactagcgaaaatgtggtcaaacatgatagacaattagacatcacatcctgaatggaatccataatctcttgagttaacatgttaatgcatccttaagctttttagcacagtttctatgtcaactcatgtaatgatcattttgattaaccatgttgttgacgatgttctcatcatttcctttcttgtgataatgatttgacgacctttaaattggttaaaattgttgttgacagtattttttgtatataattaatgtaaaagtaaaatccccgtgattggaaattctagaatatgtcaaattatttaagttctttgatacaatacaccttttaaaaacttttgtaataaaagtggttggaaaaaacaatttagataacggatgaacattaattaatcaactttatagatttgtcatttgtgactacaaatattgtagatacaatgaatta

SEQ ID NO: 61471 - DNA, 566 bp, Arabidopsis thaliana landsberg
gacgcacaaatgaatgtatcatcacgcgtactatgcggcgacccgaattgtgaagttcgaaggctatttctcggtatcgggatgcagtttgcatgcatatggtccaaagctggctctaaatgactgtgttaatacccttatgccatttgtaggtggttcaaaaacatgacacccttgaagaacttgggtgatagactagggtcttggtccggccttgacctagtatccattaatggtgtgctctgtgaggctaattctattacaaagaagtcctgggtcctgcattactgtatatggtgacacgagacggggattgggatgggggctgatcaaagcgacctggccgctcagagattcaaaaccgttttcgtagcccaccagatctaggcatcaaaagcatactaaacgacgtatcaagtcaggatcagcaaaggtgaatcatggacattatcgaaaaccaccattacttgacgggcatgtaatctcaaaaagggtaagaatgggggacctgtttacgagaacggtgatcttcactggctgacaaaagaccggagcatcgtatcgtt

SEQ ID NO: 61472 - DNA, 658 bp, Arabidopsis thaliana landsberg
gctcttgacatcgccggctatgaagcagaagccggcggtgataacttctcctcgccgtggttcttctccttctcgtcgtcttctagtttcttgtgttaccacaaaccctgctaggtaacgatttattattcgctttctttttaattatgttagatcttcgatttcatttctatagttttttttttttttttttggtagtagagatgtatatgaatttgcgttttcgttgtcttctatttatcatgtgattatgcgggatctaaatcgttaatccgtcgttttcttaacacatatagattatttaaatctatttcgctcgcagttactttgaaagttttttactggctattagtttaacgatttatgtcatttttttatttgcaagattttgttgattcacgagtcttaatgtttattaacatgatgagcattcattagtgctatgtccaatgagactataatactactttcttaaagacattggattccatgtatcttcgttaatcccattattcatatttcgattatgatataaactttttttttggtccacctgaaaacttttctatattgcagaatcactacactttttttatgtacactctatgaatgtgtatgcataaattggtgattgggttccaaggatcatgacattagc

SEQ ID NO: 61473 - DNA, 151 bp, Arabidopsis thaliana landsberg
  unsure (1)..(151): unsure at all n locations
nnnnnnnnnnnnnnnnnnnnnnnnnnnnnnnnnnccacgcgtccggtaagatcaggcaagaatacgaacgcaaagagcgccaagttgaaattcgcaagaagattgagtactcaacgcagctgaatgcttctcggattaaagttctccaagc

SEQ ID NO: 61474 - DNA, 688 bp, Arabidopsis thaliana landsberg
ggaaaattcttttaaatacaacaccttttaagtttttgttccaaaacaatttttcctcggctttgctggttcaagagtttgaaacaaaaagttggttcaagagtacgtaagagattggcacaatgtcaatgtatctctgcttcttctttaggttctctctgacgtacattgcaagaaaacccttttagtgatatttcagccgacaatttgacatatgcgttttggagtgtgtgctagcattctaacaacataaaccagtttattcgcctagaatttaacaaaataatttcacttatagcagtcactgcagctacgaaaattgtacgtactgatccaccattgttttctatcacgaaatatagacatatttcgactattctttgtttctgaacatgcacatcctctagaacctgcacacacaactcaactttttggtttgtacgtattacgaagagacggaccaagatttatggctatttgtgtgttggcttaacattatgttttttctggttatcattttcatgtcctactaatgttacatgttacttgggaacgaactaatgttttcctaaagtacgtaatgtttaaatgttcttttaagacctctataatattctacgttataatttctttaactttgtttttatgaaattactagatcataccgtaataaccaccaatccttgag

SEQ ID NO: 61475 - DNA, 379 bp, Arabidopsis thaliana landsberg
agatacattccctttcatttcgattcgactgaaaaatatttattaagacattttcttacactttggcaaaagagccatatatgttgattccatgatatacacataaagaaaattaatgaaacgtattatcaagttatatgcttactagggaatatttgcaacatctatagactgctgctgcgtgggcctagataaggtgatgagttactatgtctggctctgccgtagttgctccttgagggcaacttccaaatgcttttgagcatatacccggtgcgaaaataccattatcattacctaaatcccattccacactgggctgtgatgaacgctatccaatgattcactctttcacccaatgtgtcattacaaaacataa

SEQ ID NO: 61476 - DNA, 552 bp, Arabidopsis thaliana landsberg
ggagccggtcttctgatcgaatacatggcaacgccccgatggccgtgaacgacacgtggatgccgcccgatgcaagcacgattagcgtgccgagcgcgaacagcgtcgaacttgtcgccgaatgcagcaggtcgaacaatgtgccccactgcaggaagcgcggattgatcgacgcaacgacgatgcagcacagcacgatcaagccggtgggcagccattcgggacgacgcgccaacttggggcgccaatctggcccgcggcgcggctcggtgatttcggcagtatcgggggaactcatcgtctgattcatcttcggtggtggtgactcgtcattcgtttgcatgaacgcccggctggtgcttgcgtcaggcccgggccggccttcacgccgtttgcgcaagcaaagcgcgataaagctcgggtttcgtcagttcgtcggcgcgatactcggcccgtatgcgggccttgctcattatcatgatcccgtcgcaagtctgcagcagctcgggcaagaaggcgctgatcaagacgatgcccatgccgcgttcggac

SEQ ID NO: 61477 - DNA, 1015 bp, Arabidopsis thaliana landsberg
gactaacattgacgtttacataggtagtcgctaaatgttgtgactatatacccactatttggcgactatattacgactaatatattgtagtcgtaaacgagtcgctaaatggcgactactaataccagtcactaactcagtcgtaatttaacgactatgttacggctattatttggacaaaagatgttggtcgtaaacgcagtcgtaaatttatcataaatcagtagctaattgagtaccttataaaacaaaattaagaattcaaaacttatatatacactaaccataaatattatacttaacccttaacaaaaccccaaaatctaaataagacactatttataaataattgtaaaaggatctagttttcaaaacttaataacccaatatattcatctatatatatatgtgtatagttaatcttaaataaaaaaccttatatacctccaaaacttaaattttaaactataattcttgaaatttaaattcagaaacttataatttcattgatatataaacaataacaactaataattaatcatgaaatatttggttttacaacaatataatttacttatcaattatagtttttaaattaacaattcaattaatatatttatgaaaatggaaaattataattcataatttataaaaattaaagccaaaattaaaacatagaaaataaaaattatgattagtatgtttaatctgaaaggcgactatttagcctctaattagcgactaatgtaaaattttgggttaattaaaacccgcgaaaccaaatccaaatccaaattttggcggcccaattagtttttgcgttctctctcaaaatctctaacacatcggcatatctccaaataaaaacccaaatttcttacacgacttctctctcacatctcttcgaatcctttcagtctcttctcacatcttcccaactcctcaattcaactaaccaaatcgaatcttctcagtgttttccgtgaatcaatcatgcctgtagccaacgacaaca

SEQ ID NO: 61478 - DNA, 426 bp, Arabidopsis thaliana landsberg
  unsure (1)..(426): unsure at all n locations
gggggggagatccagagagtgaccaaacataaccaactttcttttcacataataattgacctttctcaagggggggggtaattaaaaatannnnnnnnnnnnnnnnnnnnnnnnnnnnnnnnnnnnnnnnnnnnnnnnnnnnnnnnnnnnnnnnnnnnnnnnnnnnnnnnnnnnnnnnnnnnnnnnnnnnnnnnnnnnnnnnnnnnnnnnnnnnnnnnnnnnnnnnnnnnnnnnnnnnnnnnnnnnnnnnnnnnnnnnnnnnnnnnnnnnnnnnnnnnnnnnnnnnnnnnnnnnnnnnnnnnnnnnnnnnnnnnnnnnnnnnnnnnnnnnnnnnnnnnnnnnnnnnnnnnnnnnnnnnnnnnnnnnnnnnnnnnnnnnnnnnnnnnnnnnnnnnnnnnnnnnnnnnnnnnnnnnnnnnnnnnnnat

SEQ ID NO: 61479 - DNA, 658 bp, Arabidopsis thaliana landsberg
gcccaaccgtaaacccgtcagcgagatggagagtgaactggcccggcttcgggccgagaatgccacgctcaaattggagcgtgagatcctaaaaaaagcgacggcgttctttgccaaggaatccaagtgaggtacgccttcgtggctcatgaacggactcattatccgcttcggatgctgtgccgcctgttggaggtgtccgtgtccggtttccatgattggcggcaccggcaagcgcggcccgatccggacgccaccgtgcgtgccgaactgcgtgccatgcacgccgagagccgaaacacctatggccgcccgcgtctggtacgagccttgcggacgcgttcccatgcggtgggccacaagcgcgtggctcgactgatgcgcgaggaaggcctgcatggcaaggtcaaaggccgcttcacgccacgtacgaccgacagtcaacatcgtctaccggacgccgaaaatcgactggaccggcagttcgccgtggaccatccgatgccggcttgggtcggagacatcacctacatcccgacccgtgagggctgggtgtacctggctacggtgatcgaccttcgcactcgccaggtgcttgggtacagcctgtccgagcgcatgcctgatgatctgggggcagaggccttcctcaacgcct

SEQ ID NO: 61480 - DNA, 1510 bp, Arabidopsis thaliana landsberg
aacatttttaatcataagtcaaaatgataaccaaaaagagatcaagactttacctccaaagcaatgtctttaaaagttactgtttccaagtcttcaaattctagctttgtagctatttctgtttccatgtaacaaagcagaatcagtcacataataaaaattgtaatgaatattatttgacttgtgatagatccttactttcaagggaaatggatacatctgctgtttcgtaaccctttcttgatttctcgtaactcgcttttattgtgtcaaacaactgtgttcatccatcatgaaagtcagtttctctgtaataaggccaaatagaaaagttatgcagctcagaggaaagaaggaagaaaaacctcaggggaaggttctgagtggaatgaatcatcatcccctttagcagtgatatccagaggaacatcgatccatatggagatcccgtgtctaagaagtgcactgttcaaatatttacgatcaaatgagaacagacgggagagatattaaacagatataagcagtgtgtgtatgtcttctaaaagaatgaactgctagagagaaactagtgaaacttatatagaacatacagatttctcaagctttggaccgcaccatctccagcgcaaactacaagccgacccatagatgatagctgcttcagcacttcagtctgcagaaaagatgttagaaagtcatcgtcaaaaaccatttttgtaagtgcgatcaatactctttcaggaactggaccagagatgcatttgtacgataaaaaatgcagatcaaacgatatatagtttacctctgattcttgaaaagccttctcatcagcttccttcaaagcttgagcagacacatttccaccagccgcctctgtgatcaaattatcactacccaatcaaagtaaactaaagttagagtaatgtgaaagtacttacaaacattcaatgtgaatttatttcaagacgaggagaaacattatggtggcaacggacaaccctatgttatggaggtaaaggtccaaaagagagagcttagagcttaaagcttaacactaatgctcggataaactggattgcacaaggataaattggattgaaacgaagataaatacagttagtaacagtaagaaatgtctgaaattcaggccactctaaacaactataagggtttccaaaaaaaacaaaaagtagaacttatgatgaacttatgagtgcttacctatcaaagtagtaatatcgtaatgcctcagccaaaagcttccccgtgttcgttttaataaagttattaattcctattccaaattgttaatgctcacacatcagtatccatccatatgaagtacacacttcaaaaacgggagcttgcagtaaaaaatcttagccaagccggccttaccaaccagaaatatggaagctcctttcagttcaggggctatgtccatagctttcctctgagtttcagacggaaaatggttaaggaacttctgaagtaaataggaagccca

SEQ ID NO: 61481 - DNA, 524 bp, Arabidopsis thaliana landsberg
  unsure (1)..(524): unsure at all n locations
nnnnnnnnnnnnnnnnnnnnnnnnnnnnnnnnnnnnnnnnnnnnccacgcgtcctcgtacgcgtgggaaaacccattttcgccccagtccccggcggcgcaccgtcgccggcaaccctttctctctcttatttactcttcgtctgctttgctcatacatatcctccattttttttttgcattaataaaaaattgaaaactcaaaccatttttttcttcttctcgcaatcaaaaaacacacacaaatcaaccttcgtcttccatcgcttgcttcacactcttcttcacctctcacccaccgaaatctacaccaccccatcacaccaaagtgtccaagtttgaatctttgaggaaaacgagcacgtgggtaacggtgcttgttagagagagaaagagaaacagtgtgtgtgcgtgtgtgtgaaactgtgaatcattgttatggtatggctcagcagaggcaatcgggaatggagaggtttggggtgagagatctgcaccacgccaacggcgccggcgatcacgtcg

SEQ ID NO: 61482 - DNA, 392 bp, Arabidopsis thaliana landsberg
  unsure (1)..(392): unsure at all n locations
cccnnnnnnnnnnnnnnnnnnnnnnnnnnnnnnnnnnccacgcgtccgataagggaaaggatttggccctgcatgcttgcgccggggtgtctacccatacattcctagactcactactttttggagagtgggaagatcgcatgcagagaggactctttcgctatgatcttactcgcctgtgaaaccaaggtgtttcctggtgtatatggtttcgctgcccagcttaatgagggtcgatacctcatgaagagaccaacctgagtttcgagtagacaaggtccttcaaacctatgatgaaaacaacttcaactttaccaaagttggtcaagaagaggtcctcttccaattcgaagctagcgaggatggacaagacccagttcttatccaaatgc

SEQ ID NO: 61483 - DNA, 471 bp, Arabidopsis thaliana landsberg
  unsure (1)..(471): unsure at all n locations
nnnnnnnnnnnnnnnnnnnnnnnnnnnnnnnnccacgcgtccgatggtagaaggttaattcattttggcctttgggtttattttcttataaatatatacttattgagaagctcgttcatataaactgccaggcaagtggtgctacaggccacttggaatgagctagcagcagggttttgggtagttactctttgattaaaaagaaagagccagtgagcacgaatatggttttatgacttttatcttctcagccatttattgatattcaatcattggatgataatccactcagctatctattgatattcacttatccctcaagtcataaacataactgctttcttttattaagaaaaaaagagaagattttcttttgaattgctcaacttaattgtgtccaaatctttgaattccagaatggccacttctttcaccttattcccttttgtagggcactttaattcgtggctt

SEQ ID NO: 61484 - DNA, 985 bp, Arabidopsis thaliana landsberg
aagttaagggtgtggctaaaagtaaccacgtgttgcattgtcattgggaggttgcggccggaaatgtgagaatcctgatgatgctgctgcaactgagaacaatggtggtggttgtggtcccggtggctgcggcctcacggtgcttgtttgccccggtctctgccatccccagttactaatcatcccttcagcttcacttctcttttctgttgctcttccctgaaaaaacaaacattgtttcattgtcttgcgactacattgtgttgtttcactttgattctatgtttttacctcggcgggattattataactcgggcatgctccgttccagtaaaggcgatgatccgaggatccataaggaagaggtgtattcaccggttttcccatgtattcgttatctatctgcagtttgtttaaaagacgataagaaacgtacgttttgaattcatgagagattggtatttgaaagttagttaccctcaagctaactccacgctgagtttcataagtattagaagggaagtgaaagagcctcccattttgctttggcgcattaccggtcgataaagagattcccaagttgaggtcaatctcagagttattgctctcagagttaatctcattttggtatgaactcatctcgaagttcgtgactgcttctctaccattagtgttgattgcagccttgtcataagccctgttgtcaagaaaatgtttagaaagaaagaaacctcatgttggctttgataaaaacaaagtgaagttctactaaaggtttctatcaaacaatgatcattaaggaaccttgcagcttctacttcgctgtcgaacagcccaagataaatatacctgcaattcaagcatcttaatcacctaaccactacttagacaccattcctagtttcataccctttctaaaatcaaagttttcatattaaagaacaaaattgctcactttttaccaagaaacagcaccatcgagctt

SEQ ID NO: 61485 - DNA, 563 bp, Arabidopsis thaliana landsberg
atagtgggttttgaaaatgcaaggagattcgtctccgtctccgacgactactagctctcctttgataagacctataaacagaaacgtaattcacagaatctgctccggtcaagtcatcttagacctctcttcggccgtcaaggagcttgtcgagaacagtctcgacgctggagccaccagtatagagattaaccttcgagactacggcgaagactattttcaggtcattgacaatggttgtggcatttccccaaccaatttcaaggtttgtgtccaaattcgccgacgaacttttgatgatttgggattctgatttttgccctattgaagtaggtctttcgtctatgtgtgtgggattacaggttcttgcacttaagcatcatacttctaaattagaggatttcacagatcttttgaatttgactactcatggttctagaggagaagccttgagctctctctgcgcattgggaaatctcactgtggaaacaagaacaaagaatgagccagttgctacgctcttgacgtttgatcattctggtatgcttactgctgaaaagaag

SEQ ID NO: 61486 - DNA, 1053 bp, Arabidopsis thaliana landsberg
gagcagaacgccttgggcttgaacagtatctttttcaaagattggtatagaaataggtatcaagaaacctgtagcatttcctttatcttcagacatggacatggaattagtttctgtaacagaagctgaaactttttcaacacgcaaaagatatacataaccatccatcaagatataattagccacataatcatacaacacagaaatagctaggtatcaagaaacatgtagcatgcatcacctttatcttcacgcttaataacattagagagacatttagctattgaagctccatccttggaaaataatgcatcaagtaacgtttcttcttcctcagtggccatatcctggtaattaagttggatctgaaactcttgagattgctcatcaacatcatcatcatcaatcaaatatcttccaatccatacactgccttcttaataaaggcagtcattgggattttctgacttctatttgctgctcataggctagcttaaggatcttcggcgttagtttcacaaattcatggaatttagaaaccctatcaattccaaaatctacaaaaaggttttaaaatttcccactcaccttcctgaggaggaggctacgacgcgaatagctttacatttccacttaatcgccattggatatagtcaagaagtagagactatgtaaaattaagggaacgcaatttagcatatgaagaagaaaccctacttgactttagccctaaaatctattacgtgacccaagcggctacttgtacatctgtcataacgggcagaatattttggtctaagcccaatgagctaatatgggctttaaatcttaagtccattaacatcaaattcaatttgttcaaacgcgaaacgcaaaacgtattgtgcagctgcgtcacactgttgaaactcttcgaactcccaaaacgcaaaagcttcgtcttcttcttattcttcatcctcgtctcaccttcgattttggcggcaaaacataaacccctaaggtttgttcacactctctctctctctctctcacacacacagtcgcagagta

SEQ ID NO: 61487 - DNA, 1320 bp, Arabidopsis thaliana landsberg
aggtgctgctgattgggatgaagattgggataagctagaggacgaaggtatacttgctgtttagattttgattttgttgtcagatgagattattgtggaagcatggctgtagatataatatcgatatcttgtgtctttataatttttttttgggtgacctatcttccaaatttggctatggaatatgcagttgaacacttgaaattgacatcttattttctcttcacttccagggtttaccttcgtcaaggagcttacacttgatattcaaaatgtcatagccccaccaaaggaaaaatcatcagcgtggagaaaagaagttgatgtctcttcaaaagaaggtgaagatgtttcattctcagatgctgactctaaaacggggaaaaagcaaagcagtggtgaagaagattctgagcagtcagagggtaaaacatccgatgttgatgccagagataaaaacggatctctggatgactctaaagttagaaagggcattgaagctgatagttcacctcgaacgaaagatacgaggaggtatgttttttgtgctagacctaatgtgttttggattgcatccttcttagctgttttgaattcatgtgtttccgtgaaaagtactgcaaatagaggaaaaacaggttcttttctccagagaagaatatatctcggttatttacattgtctatgttaattttccagtgaaaatggccatgatgatggtgaatctactgcttctgctggcaaaactgtaaattatgactctcacgacgagacagattcagtttcaagcgtcaaccctgacaacggcaaggtaaaccattttgaacaccccgaagttttgggtttgttgcgtttgataatatatatatatttctttaacctttgtatttcgacatgaaagaatcgttaatttttacgtaactattttttgttatgtttttaccaggacaaggatcatgggaagtatgacagtggttttggatttggatttgggtttgatgacttcagtattaagcctataaaaactggttcgaccatttcaaatgacttcctccctcctaagttatctatatttgctgattccgtcccaagcccaccggcaaatgcaagcgacgtttcccctacaaaaccttctttgtttgctgattcagttccgagcactccagcgacgaacaatgcctcttacccaggccagaaatcattttttgatgactcggtcccgagcactcctgcttatccaggcaacttgtttgctgagaagaaatccttctttgacgactctgtcccgagcacccctgcttatccaggcaacttgtttgc

SEQ ID NO: 61488 - DNA, 421 bp, Arabidopsis thaliana landsberg
  unsure (1)..(421): unsure at all n locations
cccnnnnnnnnnnnnnnnnnnnnnnnnnnnnnnnntcccacgcgtccgtgagagagagagacggcgatgcattcacggggcagaagnnnnnnnnnnnnnnnnnnnnnnnnnnnnnnactcttttgttcatattcgacgaccacgccgccggatgcgccgttgcagttcccgcagactctggcggggctccgggcgcggctggcggaggagtcgccgtcgctgtcggacttcctcgcgttaaaatcggagagcacgtactcggcggaggtcgggactaagaannnnnnnnnnnnnnnnnnnnnnnnnnnnnnggaggccgttcccggcggcgagaagtacgtgcagatcaagaagaagctcctggaattgaagcttcacacggatcgcgaggaggcttggtgccctaattcgggggagtgct

SEQ ID NO: 61489 - DNA, 349 bp, Arabidopsis thaliana landsberg
  unsure (1)..(349): unsure at all n locations
nnnnnnnnnnnnnnnnnnnnnnnnnnnnnnnnnnnnccacgcgtccgcccatgcttccgatctgaagtcattgagactgtgaagctgcttgttagagatnnnnnnnnnnnnnnnnnnnnggtggagcggatcttgtgggatgttttaatggatgctgctcagcggtctggaaaaaatcagcaacagaatgcatatgcagcccttcgccaggtaaaaacttgggcagaattgttgaatacattctgtaccagcgggaaacttgagctggaactggtgtacaaagaacaaatgccatgctaagaggatgcctaaactgatgaagctccccccctgagaatattagatctct

SEQ ID NO: 61490 - DNA, 1001 bp, Arabidopsis thaliana landsberg
  unsure (1)..(1001): unsure at all n locations
ggtttcatttttaccggtaagattttgatcctgactgtgttaacattttacctcagttcctccacttttaatgtgattctccattccatcaatgtcaaatcaacgaaacaactgctaaagcagagctttcctatattttaacatattccggaggcgcaagtatctttggcaaatggcttggttcgcctacaaattctccgtagtgggggtacaagagactaattaaccccaggctagtaggttcaaagaaaaacataaaattcgaaagtgattcattagagggtgtttttggttcaagggtaaatacaatttttaattttacaaatgatacaagaccattagagataatgagattttctcaaggctctaatcatgtgatacgccgaggagctttctgctttctttatcttggactgttcatctcccttcatatataatgttttttcttctgttatcttaatcttagcagagcaaacaaatctctttccctgtaccgagcttctatcttcctcaacgctgaaaaaatgtgaaaaacaataacaaaatgtttttaaacaatggcttatcaaatgtgttctgcttcttgagattataagactttagactactcaagtatgtgaatgcttccaaaatgtaggagtaggatatacctgtagataggcttaggccactttttctttaagcaaatctcgttcaacttcgttttagcatgtgtaagttgaatctctacactatcttcatcaataaccatttcaacgggaaaaacttctgacaacttccgtaacnnnnnnnnnnnnnnnnnnnnnnnnnnnntatctttattctcagctcggcctgaagccacaagctcatcatcaagatatataacagcaatactgacattaccatctttccaattcttgatgtcgattcgcttcttatgtttatcacataatttaaaaagcatagacacaggaagaggttgcttctgcaaatcgtacaatgtaattatcggttccaaa

SEQ ID NO: 61491 - DNA, 1223 bp, Arabidopsis thaliana landsberg
atatggcatattccaagctcagaaaatggaaaatcttcttgctgaataattataccacatacacctttctgcccatgcctactgctgaatttgtcgccaagctgaaaaaaaagccagaccaagacatgattaacactgtagaacatgagggctagggctagaagcatacagtactgaaaaaaaaaattctcacctctggtcgacgagtatggcgtatgatatatttgatgcacaactggcctttcttatcagaacagagagcaactctatcgaccacttgcgtctccccttcaggacctttgaaatactctctggccggacggtattgactgaaaattacacaacgaattgtacattggtgattacagttttaagaaacaattatggtcatatactttgaaaagttaactgaatacctatcagataacgcagatgtaaacttagttactgtgtccacagggacttgtttatttatataaatatcattcggtctgataatctcccctggagtagctaacccatcatcatccagtatcttgaaaagaaaaaataattaacatgaaaacgtattcaacatgtatcagcagacggaaaggccacagttaagtaaataaaaaataaacaccaaaatggaacaaagagaaggaaaacgcttatattccgacactctaacttgccctttggataatcacaattaagaaatctccgatcttcaaacacagaataggaaataatcacgaactagccctttgggtttatgccagttctgtcatagtttctaggcagtcatatttttgttaatgaagcgtctatcttgagaataatacagtcacatattctaataagctacaatcatattgtgcttgctccctctgataagaaattgcaaagtccgaacatgtatattgtcctcaatgtattagctagggctgtttccacatcatctaaaaatccggaaagaattagcatttgcaacaacactaattcccaaagatcccatttttaaaaataaatgacttgcacaagttttatgatacggcatatgcagacaaaatgtactacctgcatcttttctgcatctgggcctgttctttgtggaatgagtattctgtctgctgtacagttgtcatacttctgggacatagcaacaatttctgtttcacaaaacaacacaacacgagaagcaatagttaatgtaatagacaatttttcaaagcaaacga

SEQ ID NO: 61492 - DNA, 121 bp, Arabidopsis thaliana landsberg
aaataggttggaatgactgtccgcctaaactatgtagggtaggtgctcaattcagaaatttgggattcccctgcatgacatcttgaaggatgggcccagagcaactcggtcttttatttca

SEQ ID NO: 61493 - DNA, 1816 bp, Arabidopsis thaliana landsberg
ttttgtccaccacgtcaaggttatgctgaatgaattgctttctcagattaagaaagactttattgctagtgattgcttaagtcattcatcgtcaacatggaaaagatgcaataatacaaacacgaagactcttagaagtgaggatactggtgtcatcttgtttggaagattgaaggtacattagaattttaaatatcgtccctccatatctgtgttatgcctccatatcgctccaagatatctgaagtcttgcattagtacaatgtgccatcaaataacttattaaacatgtttttcttaaattgttgagatgtcagtgtcatcatgtcagcttgatagggtatatatttttacttgatatctggaacatatctttagctttggtacataacaaggtttatatttttctcgattcatacccttatgtagctgtgacattattcttctattatagatctcatcttctggaagactacaattgcatgacagaactagcagtattgatgttctgactccagaccttctaagtgatagaaatgcgagcaggatatgtgaggttaatttttagttcagactgtattttcttcatttatccggtggcatgttggaggataccaaactcgtcctattgactctttagtttatcctcttttgtccattgtaggtttctgattactatcttattatagaaggaatacctgaatcgatgcttcacatgccatttcttcaaaatccctttcgctgtagtagtgtgcttaatcccactccattggccaaaataaacaccttgacagtgcctttttctttatcgcttggtactgcaagttgcaaacatcttctcaagcaccatccttttgactggaggcatgatttcaatgagttcaaagagggattttttcatctatttagggtgacccacaaatttccaatattaaaaaatgtatggtttcatctttcaaatagcaatctccaagtctcattattgtttatttagtttgcttaaagaaatcaatgttgttgtttatgctacaaggtcttaactgttatggttattaatcttgtaccagggtcacccaggaatgcctgactgtactagtgtattcatcgaggctttagtccttccgtgggatctcatttgcactgtgaccgaagaagaggcagctgctcccaattttgaagaacatgatacttcccaagaaacacgtccacataagagatgtaaaactaataatgggctacagagtgaaagctttctatctgtgccacatgaactttcttgccagatgaccatcagatgtgctagtagtcactgcttggttgcaacagcaactctttctaatttgacggagaacaaaagtggtaaaatgcacagtgctatgcgtgtgctgttagaattcatacctgaatgcagtaactattatgtaagtattaatttcttattaacattggattcccaggaaacatctatgctgcacagagactaatagtataaactaaatgatggttttgcattttaatatggcaggggttacagattggcggttgctatttgatgaagcatggctctgatgattccttttgtgttggacggtctggcatatctaacaacgataaaatcaattttagaccagaaacacgtttatggagtctggaattttcttttgacgaagttctcacccatgatggatctatggatgtacatcctctggtgtcttttcaaccatcttttgcggtggaacagcaaaatgtttctagtccacaaccttgtgcagatgtttcgcttcttctccttatgacgcaaaaggactcttttagt

SEQ ID NO: 61494 - DNA, 1458 bp, Arabidopsis thaliana landsberg
gtgtaaattccacgttcgatccctctagagcattttgtatcacttaatcttagttaagagatatttttaaaggtgcagagaaccagactaactaaagtacaaagtttttcataaaaattacgtaaaatcaaagaaagagagaaagaagaatctcgtatgataatcttttcaaaattgttgaatttggtaaaagaaagtttattaaacatgtatacatatacattaaatccttggttcttgagtttcatataaaaatagatatttttcaatgttgttgtttttttcagatacaaaaaaactcgatcacagttttcttgattttttgttttaatattcacacaaacgcttcattgactaaatcgacttttacaacgattggaatcgatcgatccacatagaacttacaacaactgaaattagagaagatttgaataagagaaaagcaacgtaaattagattaagagacttcaataactgatagaaattccgattattcattgaaacatccgttcttcaggcagtgtgtcataactcataagatggttcacctttacacttgacattgagaagcaatctaaacctacaggctacacaaaataaaacaatggttaacaaattgttattagaatgcaatatattttcaaattataccatcgtaaataactaaatattcttatatgttacatgttcaaaactgaaattggcgaattattaaacttgagtttagtgaattattaattcctgtgatattattaaaaagaaaatatgatgaatgtttttcatttattacaagcaatatgtcgcatcactattaattacctaatcttaattaactctatagagatctaatgattcggttattctatttttattattagtatcgtggaccttaaataactcaacccactaacccatccgggcccaaacttggtgggcctaattgtttctcagaggcaatccaagaatctgaatccaaccaaataaggacatcattcattcggctctgagattctcttaaagctctctgcaactgtctcaaaccaagacaaagatattacgcttaatactactaaagtgaagcatccaaatgcattaaaaaaagaaacataaaactctatcacccataagttttttcactacaatgaaccctgttttactacaatccattatcatcaacaagatgtaccagaaaagaaaaaaaacaagcttaccatgacttcatatgaacttctccgtgaaagcgagcctcctaaactctggtaccaaaagcggtcagagaactagactacacctactaagacaagtacattttgacatatacatcatagagctgctgtagatatccatcactgacgcctgtgcatacaagagacttacattatttcaaagtgaaactcgtatgcattcaacttttgcattaccagttagttaaccactgcctatcatcatgggttctcg

SEQ ID NO: 61495 - DNA, 387 bp, Arabidopsis thaliana landsberg
  unsure (1)..(387): unsure at all n locations
nnnnnnnnnnnnnnnnnnnnnnnnnnnccacgcgtccgtgcgtgctaactgacatcagagttccttaccgcagtggtaatttatagaagctctcaagaatatgtcctcaatgactcaaacttgtcaaggcgtgctttgaagaatgctgctcttgcttactctgggatgccttgaggaacatgaattcaccaatcttgtgctgcatgagtataaaactgctacaaatatgactgagcagtttgctgctatggttgccatagcacaaaaccctggtgaaacccgtgatgatgtttctcgctgacttttttggcaagtggcaccatgatttcttggtggtgaacaaatggcatgcttttcaagcaatgtatgccattcctggtaatgttg

SEQ ID NO: 61496 - DNA, 490 bp, Arabidopsis thaliana landsberg
  unsure (1)..(490): unsure at all n locations
nnnnnnnnnnnnnnnnnnnnnnnnnnnntcccacgcgtccgataatanctcaaaataaaacaaccaatccacacactgcacacccttttcaacatcctcagcaagttcaagaacaagaagaaacaatgtcttgctccaattctcacaatgttggtgtcctcaaaaccttccctttccgatccctccaatctctccttccgctctgtcctgaacctttttcagcttccttcacaaaacccaacttcatgcactccttcacgctcctcaaccacccaaattcagtgtggtctgagagaactcagaacccgcattgattccgtgaagaacactcaaataatcaccgacgctatgaagcttgtggctgcagccaatgtgagaagagctcaagaagctgttgtcaacggaagacccttcttagagacccttgttgaagtcctttacaacatcaacgagcagctcctaactgaggacgtagacattcctcttacaa

SEQ ID NO: 61497 - DNA, 662 bp, Arabidopsis thaliana landsberg
attgttgtgatctgtccaaacactggatgctcggtgttagattccctgactttgcacaagactacaagtagctcgctagttgttattggtatgagatccacacttattcgtttaggattttgttttatgttcgagccgagaatgaaaaatgccgatgaagatttgaatgtagtcacatttttgtggaaacaagggatacaatacatgatgcgaattacttcaattggtgatgacaaaccaacgtatactatgtgaaactaacttttacaagataatatttcaagaggattttcagtatatataaagcaagaagttagaatcctatgacaatacattaatgttgtctaaccaaagagaatgtacttttgtgacatatggagttcatatgttgcgtcggttacattggtgatgactcattactattctaccttagtgtccatcacataaaattctgtgataataaaatgaacaaaaaaaagaaagagaaaaaaactctaaagtctaaacttaatacttcgattagaacttgtttgtggagctaatcttagggattcagatctcttagaaagagtagtcgtcgttgtttgagaggaaagctttggagtttttggtgtcggcgtcacccgggtgctcgagaccatggacgtgagaccacccgtcgc

SEQ ID NO: 61498 - DNA, 833 bp, Arabidopsis thaliana landsberg
ggtggaatgttatttgtttctttccaatctcctttctttttctttcttactgtttaaaataaaataaaatagtattagtatttattattcattacatgttggagttttgtttattctgttagaatatgaaacattatagaagttaattaacttaacgagaacaactgtttatattgcagctgtagtttaggcaatactagagtatacaaatgacaagagggcacgataaaggtttcgtcaacgcggacaggtaatttgtataaggattatgattgcacatggattcggcatggccttgtcataacatactttaaaaaaacttaactatgtaaagttattaatttactaaaaacagaaattatatgattccattttttagttcggaacatggatgttgttcttgtggaggtatccagattttctaaaatatagataacatccagaggttaataatccagatatttgaaaacagtaaatcgttgtccaccccttcattgacatcttggtcgacataccaatagaataaagcagatgtcgaaatcgttgacttgaaacgtgtgtcaaaagataatacgccaagtcttttgcgttatttcattgtaaataggatacaattatcggcaagtaaaaaaaggagaagaattatatatatttagtagagttttattagtgacataatagataacgatttggtttcttgagcctttaacaacttactttgaaatcattgacaaatattacttcacataacttgaaaaaagaacgaacaagaaagaaaagaataagtacataagaacccaagaacataagagaggatttcaacaaggtcgaag

SEQ ID NO: 61499 - DNA, 428 bp, Arabidopsis thaliana landsberg
  unsure (1)..(428): unsure at all n locations
nnnnnnnnnnnnnnnnnnnnnnnnnnnccacgcgtccggaaatggccgcacccttctttccacaagcttgttctacccttcattgtccaacccaaccaacaactgtctgcctattgaattcatcagataagttcggttcttagtgtttagaacactgatatagtggaatactccttctgcagacttgtattactaacacttaccaatatttggaatctaactggacttatgaatagcagaggcttccggataattctatgaggaaatatgggggtgaactctctccaattgataccctctctgatcctgatggtagtgtttggtatgtaggattgaaaaaagcagacaacaagtattgcttccttgatggttggaaagagtatgcccaacgctattccatgggcgttggatacttgttgggattcaga

SEQ ID NO: 61500 - DNA, 504 bp, Arabidopsis thaliana landsberg
  unsure (1)..(504): unsure at all n locations
nnnnnnnnnnnnnnnnnnnnnnnnnnnccacgcgtccgccatcgtgtccgcccacgcgtccgcccacgcgtgcgcccattcgtccgcccacgcgtccgggcgtcattggcttgaacaattgctggcacccagttctgatgccacaatgcctacattctctcattgaaattacttgtccttgccccttatgagtgtgctcaacatagcttgagagtttggattgcaatcatctacagcctcctctgatgagattgacttttgtgctgtatgcctggagaggccatgttcagtggctgcagaaggatgtgtgggcatgagctttgtgtaagatgtgcactatatctttgctcaacaaacaatgtttcttctgaaatggttggcccttctggctctatcccttgccccctatgtagacatggagttgccttttttataagttgccacgttcccaagcaaaaagaaataaacctcatgtgtctcttggcctgtgtaccccatgcatgc

SEQ ID NO: 61501 - DNA, 869 bp, Arabidopsis thaliana landsberg
ctcttcttaatccagttgctgatttggtatgtttatttgatatagaaaacccgaaatctccttggatttcgtttccggtcttaatcaactcgatatcaaagtttctaaatcaatcgcaaatccgtctcattcataaacactataaagaacatcaagtaagtccactttctttggctctctgttttacatcttcatcataatatattctcattgttggttcctttgctactcacaggataggagaatctcgcggtgtgagttgattcaacgcctgagaagtataactggagatagcttattggttcaaatcatcaaatctgttggacaaaaggtacataaagacacatgaatacaaaccatttctggttttgtttctcatacataacttccacaatgctggttcttcgattatgtttcaggcaccggaaggatcaagaccgataaatgtacagtcacagcgtggctaaacgcatcgatataaagagtagtcgtttattagctacaatgttgattacactagaatttggatgtgtcacactgatagtagtgtttaatatttgtttttttaatcacaaacttcagtctaatttacatcataattacgtaaaacacaatttcaaataaacacgcctgtgatttttctcgtataaaactacaacaacgaaccagaaaaacctgtagagcacaatccgttaagttaagaactgtgagtgtatgtgtatgcgggcggattatatttcaattcacgatgaaaaacgtcgggaagaaccgcttctagaaaaacgtcgggaagaagtggaaccgcttctagtaaaagtagcaaactcaggatcaatcacaattccctgaacttgtcttcgtcctctccg

SEQ ID NO: 61502 - DNA, 654 bp, Arabidopsis thaliana landsberg
actataaggagattcctcaataggaaatccgcaatccaaactgatgaaacctgttcaagcataaaaaggatcgacgaagtttaaaaaaaaaactatatatagaagatatatcaatttaaaggatggatgatcctcggtgaatatctactaaagagtttataaattattaccttcttgtttttgggcgccaactataacggcaaaggttccaatcatggccaacaaaagagggctcatcatcttcttggaaagctaatatggaaatcaagaacataaaaaagacttgcttagtgaaaacaatgagctacgtaaatgagaaatacctcacatacacagattggaaggaataatacattaaagaaagtcaacttaggccaaacatgaagattgaataattgcgagaattgctttatttttggtttattgtgtgaatttctttgacatgttccaacctcaacttgcgtttaaataataggctatgatcataagactccgacatgtatatgaatttccttgtattaaggtttgtatatgtcttctttaaacccttgaccaaacataataaatcttcgattgatcgttacacttggggcacaaggatataacaaggtttgatttaggtaattaatttgaacccggtcgttacaaaaaagg

SEQ ID NO: 61503 - DNA, 1334 bp, Arabidopsis thaliana landsberg
ctacctggctattaaataattaatgcttatgcctctataacaagtatcatgactgatctattagagtattacagaacaaaagatcagtaccagtaactgaggaaacccattcagtgcgtctactgaggccaaatcgccaatgttgttggctcctgagaaatacaatggacagaataaatggccaaatttcaagagaggaggacactacacttgaggagattacctagaagaagacaactcagactaggaaatgggtcgctgcctttctctgatgattcagtgccatttacagactgaaagatgcgtgaaagcttattcttattcaggtaaagctgctccaagctgagaaacaacgtttagattatcaatttttagaaagaattaacggtgcaatgtatatttacaggtccatcaactatgagtagaaaggaaaaaaaaaagtattactgaccatggaagttgagatagctttaatacttcactccaatcggaaatacaattatcatccaagttcagtagccgcagagagttaaatgcttgatcatctgatgaggacgtggactgcaagaaccaaccagggggaaaaagggagttcacaatttgcaagctaaatacccaagtttttaaagcaaaagaagtgttagaatgagcgtaattcaagtatcgtcttcaaagagaccaaaccgatttccaagcgttttcagactatatcctacttggagcaacagagtaaccattgaagctacaaaataaaacattactgttatggtagatatcatgttccccatcagatgcaactcctcaattccaggtaacgagcgcctaagaatttcaacctgctccaggacggtaagaaccataaaagtcaaaaactgcaataatgctcaactagttcataagcaaaaaaaaaaaatagtaaaagagtcacatatcacctgagtccagctcagaccactattattcagaaccaaaacacggatattttttaactctggcagagacttgatatcacttgacaaagaattgcaagacaaattaagggttgtaagtgctggtaactgttcacaaagagcaccaatttcctgaaagccaaaagaacaaaagatcaatcataaactctaacacattagttggtgatagataaaacaggaacgactcatacctcccagttagaaatcaagtttccagttaagtccagcagcttcaaatctgtgtcagaggaaccaaattacatcacaacacgctcatttaaagggcgggagaaagaaagaggcacacgattatctttgaccatggcggagctgaaactagatccaacttacctgggagaattg

SEQ ID NO: 61504 - DNA, 483 bp, Arabidopsis thaliana landsberg
  unsure (1)..(483): unsure at all n locations
nnnnnnnnnnnnnnnnnnnnnnnnnnnnnnnnnnnnnnnnnnnnccacgcgtccgagtaatagaaaaaccccttcttatttattaccgttgcccttttctctcagtgtaggaggaaacgatgagcagttggagaagccttcttctgcgaattggggacaagagccccgaatatggaccctcctccgattacaaagatcacattgatacgtgctttggcgcccttcgtcgcgagctcgaccactcccaatccgagattctcgagttccttctcatgtgtgctgagcaattgcctcacaagattcctctgtatggtaccctgattggcttaattaacttggaaaatgaagactttgtgaaacaactagtggagaaaacttcaaagtaaatttcaggatgccttagattctggaaactgcaacggggttcgtattctaatgcggcttttgactgttatgatgagcagtaaggttcttcaaccaagc

SEQ ID NO: 61505 - DNA, 468 bp, Arabidopsis thaliana landsberg
  unsure (1)..(468): unsure at all n locations
nnnnnnnnnnnnnnnnnnnnnnnnnnnnnnnnnnnnnnnnnnnnnnnnnnnnnnnnnnnnnnnnnnnnnnnnnnnnnnnnnnnnnnnnnnnnnnnnagttctgaaggctgtcatagagaaaacaaatgtgaacccagcagaagttggagacattgttgtgggcactgtactggcacctggatcagatagaggaattgagtgcagaatggctgccttttatgcaggtttcccagagacagtgcctctacgaactgtcaataggcaatgtttatctggacttcaggcggtttctgacgtagctgcttatataaaagctgggttctatgaaattgggattggggctggattggagtctatgacagtagatcgtgtgaataggctttgtaacattaaacccaaagggagaaaccttttgcagaacaccgggattgtcttttttcaaaggggaattactttttgaaatgtagc

SEQ ID NO: 61506 - DNA, 1736 bp, Arabidopsis thaliana landsberg
gacctcctggtactgggaaaaccatgacattggtggaggctatagttcaactttatacaacacagagaaatgctcgggttcttgtctgtgctccctccaatagtgcagctgatcacattttagagaaactcctttgtttagagggagttcgcatcaaggacaatgagattttcaggctgaatgcagctactcgttcatatgaagaaattaagcctgagattatccgcttttgcttctttgatgagttaattttcaagtgcccccctctcaaagctttgactcgttacaaactcgttgtgtcaacatatatgagtgcatcgcttcttaacgcggaaggtgtaaaccgtggtcacttcactcatattctcttagatgaggctggtcaagcttcagagcctgaaaacatgattgctgtatcaaatctctgcttgacagaaactgtggttgtgcttgctggagatccaaggcaattgggtccggttatatactcaagagatgctgagtcactcggcttggggaagtcatacttggaaagattgtttgagtgtgattattactgcgaaggggatgagaattatgtaacaaagcttggtcagaactacagatgccacccagagattcttgatctcccgtcaaagctcttctatgatggagaactggtagcttccaaagaagacacagactctgttcttgcctcgttaaacttccttccaaacaaagaatttccgatggttttctatgggatccaaggatgcgatgagagggaaggtaacaatccgtcctggttcaaccgtatagagatcagcaaagttatagagacaatcaagagattaacagcgaatgactgtgtgcaagaagaggatatcggagttataactccttacaggcagcaagtaatgaagatcaaggaggttcttgacaggttagatatgactgaagtcaaagttggtagtgtagagcaattccaaggtcaagagaaacaggtcatcatcatttcaactgtaagatctactatcaaacacaacgagttcgatagagcctattgtctgggcttcctaagcaatccaaggaggtttaatgtcgccataacccgtgcaatctctctgctagtgatcatcggaaacccacatatcatatgcaaggtaccacttacttagttgttctggacaaagacataatgcgttgacatcattcccaatctctcaactaataaaacgtattatatgaaacaggacatgaactggaacaagcttttgtggcgatgtgtggataacaatgcttaccaaggatgcggtttaccagagcaggaggagtttgtggaggaaccattcaagcaagaaggaagcagcaatgggcctcaataccctccagaagctgagtggaacaacagtaaagagctcaacaatggtggtgcgaatgagaatggtgaatggtctgatgggtggaacaacaatggcggcacaaaggaaaaaaatgaatggtctgatggatggaacagcaatggtggtgggacaaagaagaaagatgaatggtctgatgggtgggacaacaatggcggcacaaacgggatcaatcaataaggaagcagcaacgctccccaagaccctcaagaagccgagtggaacgatagtggcgaggtcaagaatggtggcacaaaggagaaagatgtcatgtctgatgggtggaacaacaatggcggaaaaaatgaaaaagaataatgttgtgatggttggaaa

SEQ ID NO: 61507 - DNA, 1154 bp, Arabidopsis thaliana landsberg
  unsure (1)..(1154): unsure at all n locations
aagagatgaggctgtagagaaatttaaagaattcaagaccaccgttgaacgagagctcgggaaaaagatcaagtgcctacgaactgataatggaggagagtacacttcaattgagttcaacaactacctcaaggagcttaacattcggagacaactcacttgtgcaaaaactccacaacaaaatggagtagcggagagaaagaatcgccacctaacagaaatatgtagaagtcttctacacgctaagaatgttgatacaagattttgggcagaatgtatgaagacgacagtttatgtcaccaataggctaccacaaccaagactcgattttttgtcaccgtttcagaagttatatgacgtgaaaccaacggtcaattactttcgagtatttggttgtgtatgctacgtcttcattgccgatgaagatcgtagtaagtttgacaagaaagccatacgctgcatttttgtgggatatgatgaacaaaagaaaggctggaaatgttgtgatcccaatacaaacaagatatatgtctcacgaaatgttgtattcgatgaggcatcttcatggtgggcaaacaaagtggtgttagcggatacacatgagttgcaagaaaagttacaaacaaagttgcagttagaatctgctaaagacaaagacgacacagaaggaccaacatcgtcgacgtcacaatcgaacgtaagatccaagtcaagaagtccttggagaataggtgttcatgaaacaccagatgaagtggagactagtcaactagaagatcaacaaatagagccatcacaaccccaactacgaagatctacaagagaaagacgacaaaatccaaagtatataaatgctacatatgctgaagtcaaagagccaacaacatttgaagaagcatcgaagagtccagaatggagaaaagctatggaagaagagattttggcactaaagcaaaatcagacttggaatttagtgcctaaacctgaaggtgttaaacccatatcatgcaaatgggtttnnnnnnnnnnnnnnnnnncagatggtacgatcgaacgatacaaggctcgattagttgtacgtgaattttctcaggagtatgggatcgattatgacgagacatttagtccagtggctaagattagtacagtttgtc

SEQ ID NO: 61508 - DNA, 329 bp, Arabidopsis thaliana landsberg
  unsure (1)..(329): unsure at all n locations
cccnnnnnnnnnnnnnnnnnnnnnnnnnnnnnnnnnnnccacgcgtaccgataaattctcgctttaacaccttctaattcttgggtactcttttacctattacaagccactcacactaacacaaaaacatggaactaagcaccatgttttgcttgtgtgctttgcttctattcattgttctcttcagggcactcatctaaaccttattatgtcttcaaacgccgtgacttgccactcccacctggctccatgggtcggccttacataggacaaaccttgcaaatgtattttcaagatccaaacgttttatttgcctcaaaaataaaaag

SEQ ID NO: 61509 - DNA, 1926 bp, Arabidopsis thaliana landsberg
  unsure (1)..(1926): unsure at all n locations
tggatgtgtatataagtgattttgaacatcggctcacaggggcacatgagatttggaacttcgagatataatttgaaatttcactaaggtaagaatacgattttcaaaaatctcaagaagcatgtgcctatagagcagaagtagtgtcacaagggacccaaaaaagataacatgcttctacttttggcaaagaaaaatgttgaaagtctattgtgactagggttacgttacttacgtatgaaccctaaaaaagaacctttgcactattgctaaaacatgaacctgtgcaaagtgtaacttatatatgtaataagtttaatttgcctaggatatattgaaaacacgtagagagggagtgattggtggcgagatctagggaatcgttagccgccgcttatcctaaattcatcatattttatttgaaactcacatgacacttccccatatattcatctttttttctttctttttttatctttaaaattttgtaatataggcttatttttgtttaattatgtcattataatttgatagcgtcatttctcgagagacatccgattgaaaaaaacatgcgtcactcaatacgtcacaacgtcatgtctcgtaatttctttaatcataatccatcaaaccgaaacttcgatggttacatctataggacgatttcacgttagttagcaaaattgcttcaatcacacagaaacaaatccaaatttgatcatgatatcagcttctctctattttgtttgttttttaaaaatgttattcaaataataattgtgttaatatgatctctatatttcgtattgccgtagaccatcatcatgtatgaaatcaatacccattttcccgccattttgttttgccagttcttttgatcagtgaaaggaatatgtcagttagatttgccctttctccactaagacgtgaaacgttagcgtttcggggaaagtagacagctatatttcaaatctttgtgacaaaaaatatttcatcttttcttgtttttctttttacaaaatccttttgattgatataagtatgtagcttctattctttttgtagcttgaggtagtaaattaatgattttgttttcgcttcattgtttcataatatctctgccactttccatttatttatttacccaaatgcttttaaaaagaataataaagtaagcaactcagaaaaaggaaaaaccctttttgatgtatctatcaatttatgaattattaacacaaatttgatgattgatgaaaacatgaatttttgtgaaaataaaactatcattcttcatatctccttgtggagattggaaatccaaatgattaggcaaaggatttttagaagatttagggggcaaacaattatattccagctacagagatagagagagagagagcaaaacaaaagctgttttgttgttttgcaatgatgtttccacgttgatatgcatatatacacatgtatgtcgtatgagtttgaatcatatcaaaaatctgtctttattcaagaaacttactatgaacattccacttttacgtcatataaatgaaaacgaattctctatatatttatagggatttacatattcttattttgaatcggacttcagattatttttcaaagactagtatatctattatttatacaagatcgcactagtcgagacaaaaggagtggtagtagagtatataatgcgtttgccataggcaagacaggacaggcctttttagcagtagctatgcccccactgtttttactttcctaattttgtaaatttgaaaaggtaaaaacctttttattcattaccatcgatcacactattatagatatcccccactaataatcgactttacgtaaaatttggaccctaaacaacgtntaaataaagagatangtttgtaaatttgagttttgggattaaag

SEQ ID NO: 61510 - DNA, 329 bp, Arabidopsis thaliana landsberg
cccgcactgtctggcggccagtgcgctggccaagggtcagctggagatcgtcatggccgacacgatctctaccggttcgccggtgtggatcgtctacccgcagaagcgtcatctttccgcgcgggtgcaggcgttcatcggctggatcagcgagctgttcgaacgcaccagcaagccgcaatgccagctcgccgggttgccggggaagctgtcgcgggtgccgccgcgtgagcgcgagacgctggcgatcagcgaaagggcggcctgaggccggcggctttccggcctgcgacgtcggccaggttgccgcccatggcgaagttgtccat

SEQ ID NO: 61511 - DNA, 1112 bp, Arabidopsis thaliana landsberg
ctcctgttattagagactctgcaaaacaacatctaatgaactttaaaaacaaagatcggatctttcaataacaaaagcacatgaagatctgtttgcaaccataccatacaggacacgcaacaaatggcatggatcatcttgcttaacacagattgcagcacaactattgatctggttcttgataggatcattgatactcttgaatgctaaagcatctacaagtaacatacacataaccaatccacacaaaaacgtacatttagtcaatttttcaatctttctctaaatggaagaacaaaaggtataaaaatcaaacctttcttacaatgaacgctactaaattcaattttagagggggaaattttaccaggcattgctgtctgagatcgatctacgctactggaaacaatgtcactatcaatctaaaatcattagaagaaacaaaaagtcaaaattaagctgaagaagaagatttattcaggagcagatgataagaatcatacgtgagaagaggaagatctaaccaaggtagagagactgagagagagcaacagaagccagagagagctttcgtcataaacccttctgtaaaaggcaaaaatattactattcaaaccgaaccgaaatcaccaattcccggtttggatgaatattaaaataaattaatccaaaccgggaattgattacgattagaattgtaaaaataaattgtagttgatctaaaccaatccaacttacgaacctaatgaattggaaatttgggtagaaatatttttacccgaataatctaactcagaaaaacacgatctcaactcataaaaaatcaaaatattaaatcctaaaaacaaatataaacttagaaaaacatgatcttaatccataaaaaaatcgaaatattaaattctaaaaacaaatataaaccgactaaattcaaatataacgagtaaaacttgaaaatggacaatatccataaactattttaaaaaatggcaaaacaaaaccaacaatcgccactctaaaaattggtataaccagtaattgattctctaaatctgagtatggatgattttgtcaaaattacaagaaaatcagatagaaaaaaatggtatcag

SEQ ID NO: 61512 - DNA, 482 bp, Arabidopsis thaliana landsberg
  unsure (1)..(482): unsure at all n locations
cccnnnnnnnnnnnnnnnnnnnnnnnnnnnnnnnnnnccacgcgtccgctcacgcgtccgaaaagaccatcaaagtttcacttcagtcttatccggtttagggtttcggtttttgacccaacctttgacgtatcgaaaccttaagtttcggatcaggtctgagcaatctggttggtagaacctttggtcttagagagtcaagttttatgtctgaattagacgatcaaattcctactgccttcggtatgttgtgatctttttccagggaataaatatcagtatatatgtaagattaacatagtgggttttttctttaaatgtttccttctttagttttattgtggtatctgtactagcagaatagggtacctattgttgaacttcacaatttctgtgtcaaactattctaacttttatgtcttgctgtaaggaatctgtatatcttataggtacttagtgactgattttaccagttatattta

SEQ ID NO: 61513 - DNA, 476 bp, Arabidopsis thaliana landsberg
tgcaggtaccggaccggaatactcgggttgatccacgccgcagatggatcgcacggacacgaagatgggacatgcgcccatttttacaaaacatcatcgtaagaatgacccattttttgcagttcatctcacacgaaaacaacaccaatgcattccatcaaattcatgatgccacagaagaaacatgcctacagcaaaaataatattccctcaaattggctctttctttcacttcctaaaatactactctactactgcctgcttttgttactatgctgctactttgttactctcaatttggcacatgtattctctcaccccaccattgtctccaatttttcttcacctttgccaccagcactcatttactccaatgctaataaccaaactttgagacctgctgcagtgctgcaaaagttgtggagaattataacttattttgacaagattaacaagcttgttgtaaaacaatcaat

SEQ ID NO: 61514 - DNA, 1471 bp, Arabidopsis thaliana landsberg
tgccggctctccctgaagactgcgcttctttagcacggcagatatgcaacctacttaaggcattcggtacacctcctgtttccttagggttggaaggttctcccaaggaagcatctaatcaaaatcagcaagttagtaagctaagaatagcaacagataaactaagcagaacttctcgatgacagtcgaactttctaatacatgtgcaggaaagtgataaggatataattgacgaacctgaacctcgggatctaacacaagaatgataggttctctattttcatgtccatcttgttgccctagtttgcttgctgcgtcatgtatcagctttaaggccaattcatgcctactttcagatatattagacgcagcagtaggagttttacagctatcttcttcataaagatatccccctctacctacatagcaaccatttcttaaagaaagctgagcaacgcatgcttctcctttaaagttatccgtcccacctccaagaataaccttcaaaagcatctcatttacttccattttgcacttggacttgagatcatttaccagctttttctgcgctgaggcaggcaatttgtagttcgaccattctccgagaagcagacaccttcagggacccagacaggaagcttctagattcctagaataaaagaatggttatccaaagttgacaaccaacatgcagggtcgttcgcagatgtccattcacaagaaggatcaaaacacagtgctgttcatgtaatatagacagacatgtgcacgtgttatagaaagagagccagcatgcattagaattattcccatacgatgattaagtttctttttctttttccaccacaggagccgactatctatatgtgtcttcttcagtagtagaagaagatgagtggctttcctccaatattgatttaaatgctggagctacctcatcaaccacggtggtaccccatggacaaagccagggcccctttaaactcttgacttgaatcgcttcggtagagctaagatttgcactgtcatctgacatgtctagtgaatcagtgagatcatgagtacaaagaggaaacaccattgatcaaccagtatgcagttcatatttaccttctacaatcgaatctacaggtaaaagtgtggcaaccggttgactttctgggtttaggcgtgatatgagcacccaggcacaaacaggtgaacgaatatgcattagctcctgtaacaattggtttaaagcacctccaagcaaactaatgcagatgattgttgagcttggaagattgatgaaaaattctttagcgaattgtacaagatcttgagtacggtcaggagcaagcctgcaatggcgagtaagagaaaacagagtcagccaacagaaaattacaaaagcatgtctggttgcttaagttaaattatctcatacctgggtaagtccaaatcctcaggaaccatgcaactcgagcaagta

SEQ ID NO: 61515 - DNA, 570 bp, Arabidopsis thaliana landsberg
tttagatttgcaagttcaataagaattttgtgtatcatggatgcttcacatagattaaaagaccttctctaattattttcttatgttttaaagggccacttcaaatatattgaaaagtgaaaagattcggatgatttcatacatccccaatatattaaacctaaagtaagaaattgtttaaatggatactttttattgatattggatgattgacgctaaatattttcctccaacgattacaatatatattgcactagagttttgacatgatctatgtgctggtataacaaaagttattctaaggaatgtaaaggataattaaagacgaacgaaagacttttaagatgataatcatgatatcaaaatatatgtacatacttactaaattaaagtagagaactatttatatggtacttgttgggactaaaactatggattgtgtaatatttacagtcagtgggtaaatgagtttcaaagcggacgcctttttgaacaccagaacccaatgggatattattaccgcaaaaaccacaaacttggatttaaaaatatcagttggttaaagaaact

SEQ ID NO: 61516 - DNA, 450 bp, Arabidopsis thaliana landsberg
  unsure (1)..(450): unsure at all n locations
cnnnnnnnnnnnnnnnnnnnnnnnnnnnnnnnnntccacgcgtccgaccatcattgagagaagctctcgaaattcttctgatactcgtttaattttaatggctcgttcatcatccgattcaaaaaaaccagtgacgtcgctgttgttcttttccttcctaattccgataccttccgattctctttccgccctacgcatactcgatacttgttcatctctctctttctcaaattccgattcctttttgtagcatacacaccgtactagcccaactaacaaaccaaacaaaaccgttaccatgggaaaacgtaattctcaacgtaaaagtgctgcgatgttcgatagtgatgacgatagtagcgtgacttcgtcgtcaactgctcgttctgatttgatgtcggtgtctggggctgtagatgttcaatttgtccaagattccttgcttgacca

SEQ ID NO: 61517 - DNA, 667 bp, Arabidopsis thaliana landsberg
  unsure (1)..(667): unsure at all n locations
tctaaancatattatatgtatgttgggatacgaatcaacatgaatccacattcagtattcaaattagaaaattatcgtaggctatgactctaaagttaattttaatttatatgatgaatgcgagtacccccattatagattcatactatacattattttatatgatcaaatatgaatcatcatcattgttctccaatacttgctcttcattccgaatgtagcaatagaatctccatattgctttttaccaattctaaccataaacaattaatagttaaatgcatgttgcgtagtgctttgtctactagtaattaataacattatcgattacaatatttgagaaaatcaggcaatctttaaataaaaatatgtatacgatgactctttcgtccaactaatatattgaaaatattataagatccaaattatttcattatttatatcaaacaaaaacaagaaataaataagacttgtctttgttcatgtaaacaagacccctttgttgtttgtttctctattttacaaatttgtacattatatttttgatatgtttctttccacatttttattaggtcattcaactacccacctccccaaaactattggaggatccaagtcctctctctctcaaccatatatcttatatttccttttgcaaaaggatagc

SEQ ID NO: 61518 - DNA, 549 bp, Arabidopsis thaliana landsberg
  unsure (1)..(549): unsure at all n locations
nnnnnnnnnnnnnnnnnnnnnnnnnnnnnnnnnnnnnnnnnnnnnnnnatgcgtgggttcatatgtccaaactattgcaggaatcttagcattgttaattgcatacattctgcttaggcccgttaaatctcctaatggatctaaacaaagaaaggctaaccaagtacccgaacctcgtggtgctttacctttcataggtcatctccatcttctcaatgctagaaaaccgtatttcaggaccttttcggccattgctgacaaatatggtccaattttcattctcaaattgggttgccaccccaccttagtcgtgaatagcagggaaattgccaaggagtgcctcacaactaatgacaaagtttttgcctcaaggcctatcacatcagcagggaaaatcttaggttacaacaatgcagtttttggcttttccccttatgggaagtatttggcgcgaaattagaaaaatggccatccttgagatcctttcaggctatagcttgaaaagctaagcttgggagagacactgaaaattgtcttttgcaaagacct

SEQ ID NO: 61519 - DNA, 393 bp, Arabidopsis thaliana landsberg
  unsure (1)..(393): unsure at all n locations
nnnnnnnnnnnnnnnnnnnnnnnnnnnnnnnnnccacgcgtccgtattttgtttaggcaataaacgaacaagcctgagcagcaccttctacgagtgctttgcagacctttttcctccctttgaaaatcacaaacacacccacatatttttatctcccaggctggatttggatcactactttacttaagtcattagtccatagttcatagagatattatgattgtcattgatacttatatattggatacttgtccctggatggtcactattatcgctgcataaaatagagcaacatgaggaacagaacatcacggtttctgaaggagatcatatcaaatttgagctcaatggccaatgtcaaaaccagggctttgaagtcgaaacaaaccgcct

SEQ ID NO: 61520 - DNA, 350 bp, Arabidopsis thaliana landsberg
  unsure (1)..(350): unsure at all n locations
aagatgagcccnnnnnnnnnnnnnnnnnnnnnnnnnnnnnnnnnnccacgcgccctgtgcaccttgaccctatctccagcaacaacaaaccatgatcgcctccatcattgactccgttacagggcgattccccagaagtgatataggagtatttggaacatggctgcatgaaatgcattgccttcaatcgctgtggcaccctttttgctgctggatgcaatgatggaagttgtgttatttgggattctgaaacccgaggcattgttaaaattctgcatgattgatgaatgttcttttcccataaccagcatttgctggtcaaagtatggtcatcgaattccttgaatctt

SEQ ID NO: 61521 - DNA, 448 bp, Arabidopsis thaliana landsberg
attcctattcattggcatctaaaaaggtctcaatttttcttgttttcttgtcaaataagtgtaagtttgaaacttttggaagccgacatttcttgttggatcaataaataaaaagtaattcgttcgtcgataggaccggcattaccaattttggtaattttagttggtatggatgaaacagaaaccgaaatcatcaaatcacatcatatgtactcttttgaccttcttaaaaatcagaccttaaaaattagattctctccaaaaacagattggacagagttttgattcaacagaatctctctctgtcgcgaaacgttgcttcctgggagaactataaagttaacaaatttcttcacgaaaccatagagtcacatcctcatgagtgttttgtgagctgcgatgatcgtgtgattttcaaatccctaacttttcgaaattcccaaaaccc

SEQ ID NO: 61522 - DNA, 1458 bp, Arabidopsis thaliana landsberg
ttccatttccgaattgctaccacaagtcaattcaaattcctcaggaaagaagacgaagaagagtaactaaccttgttcacttcgcgcatccaagaaagtacgggaatgattaagctcactcggcgtctcaccggcggcttcattgaaagcaatgctcgccgcgacggacgattctttatcttgaactagctcagacatggctctcacactaacgccgccgcgagaacgaagaggcggcagaaacagcttcttcgcggttaatctgaaagatactaatccacgaagagtcgacgaagcgagtggataaaccggaaccctagcggaggaggttacggttgcagcagcaacggcaacggttgcggcggaggaggaaaacgtgagagtcattaaagcgtgtttggtgattggtcgaagcagagcgtgtggagtgtttatgtgtgtgtgacggagatctcttccttcctttttatttatcccatgagtccctctttttcacgtttttcttttttatttttcaccaaattaaatactcttttttttaataatttaatttaatttccccttagtaaacttatttcattgaagaactcataattataatgatactatgtattaattttaaatttaataaaatttagatattgtgactttgtgagtaaagaagactcaagaccaaattataacctcacatctttatttttattttttgttagttgcgtccgtacattgtatttgcctttgtgtttgtttgaagtagtcatgtttgtgtgtacacataatgaatatctaaatataaatcatgtgacgtcgacaacgaaaaatcacgtaacgattcttaaattatagattgtggaaatagtcgataaattaaaaagtttatgtatcttttttcccttggttgcgtcagtatttaaatttgttggaatttaaagaagtcatatttgttctcgtgcacgtaatgatattttaaaatctaagatagttgacaaaatttaaaagttaaactgtaaaattagatttacagtttttcacttcatattcactcgtgatattttactcactgaccagataagcttcaattatgatatcagattctctcctttttttctcatttaaagagtatcgtgagtttgtttgtgacataaacggcacaaaactcaattccaccaacttgaggattgggtttgatgacaagtgtcagtctctgagtggtttgaatataggccgagagaaccgaatcaaatcaaagggtcccattaggccattactgcaggagactctgttattgagtgagagagacactaataaaagtttgatacttcgacaacaacaaaaatatctcaaactagagttttgattccaagtgacacctaaaaactccagtacattaaagcatgaaagcaacttgtagacaggagagtgaaacctctatccgaggaagttgatgatcaccaaatg

SEQ ID NO: 61523 - DNA, 735 bp, Arabidopsis thaliana landsberg
tcatttttaactgggtgatggttttctcttttctgaatagtctctaatagttttagatgtaataaattattactaattatgaatgattaagcaaagtcatattatttctcctccacttatatgatatgatgtaattaacataacaacccactgaaattgatttaaacaacgtgagaagacaagaaagttgtgttgtttcaactgaacatcactaacaaccagatctaaccactaattgtactatattacatttttctcactattgtaactacgagttgtttatgttaacacaatagcctttagaattgatttggataagagggcttcacttttaagagatccatccgttaagcctgttaaaggcccaaaagttgcataatagaaaagcctatatattggcaaagacgggcaactgtttaggcaaataggtatttcttatgttatcgccgccgttgagccttttcttgtttttattccctattttgagttttgcaagaccttgattttcatttattgttagttatttctcgtttggctgatgataagtccagcccgaaattccgttgttatagcttttttttggtgaagtttgcatggccatggagaacactaacttttttttcatgtaagtagacaatttcagagatactaatccaagagatggcggatacgttttacaatcacgaatcttgtatgatcactaaccattggaacaataagagtatataatgagtt

SEQ ID NO: 61524 - DNA, 1426 bp, Arabidopsis thaliana landsberg
ttcggtggtattgaaagatactagattccgttagctgaatttgtttacatgtgatgaaaagtgaaagtcgactgattcttctttccaaccaaaacaagctatttggcataatttatttttccaccaaatgggcaaatgtatatcttttagccaaatataaataagccgaaaaagcatgttaacaacaatatggattatgagtatatcttactaattagtaattacatcgagaaaaataaacaactatttagattttgaacccaccaaattcagctaattttcccaaaaacatttgttatcggatttggtaaacactgtggcatcacgatacctaaactttaacgcacgcacgcatctctgttatgatgaaggtcactttcgtctttttctcttgtatatatcttcttcctcgctaacttctcttcgccatcactgaaactaatatctctctgcttcctccttagaacttctatttgcttctcttgcattccacttttgtgagtttctattatcttcagttttcgagatagaacttataaactctgtaataatatgcattgtgcatatttttctaggttaagttatttgttttaaagtgttctgtttcttcctagcactaaatctattgctctcgtttattttgcagattcatttgaagtagtgagattgactccagagataaaacaagaaagagccccaaagccacagcatgcggtggtggttgtgtctttctgcttatgtttttcgtacagtagtagtcttctgtcgtgtgattctgtaaactgcgatcttacttcagacatagcttttttatgtaatggggtcgtcttttttcttcacattcccttactttgtccgccaaattatttaagacttcgtttggatactctgttttgggagaaggaatcagttggggagaaagtagttatggtttgtcaatcagcgggacagacaagatttcgtacactcaaacacgaacacggtatcacaggaaacattgtagttagagtcattgcatgctttcaacctctccaagattgccaggttattttcttgtttgatgagtttatgttattgcaatatatttagatttttaaaccaccagaacttttttttattgatttcgttttagctttgatgttgtgtattttgcaggctgaatatttccgtcaattgttgaagcccgtcacgtagagtagctcgatacttatcgttcttgtttcaagcctagtttcttctatccatttagttggtaagttccagtctttgcacacataatcttttgacctcccattcttgattataagtagctgatttgtttgagatgatgatgtcctctgttttggatagttgatttgtttagtgttggatgggacaagatcgtgggtttgggtttcctactcagcgcttgtgttccttgtcttcc

SEQ ID NO: 61525 - DNA, 260 bp, Arabidopsis thaliana landsberg
  unsure (1)..(260): unsure at all n locations
nnnnnnnnnnnnnnnnnnnnnnnnnnnnnnnnnccacgcgtccggtaagcctcgccttctttctccctccaaatccctaagtctcttgcatgccaaaaatccaacaatcctaacattgttaactctgctcgtggtttgtcccaatcaggtttccgagtcctacccaatttcaccatgtacactcaagattcgaggtagtcaggtatctttttccgccatggaaggtcacatggacgaagcattacgatgtgttatgcatc

SEQ ID NO: 61526 - DNA, 291 bp, Arabidopsis thaliana landsberg
caggaccggaccggaattcccgtgacgacccacgcgacctgctacgcgtccgggaggacgaccaagaaataaacggggttctttctccctatagctatcaaatccagaaatattgaagatgggaaactgtggtatcaatcccaaaaccaatgatggctttgtggcagtgcctgagcctgagatctaggaggttaaggttgtccagatcgagagtagtttagcatatgttgcgacctagttgatggatcataccccctacaacctcccagtttaagtttttaggcacattgc

SEQ ID NO: 61527 - DNA, 397 bp, Arabidopsis thaliana landsberg
cttggctgtttgaccccttctcttggtgatgcccagggtggccacctagatgaattgattactgtctggaccgatctccaattcgggcctgatgagtaatttgtcgccctggggtctttctaaaccaaagaccgaaagatgatgtgcaagcacttgactgtgtgctcttgtacttccctagaggggggaagcaattttcctcttacgtggcgaactttaaaacgacccttctgatgctaagtctctaataggtgtcggtgtatgactaaaggctggagaagcctctcaatgcattaacggttttcggttaccctgtcaaggggatggagactggtccaaagaccctaattgtgtacagtgatacagggaaataacagactggttcgatataagaatt

SEQ ID NO: 61528 - DNA, 107 bp, Arabidopsis thaliana landsberg
gacgtgacccacagtacctaagcagcgaggagggccatggctgagtgatatggggctctccctgcgtaggcttatgcttgctccgtggacgaacatcaggcttcttg

SEQ ID NO: 61529 - DNA, 567 bp, Arabidopsis thaliana landsberg
tatgagagatcgtacattttgtactattttgtaccattctgaaaccgcttactgctcccatttactattaaaattaaacattctaattactacttaacttcaccaaaatcgacctataatttttaacgatgatgtctttgtcttatataaatacttaaacagacacacatgcatgtctcgtctatattcattgactcacttggaactatatatgagtcatgccaatcactagcagctctgaaacttttgcgagcttcttcaatgactggctctgccgtcacaggcaattcgtccaacaacttgcacaccttgctgatgaaacaaccattgtaactccaatagaagaagaatctcttgtgagtaactttctttctcactatctccaatactacgaagagaaatcagttgccatgtccgtggccggtgacgatatatatgatttcttctctccaccatggctcagctcatacgagaaactcatcctctggatcggaggttttaaaccaggtatggtttttaagctcataaccacttctgttaatgaccttacgagccaccaaatagacc

SEQ ID NO: 61530 - DNA, 457 bp, Arabidopsis thaliana landsberg
  unsure (1)..(457): unsure at all n locations
cccnnnnnnnnnnnnnnnnnnnnnnnnnnnnnnnntcccacgcgtccggtaaatgaagccagcaatggccaagtccaagaacaatgccttgaagttgtcctacatctcactcccttctcagatcatcaactccatctcatcttcttctcttcaatctctgccttgaatctcccaagaagtgtgcaagacactccaaattcttcacctttgtcaagtgcataaggccaagactcttccttttcactctctttttccttgctttctttgccatgctcaagtttggtctcaatctttacaccccttttcctccattcccatgtgcaacctcagtagacccctcaaaatccaatcttggacagcaaggtggtgatgttggtgttttagaggctctgattagccgtgtgcagctacatggttcaaaggttcccagcggtcctgggtgaaaagagtgagtttt

SEQ ID NO: 61531 - DNA, 580 bp, Arabidopsis thaliana landsberg
gtctcgaaataaagtgcaacaagacacaaagactttcactttcttttttgtttttgttttttgtacttcaggtcaagataggttttcggtttgagaagagaaacaaattagaaagacaatgtaaaactcccatgatcattcgtgtaatgctaaatgcttgaatttcagcaaaactttctagcatttgtttcttggggtgtagactaaattacctacataagcagacataagcattgggtggacaagagaaaacagggtttggttcttctttaaggtatatctacatttggggcccctatttatccatattgaaggaatggtgaagtttctaccttgagatatccaaatatccatatctctgggggttttatctgaaacttgatctggaaacaaggctattcacaagagtgtcttatatctcaaaataaagtacaacaagacgcaaagactttcaccttttttttttgtttattgtaatttgggtcaacaaaggttttggccttttgggtttgagaagagaaacgatttagaaagacaatgtaaaactcccactatcattcgtgtaatgttaaatgcttga

SEQ ID NO: 61532 - DNA, 524 bp, Arabidopsis thaliana landsberg
tacctgtagtagagttaacaacttttggttaccaatcagacccataaacatatattaagatagacaaaaaaacatatatacatatatagtatgacttcataaaagatggtataattttcacataatttgatattaattagatatcacttactcaagtactcaactatgcagaagcactcttcattcttcaattgtttttatgaaaatattaaagaaaaaaagctagaaaaatgataccagagaaacaaaatgaatcatgggtttagaaattcattctaatttctaccttttggcaaagaccctgatatgagatgaactctaaactagtttttggtatgataactggaccaaatttgggccgttcatagagtttattggtgcagatggaccacggagattagattcgtgaagcatgaatgtcgatcattaacataagctacaaagtatgaagctctagaagatatgtaaacgtcgtaagattattaagcccaattcaaccccaagctcaagcccaatattaaacc

SEQ ID NO: 61533 - DNA, 1317 bp, Arabidopsis thaliana landsberg
gaagaaaagagacgacactgtagaagaagtacacgaggatacacgggtttggtggacgtggactattgagaggcacgagcaaatcacgtggaatatgttaaggcttttctcctgaatccaaccatttctatgtagtatatacgtaggcattaagtgtttacaaatatttaacaaatgtatattccttatttaaatttattaattacatcttatatggtgtagtgtctatcgtttattttgtattatattatagcctttctgatcatattacacaagttaactccggtcatctcggtcaggccaaaagccttgattctattctattatccatggacgaggataaaagagagacggagatattttggatttttcctcattctatttacgcctctttaaatccaaagatctaaatgggcttctctaaaaacaattggccctaagataattgctttttctttttcttttttttgcaatgagtttacatgtttgtagcccattatatgtagataatctctaaaatgtgaagtatttgactatttgtcaacaattatgaacataatgttaaaatacaacccacaataatcacagatacagtttgattagatttatccattgatatgttggcaacttttggtattgtccatacgttgcctaggttcaactctaaatttccatttttcttgatctcttcttgatcacatatttaaagaactcaattctccttcttttataagcaaatgtcgaaaacagtacaacacttcggttcggattaagaacgatcatgaagcttattattgatcttttattatacattgttttctggttttctacattagccgcaacatatattacacacattatgctacaaaagagaaatggaatatacaaaactgctcacacaaaaaaagaagaagctaaaactgaagtctgaacatgtctctgaaccatttctctcatatgcttttgcttcagaccttcactcctatccgttgagcaacctgcagaacaaaacaaaagcacattcatttcaagtaaaccaatgatttttaaattcttgagagatttgagcaaaaccagagagattcgtttacctgtttaaatgacgtaacttcacttccccagagccaagcgtcacagcctgcgtctctagctccccatacatcattcctacggtcatctcctacatgaaccgcatcctcgggattcacttctaataactcacaagcttttaagaagatagtcgggtttggtttttccgcttcaacctgttaaacattcaaccaaaaaccttaagtatttacacactcactccaaaag

SEQ ID NO: 61534 - DNA, 2000 bp, Arabidopsis thaliana landsberg
caaaatttattttgaaggaatgtaacaatggaaacaaattacaaaataacaatgttgagagagacaagacaacatgatgcttgttcttaaccttcttcaaatttattgaaactttttcagttccagattatacctgaacaacaacaataatcccacaaagacaaagaagaaaacagagagagactctcttgaccccaatcatgaaacgaagacccaaactgttaaaaaaaacaaaacagaaaagaaaagaaaataagtctaacaaagaagtcaataactttgaaatggctctctcaagtcttcttcatcaacatcccatcaccgcacaattatacacaaagtttcccgatggcttagaagcaagaactctccaatgcagttgtgttccttcacttgggacacaagcattgatctctataaaccctcctcctattgccctaggtcctccaaccaccactaactgatccccacaagccctaaacgccattccccaaccgttcatcgaagaagccctctctggcaaattccctaccttattccatacattaagccttttatcgtatttcttcacctcttgctgcgcgtaattcgcagcataaagctcgtcttttacaactgctacaagcggcggagcctctgaagccgctgttgcagcagcaatctcttttgcttgatctcctccacctccactgcttctttcaggtaacatgttaggtatcaatgtccatgtcttcttcttcagatcatagacttcaccgcacaatagcatcttcgagtttccctctccgatacctccaatgcaatagaaattcccatccatgaacacgctcgagcacattttcctcgctttgttcatgctcgggatgaccgtccattccccagtttcagagttataaagctctgcagaactcaatatcctcccacgcggatcacatcctccagctataaccgcgatctcgcctagactcgctgatccaaacaagcacctcgggacattcatttgcatacccgatgtccatgtattggttaagatgctatatcggtaaatcacatgagacatgatctcttttccgaaaacaagaagctcggtgccaaccgccagagactctttatccgaacacatgaaacactcgttgaatgtcattttcggtacacgtaaccagcgatctccattaggatcataagcctcccattctaagagcctgcaagagaagtaaatccaatgctccacaataccctttgcccgtctcaacctatacaactcgctgtccttaatcaacgagcggaaggttctattcgtcgacgctatagacccgaaatcagataacgaacagtgagccaagcagttgagaagcgcgttttggtcaagccgagtaactggtgaactgtgatgatcaccaccaccaccttggtgactctggatagagctctgataggttttagcaagctgaagactatctgtaatcttgtcggattcacctgtgcttccatgatcaacccgtaacattttcttttcggaacttccttctacatcagtatcatccaacaaacgcttccttagggagagctgaagcacacagtgtgcattgtatatccacttgctctctccctcacatgaagatggtaagtcccttgacaccagataactcggagcctccaacatgatggatgctaattaaaaaacaaaccaatccatcaaactaatcatcgccgcaagagtaaggtaaagtaacaattcttgaccagtgaagattaagttttgacatcactttagaaggttattatatttcaaccacttttctgattcagcaaaaccaatcattagaatccacaaaaatagacattcgttggtcgaaatttctcaaataagatcaagatcagaaaaacaaatcacaatataaaaacatggcagcccccaagattagatcgatgggtaaattcagcagccaatagaatcacaattcgattcccaactaaaagagtaattcactaaatcaatc

SEQ ID NO: 61535 - DNA, 1680 bp, Arabidopsis thaliana landsberg
accaacttcttcagaagcaccataagcaatagaggagcatcctggaccaccattgagccataggactaagggcttcgttccgctaggcctaggagcttcggttagccaataaaagagagcccgtccggccgcgggatcaacagtgacgtagccagaaaattgagagaagttgaggttaggaggttggcctggcaaagagataatcttgtccttcatcttttgctgtttagcatcatcactactcactacgtctaataatgcaatcaccatgcataataaacacatacattgatatagtttttttgtgatcatcatcttcaaagaaagagagtgctttgttccttcttgagtttattgggagtctctcatttaacaccctgatgattttatactataatttggcaaacgagggtcgttgtcaacttatgccatttttaggtatcatatatgtggtgtatataatatgtatataattaaactgttgattaataatgcatatagtcaaattagcttacttgtggatcgagtattttgactactctctagtttcttacacattattgtgtttctgattcattggcatcttgtatacatatctcatcttgaaagttatctcgtgtttattttattcatttgtatcgttatgtagtcattgtcaaaatagtatacttctctgttcattttacaggtttcataatttgatacttttatgatagggatatttcttagctttgactaattaaaagctagatattgcttgcttgcaccgtaatttagttagtcatgtatttcacatggagacgtgtagacaaacatcgtctctgcagggaggaacttttcatagaaagtggggatttgcaagtcctttataaacgataaccaaataaaatactcatcacaaataattagttgattgggttggttttaattggtaagccgatttagtttgacatttcatggcttgtccgttcatatattttcactttagtttcacctaataccgatcttgttggaccataacctacaatttgggttctttttgtcctacctttttgtaacgagtgagatattggcttttaaaattattttctttcacatcaatgaaaaataattattttcaaaaaagcataaagagatgtttacaaggtgagcaatcccaaagaggaggatcatgtgcctctaattaaatgcattcccataaacttagacatccattttcaatattaatttatttaattaaaaaccatgtcttactcgttttcttgtgtaccaagaaatgcaacggaaagctataattttaaagtagcagctaagcaacattgttattttctttgaatatcagatcagctaaattgatatttacacaaagcttttggaataaataatgtgaagaagacttgaaagtgaaaatgattaacatttgttaggattagacacagaagctcaaggttttgtgtcattagtgcgaataaactgatagctgagaatgtgaaaaagagattcttacttcttattataaaaaactctggtcttatcacagtgtcttacaatttacattggcaatggcttgttgtcgagaaacgactgaaaaagaagaaaagctcgacgagggcggaaaagaggtacctcatgtcctgctccatgtattgtcaccagagtcagccctttgtaaactggctc

SEQ ID NO: 61536 - DNA, 566 bp, Arabidopsis thaliana landsberg
tttaaactataaattaggattctaactatgacaacaacacttttaaaacaaaccactaagtttcaaccacaatttggaactaataattaaaaaaataattaagaaagttgatagagaaatatcaatggcaaaaaaaagagaaactacaacactccctaaaacccaaaacattaaatttcaatatatcatgtatatgattacaaatttaacaaatttcataaaaaaaaacaaagaaatatgtaaccagtagtttaaacaataatggtggtaatagtcaattggttaaacctatttaactccacattttctactggagtttgactttattaaatcacgttatttggataatagttagggattatctatagatcagatcttattaatgaaaatatgtcaaacaaaaataataataaatttgttatctaaataaaacttttaatatactttaccacgttataaacacttaaaataaaataacaattaacagcaatttacatgtagatttctgcattagttttttcatttttttctagtttgttcaaaacctcaaatatcaagattgactc

SEQ ID NO: 61537 - DNA, 336 bp, Arabidopsis thaliana landsberg
gatcttttctggcaccgtcattgattattacttactaagatagatacttccttatatagcgaataagaggatcacaatgatttgttctggtaccgctcattgattatatgcatggtctttatactgaaaaagggatcacgtaccaattatatagatacgtaaatataaggaagtatatatatatatatatattgattacatatgtagatacgaatatgctatatatatatatatatatatacatatatgtacgtctaatattttgtcagtaaaaatagcttacaaccatgtcttgtatatcatcacaatgcttcatcacaatcaaaagcatttgca

SEQ ID NO: 61538 - DNA, 837 bp, Arabidopsis thaliana landsberg
  unsure (1)..(837): unsure at all n locations
ttttggtcacgttataaaaatcttattttatctcataataatgattacttgaaaacacggtttaggccatttagcaaatctccccaccgttttggtcaatcctttgaatctctcctaataaaaccctaaaagatcatcatcatcatcgtcgtcgtcgtcccgctcaatggatactcgtcgcggagctcttgcggttcctaaagtccgtcgagtaggtttcttcacatcaatcgagccgcctccagaatcatcattacaacgaccaaatcgaagccaatccggtccagtagatgcaaccacctcttcttctcctctctccgattcaccttccggtaacttaatttctccggtcttaattccaccgtcgcgtcaccattccgacaatttaacctctcgcgttgctgctgctgctgctgctcctgtgcccgtccctggacctgccgctttccgccgatacttaactcctgaacggactcttcttcacgttggtagttacaatcctccggattcgcttctcgggacatcatcaccctcgagtaacggagggctttctgaggattcggcttctctgtttgggttccaacggagtgattcgacgaaattatcagcaagcttacctaatggaggctttgatttgactctagctgttagagctcctcaggaatctgaaaccaaaattgcgaccacgtctgcttctcaagggaaaaagaagatcgccgaagtttctggtatgtatacgaatctatcaatctatttaagtgcntcttgaataagctctttatatggttgagntttgtattaccantagagaccattgtggggaatgtgactccaagt

SEQ ID NO: 61539 - DNA, 522 bp, Arabidopsis thaliana landsberg
  unsure (1)..(522): unsure at all n locations
acacaagaagtattttggaaactaagaataatacattttgtttactgtatgtttagttgcagaattaaaggcagagagagattcggtaggaggatgtggaggtttaataggaagaaaaaaaggagccgtggctattcgtattaactacgatgacatcaaaatggtttttatctcttgccatctctctggtacctatttttatttttagtataatttctactcttctttcgtaatatatagttaattagatttgcaaataattattagtataatcatgcagctcatgcaaaaaaagtggatcaaagaaatacagagttaagacatatagcaaattcactattaccaagagacaaaaggagacgtgacctcactgtttggcttggagatctaaattacaggatccaagatgtctctaaccatcctgttcgatctcttatccaaaaccatcttcaatctgtaagnncattcttcttcttcttcttcttctttttctttctcttcttctccaaattcataaaatgc

SEQ ID NO: 61540 - DNA, 1620 bp, Arabidopsis thaliana landsberg
attatggccttgttagagaagaacatatagcacagggcattgcttgtttcatggctacttatttacaatcacttggggagactggggtatctaaagtcttaactttcgttataattcgttcattgtatatcagcctttcatttgagtttatacaagctgccatcattgtgcaggacttgactcctgagcagcttcagaaaggtattctcgactcttctgtcaaccttcaaatgctgtgtatctcaatgataagtagacataatagttggctgtaacataatagccacgtcactgttgctaacactcaaattcagaacagatagatctttagaggaaatacggcattggacagactggtaaagggcattgattgttcttgggaatcggttttggggtttgagagggcataggaaagtaggggaggctcaaggattcatccatagattattctgtggttagatatgtgttctacaattcagtaagaaatagagtttaccggttccaatcttaaaactcaactaggaagcttgttattgcgctgacacaaacaaagaccattaagtcgccaaggtattttctttgatgttgattatgtgtgaagttgatcagtggtggcatatcagattagtagtaaaactgtaacattagtgtttgaattgcaatgtagcacttagcaggatgttctcagtgaagaatagaaaggggaaacttcggaaagcctgggatggaagtaaggttgcttacaacgtagcgtcatggagcgcaactgttatagggtataatatcatctagtcatcttctacattgcaaaatctaatagtcccattgtttatcgttctcaccaagcatttttattttgttcatttcaccgacaggatctatcaaaaccccgtgatcctgagggttgcatcaaaggccttttgggcgtcatgtcatgtaatatcgaagctcgtttgattgacgatgacgccttctcgaacacatctcgcctgtgtactgtgataacagtttaatttgggtttctccatgatctctgtgaatacaacttcatcatgtataaagaatgccatatgtaattccgttctttactgcaatattctttctgcatcatcgtttatatccattaaatgagtaaatgcatgctagaatcacgtattttagtagactacagttgttattccaggttgatctcacacttgcacaataaaacatagttaaaagtttaatacagttcattaaattgtttatcaaagaatacaagtttggtatcaaacatatacagagtaaaacgcatagatatatatgatatctcacaagaacaaaacagcaacccaaaaaaagaaaagaaagacaatgcttgtggtaaagtaacccaccccgtgtttgtatctagtaaagccaaatgaaatccttagtagtttggttatggctgacttgtgtttagcttctaatcttctggtctcacacccaaatccttcttacctcattcattttttttggcagcagcgacagaatcacacaagtctagctttctcaaggtttccatggtgctggtggaggtggtggagtagggaacaaaggaggaacagctgagaaatagtgtttttgtctatcttaccg

SEQ ID NO: 61541 - DNA, 577 bp, Arabidopsis thaliana landsberg
gttgcagtagggataaataaaggctgaataaaataatttacttattctgtttttaattgatctacatgataagttttttaaagtaatactaaaacagttattcacacagctttgtgtgactataacataagaataaatgaatgacaacagtgttgtaatgtatgggagggaagtattgagaatgatctgcgttaagacaactgcagtatatgtgaagtggaatagtgttattttaagagaggtttagattagtttaagatgcttttgaaaactctagaacaaaactaaaaatattacaaagtaatttatattattgatataactgaataggggttaaaatgaaactatataatacacccaattaaaaccagagaaggtagaaaaagaaggggaaaaaaacaaagaataagtgaaatgaatggaaaacagttataaatgtgatcgatattaatcaaatgtatcaatgctcacttcaatagtaatatgacttaactgctgaaaaattaaataaaataaattgattgatagtattggcatttatccatatgtaaggcaataaatgtagctctatagctca

SEQ ID NO: 61542 - DNA, 316 bp, Arabidopsis thaliana landsberg
  unsure (1)..(316): unsure at all n locations
cccnnnnnnnnnnnnnnnnnnnnnnnnnnnnnnnnnnccacgcgatcggtaaatacgctgagacattgatagcttccaggtgtttttatttctgacttcgttcctgcgcctcgatagctactacatagatggcttcaggagacattagtatatacgactatactcttgaaactcaatgtaattatgtcatttaaataattggttcctaatgttatttgaataattattaggaaggaaatccctcccctttcctgatagtatacacttacctgggaccttcccatgacttagatgatgtggttattcttggctgaac

SEQ ID NO: 61543 - DNA, 1703 bp, Arabidopsis thaliana landsberg
aaaattctatagcatttattttttaaaaatatggtgacttatagtatttctgatgttctatcattctactatatatatctcatataccaatcgtcaccagatctaaagcattcacttaatcataagacaaccaatccggccgtgttcaaaatataatttagaaactctctctagaagcctcttttctaatactgaaaataacaccaccttgaaccacgcacaatcctatgcatggaatcaacgactttaaactattggaaagagaattagtaaattactcatgaaattgtttgttagaaaagataagagtggaactagtcaagctagaccagataattttaatgtgataataatctaacgttggattttcttgagaatttaaggacgcagtcgctatagatgatgttcttctttggtcaataattgtaacctacacgtcgtcgtcaatgcaattatatattatatattttttctttccacaatgctatagagatgtctctacgaaaatcatttaatactaagaaaaagtatagcttgctactatcaatatttaacaaaaacgtcacggctgaatatgggacttgactaagttcgtatttgagcttaatatttacgttgatgtatatagtaaaatagaacgtttgttttcatacgaaactacactgtttaaaacttttatcgttttctaaagttagaacacgatacacacgaaagcatacgtaaaaacaccaaaacaattcaacgtgatctagctatcttttaccactataaaatattacatattctgatatgagattaataatcatgtcgttttgctagttcatatttcaacattatgtaatagtatataggaccggtcgagaaacaaatattacaatagtgaggaatcttttttccttatgtctacaaagtcaaatgttttttactaattaacaatgtggtaagagcgtcgtgtgttttagatcgtaatttcagatgttgtcatgatttgagtaaattgagaagcacacaatttagaacagaaaaagcaacgtgacaaccagatttcagacgagacattacatatagtacaatgagaagaaacgttttggatcactgagcatagcaagagccaggtcccaaggggggtcttcgtgcgtaaaagttatccactggagccgctggaacgccacggttattcagtagacatctgaagtagtgtagacgtggcaatgcggttaacgttatgttcccctttgacacggcctctctggtgctccacatccgttctgtttcaccaacgataacggtttaggaaatatcaacagtagaggtgagcgtttaagcaaaactaaaccaaatccaaactgagacaaaataaaagatcatgtagagttacctgcagctgctgcagcacgaggccaaatggtctgaaggacaacggatgtatcaactgtttcaccccacatgcaaacttttccttcgatgacaagcttttggagagaaggatcctcgattccatttagaggctcggtgttataaagcctctcacacggaacatctatatggtcgaggcaccaatatccttggttactgaaaatgcacctgaatacttttgctactgctttttgacatatatcagacactatcctgcaaacgagattagtgagcagatatgacctatataatgaaaaaaaaactatgacgagagacgaacatttctg

SEQ ID NO: 61544 - DNA, 515 bp, Arabidopsis thaliana landsberg
tattcttattattttttttattttaaatctttattttttttttttaaatatttctttttttttttttattttcatttttatattttcttttttttttttttttattttttttttttttttttctttttttttttttcatttctttttatttttttttttttattttctttctatctttatatttttttttatataattttttctttttttttttaatttttcttaatttttactttttttttttttaattttttattcttttttatttttcctttttttttttttttttttttttttatttttatttttatcttttttttttttttttttttatatttttcattcccatcatttttttctttcttttatttattatttcaattttttcttttttttttttatttcttttcttttttttcttttattttatatttttattaatttatatttttcttatttattttctttttttttatttaatatatcttttctttttttttttatcatattaattt

SEQ ID NO: 61545 - DNA, 930 bp, Arabidopsis thaliana landsberg
taacatcaaatcataaaaatcaatcctaattaagataaaccctttgactatattgttagtatttgctatggaaatttaatatatatcattatcctaccaaacaaaaactattccaaaatagagtattttagaaacacctatatatattcaataaccatcgttaatccaattcttaaccttaccattgagtaaacgtaggtccattaggtcaacattcttatgattagatttgttctctagtagacataaaaattttactagaaaatctacaaaactaatcatgattatgctccttaaaacccgcggtaaagtgggaacgtaatgaaaatcttttagcttttgacatttaaagcttttaaccatagtaaacacgtgtcatttcctctttggtcatacccgatatcgcgtaaaaatccaccaacgaagactaaaacgaaacgacgcagtttcataattaaaattcacctaccaaatcgcgtggagagttaaagcgcgtgtagcattaaagtaaacgcgcgagtccacgcgcttaatgtcttaaagtaaaaaaaaaaagacaagagctgaaaaagaaagagcaaagtggttagagaggcttcagttgttggatgcttttgctttttttccttcttcttcgtcttctttcttcgtctctcttctttttttcagtttcggcgtgctgaagaagacgatagagtaatcaatcacagtgagagagatttgagggtaaatctgtccttttcttttcttaaacaactcatgcttgatttctgctacggcggaggaggaggaggaagaggtttacttttgcttatcaccgggaaatttccggcggtgattcaccgtcgatgataatgggttttattaaaagtgtagatctttgatgaaagcaggagactttttgatttcgattttgattttgatttgggg

SEQ ID NO: 61546 - DNA, 315 bp, Arabidopsis thaliana landsberg
  unsure (1)..(315): unsure at all n locations
cnnnnnnnnnnnnnnnnnnnnnnnnnnnnnnnnnnccacgcgtccgcccatgctttctcccaccaccaccaccaccacaaacaggccttttcctcctccgacgtgatcaggaccgcctggctcggcgacctccaccattggatggacgagaactacctccacaactgctttgcttacaccggcgaggttgtcttcggtcaaggccatttcggaataagcaaactggtcagtcctagggatatggttccgcggagttctattcgcgagggacggctgataaagtcttgccgaactatattggcactactgatgccc

SEQ ID NO: 61547 - DNA, 576 bp, Arabidopsis thaliana landsberg
tccggtcggtccgtataaaccataagtttgtttttatagagtttttctaatttagttattatcaatttaaaattcaagctcattaagttttctttagtaatatgtaagactctttttatgcaattcagttcatatatctctcttctcttttttttttttttgtgacgaactaagaaacaaaaaagaattgacattttacagttaattctattatcttcttcatttctaaaccccaaagaaagaaggaaccaactactcggtttttattgtttcttgttctcagtcatgtttgggaatgcgcaagtaaattgataaagaaaaggaagaagaagaagaagaaaaagaaaaagaagaagaccaaaaatgctaaaaggaatgagaaagaattgatccagcataacccctcacagcccgagtcacatcgcgttcctagccgtttgaatctcctctgccgacgctctcattcttgctcgattctatagctcactgtacttgctgatcaagaactaactgtaaacaatgaagacgtagaatagtgaagctaatagtagatacttgcatatatcgagggattgt

SEQ ID NO: 61548 - DNA, 1410 bp, Arabidopsis thaliana landsberg
aatgccagtaatattgccctgtggcacatgaacaataatagcactaacaaagtaagaattcataaacttatcaaataattgaaattaatattattggatctgttcaaaagcatccatcgtaaaacacataacgcccaccataccccacattcgacatgctatcacccaaatcactccatcactcgctctcctttactcatttcataaggaacaacaaacttttttttttgtttttttttttcctaaatcgttgttttcaaataaggagaaagctttgtaactttgtttgtaaggcaatcttatcttatcttttacacattcttactccaaattttctttctttttattcaacaactttgataaacctttctccctccctctattgactttgaaggtttgttttgttttttccatagttgtgtatttagtggtaaattatgatgaaacagacaaattctagtgttacaatagattataatgttcgaatatccgttgaaatctagatatttgatatgatatacaaaacggatacgtaaacttatttgaaaacaaaagaagacactaagaaaactattaacaaataaaggtaacaaaaagtaaatagttacattcatttcaaaatcttttgttattacatgtttggaattagagtaacttaaaagctttatagtttatattgattaatacaacttatacacatcccacatcccatcataattttgataaaatgaagactcgccaacgtgtcaacagatctagcaccgccaacttctcacatggcatcatgggttattattattatacacacttactaaaaccaacttcaatacgacgccatgtatccgcgttttgataataattctcactttttcctatttaaataaatccttcactttcctcctttaacatttcctcactcaactctctcattctcactaacagagagaaaaagcaaaagcaaaaatggctcgatctttcgctattgctgtgatctgtatcgtcctcatcgccggcgttactggtcaagctccgacttcaccaccaaccgctacaccagctccaccaactccaacaactcctccaccagcagcaactcctcctcctgtctcagcaccaccaccagtcacaacatctcctcctccagtcaccactgctcctcctccagcaaatccaccaccaccagtctcttctcctcctcctgcttctcctccaccagctactcctcctccagtcgcttctcctcctcctcccgttgcttctcctccaccagcaactcctcctcccgtcgctactcctcccccagctcctctagcttcccctcctgctcaagttccagctccagcaccgaccacgaagccagattctccatctccatctccgtcatctagcccacctcttccatcaagcctt

SEQ ID NO: 61549 - DNA, 358 bp, Arabidopsis thaliana landsberg
aacaacaagaaacatatgtcgtgattaagtttcgtgtctcatttcactaggttagcgatgaaatggagactcagtctgcttttacttgggcacacatatcttgcttgctacttgcgagtgtatgacagattgcccttctttcgtccatagacttgaactaagtccacttaaatgtatactgctcatgtatcacgcaaattatgacacctcaggagacatttttatcgtgggatatttatccattagttcagcgtgcatacatggaaaagactgcgatagcggagagattaacaaatatcatgcccttccacctagcattgtgatatttggatactagtattaccatttcttacctacc

SEQ ID NO: 61550 - DNA, 410 bp, Arabidopsis thaliana landsberg
  unsure (1)..(410): unsure at all n locations
aggaccggtccggaatacccgttacgacccacgcgtccgagcattcactatagnaaacaaacttctctatctaaaagggattttgttctaaattacctaaatgccactgccattggagttctttctctaaccctcttctttatgtctttgtgtaatcccttcaaattcgcattaggcaaaaaagaggctcccaaagttgcaggtgcatggtcaatacttggtcacctaccactattgagtggttcagagacacctgatagggttttgggtgctctggctgataagtatggacccatatataccatcaacaatgggtgtcaaaaaggttttnnnnnnnnnnnnnnnnngaaattgctaaggaatgctttaccaaaaacgacatttgctttttactttgccccaagcttttt

SEQ ID NO: 61551 - DNA, 470 bp, Arabidopsis thaliana landsberg
tgttttttttttatataactaatcaaagatatctaaagtttttgaggcaaaggtatgcgttactcaaatagaaaaaaacatttagaaacctaaaatgatgtctgctcctcctaaaacatttaataacattcaaaaacaagtcaataaaaaaaaaaaaatttacgaataaagcccttaattagtcaaaaatgaacgaacaaaacaaaggtaggagaaagtatgaatggcccaatcggggagattgcagtagattcatacaaatctgtaaatacaattttaccgggtttggtaaaaatcacaatagatcattttttattaataagaaagagaaaaagaatgcaaattcgtggggtttccaagaaatgcaagtgatatatttagagattgagatctgaccccattttttgcttaacacacaaaaaatccttgggcagaggaaaaagtttatagcgactcttttcctctaaaag

SEQ ID NO: 61552 - DNA, 645 bp, Arabidopsis thaliana landsberg
cttttctctttttttggttatatatatttgaattttgatttatgaacctcctcaagaaggaaagacagaggaggagacaaagaagtataggttcacattgcatagccagtttagttttgaaggatggatatatgaaaaaaatatgaagagagagaagagagaagaagaggaggattaaagagggtgaggccagcttttgtgctttggtagtagatgaggtttaaatgctccataccttccatttccttctctcttaccctaatttaattcttcctctcctttataactccccacagacattctcacttctcctcctcacacttcacatcaacacttctttcttgttttttcattttacaatgtttcctttgatatccgcactttaagcatgagagagtccctttgatattggcctggttcactcagatcttacctgaccacacacgtagatattcattattctctctagattatctgattgagccgcgccaatatctcagtactctctcgtctctattttggactttgtggtcttgtagatcgatttgtatgtgtgtgttgaaatggagacaagtacttgtaactgctttgttgttatattgcttacctataggctgatgtcataaactcttttgatcttgtttc

SEQ ID NO: 61553 - DNA, 1241 bp, Arabidopsis thaliana landsberg
cttattttcgctttagcttctcagctttggtttgatgggaatatatatgattgtcctgtgtaggatgcagccttccctggaatgaagaatgttgatcttccgcggtttgctgtgagttttaatctcacatatgtttttttttcagtttggtgttttcttttctttgtttcctagactttagctttctctcttgatcgctagaccttagatacgggcaaaggttcagtgaccattgaactcttcaagaatactgctcccaatgtggttgaccagttcatgaaattctggtaagcaaatctttttctggtccacaacatgtttgcctttttttacttaattcttgcctaaactctgtcttgtgcagtcaagatgggtatttcaaaggtttcttattcagtcgagttgtaaagcattttgtgattcaagccggtgactctgcggagttcgatgctgtcaaagattgggcactcgacagaaagaacattgataccaggttggtacacacatgaattgataggaaggaaatgtgtaaaaaagaagctcggattaagctgattatggaaactctttctgtatctgtcttgatcagtttgaaacatgaagaattcatggtgggaactcctaaagctaaaaacgagcaaggaggattcgagttcttcattgtgtctgctcagatcaaagatctgaacgagaaattgactgtctttggtcgagtttctaaaggacaagacgttgttcaggagatcgaagaggttgagacagatgatcagtatcaaccaaagtcgccaatagagatcatgtccgtcactttgcttcaagacatgtaaaagcttttttacttcttgtctctctctcttgtatgaaactcaagtgatttttcttgtgaatttgaaacccttttatcatctattttccatatcatgtctcatacgaagaattagatcctaacaagaaatggaaaatttatatattcaaaggctgaaacgggaaatggataaaacaaattatacaacattcattacattgttgtgcaaaacacttccactatcatcatgcagaacgtggctcactcaattataccaaccagatcttctcttactctctctaggccgattctcagaactgcatcaagtagagaaacaggtcaatactggtactatatatgttacaacttaaacaaaatagtgaagctaaaagggatcaaacctctgcgagtgattctggctagagctgtgtgatga

SEQ ID NO: 61554 - DNA, 415 bp, Arabidopsis thaliana landsberg
taacgtgttttcgtacaaagaagttcgaagtctacaagtgtgtatacgtgtgtgtgtgatcctacgtcaatatttacgaaaatgagaaaatgtttttctttgtttcattttccatgcaactggcattttgtacgtggtcaagtatcattttgaagtcattttcagtgtttttgatcaattttttttttgttattttttggcgaagatcattttttttgttttaatattaaaaaagaaataacattactttattttctgatctgaaaggcctatatatatttgaccaaacaaaaaaagagctatatattatatgatcatttaaaaatgaaaattatgatgttttgaaaaaaggccaacttactaacatgtcttgacaagtgaagaatcgtatttcacgtactttctgcatataaag

SEQ ID NO: 61555 - DNA, 482 bp, Arabidopsis thaliana landsberg
  unsure (1)..(482): unsure at all n locations
nnnnnnnnnnnnnnnnnnnnnnnnnnnnnccacgcgtccgcngataaatcgcgttgcgatcagaatctgacgagaaaatcacataattacgaatttgcgttgtcgtgccgaaaaaggaagagaagaaaatggaatcggaggattcggtcaaacaggaattggaggaattgcagaaacaattggggaagaagcaaaagtttgaagcttctgtttcgcctcttaaaacccttctccaacgcacttacccataagattccccggcgcttcgtaaatccttttattcagttctatgccgagttgctactgtgtcgacgaccaggtatacagcaccaggtttctggaatgctggactggccctttttgagcaggctcatttgctcggtactgatccttctgagaaggagcacttgaaagcttgctttgctcacgccagggaacatttgcctcttagagacaacccatcacaaactttacaacctgca

SEQ ID NO: 61556 - DNA, 448 bp, Arabidopsis thaliana landsberg
aaaactcttttagattgcggacgaccgacaccatgttctgcgtgtcatcgacgaccgtcagcaaaccggtacccatgcgcgaaccggccttggcgatcgtgtcgaaatccatcgccagatcgagatgctcgggcatcaggaaatcggtcgacgcgccgcccggcagccagcacttgaggcggtagccgtccttcatgccgccgccgtgctcttcgagaatttcgcgcgcactggtgccgatcggcagctcatagacgccggtgcgcttggcgcgaccggagacgccgtacagcttggtgccgccgtccttcgatttgccctgcgacagacctttgaaccagtcggcgccgtggacgatgatcggcgcgatgttgcacagcgactcgacgttgttgacgacggtcggccggccccaggcgccggcgatctgcgggaacggcggcttggc

SEQ ID NO: 61557 - DNA, 1651 bp, Arabidopsis thaliana landsberg
  unsure (1)..(1651): unsure at all n locations
tgccattaggatcattggcaacaccgagcaggatgctgaaactgataccaatgctctgagggaacccggacactctgaactcttgggttcttctgctactcaggttgatcccatgggaggtgcttcagaaggtgcctctcannnnnnnnnnnnnnnnnnnnnnnnnngagacgccgcttcccgggattcgccttaccaaagatatgatattcagcaggctgcacgctggattgagcaaattcttcccttttctttgcttctgttggttgtttttatccgccagcatttgcagggtactatttcatatctctctctctcgtgtcttttctgatgatttcctcctgctatttgacttttcctcctgctatctctctctcagggttctttgtcgccatttggattgctgctgtcatgttcaagtcaaatgatattctcaagaagcaaacagctttgaaggttttcttttgcttttacttgtttcttttcccattcaatgttcaaatgggtcagtcttaagtctcttttaatgatttcagggtgagaggcatatctcggcattaattggaatctctgtagcatttacggcccatgttgttggtgtttattggtggtttcggaaggatgacctcttgtatcccttaatcatgctgcctccaaagtccataccacctttctggcatgccatttttatcatagtggtgaatggtctgtactttctctcctatatttggtttcccttgctttaacgagtccactttcatcagctaacagttcatcagctatgcagtattcccaatatgattcgttgtagtatcctgttggatcatttggtgcttactcacttgtccctatattcctcagatacacttgtccggcagcctcaatgatttcaagtgttttttgttgatgtactacaaaaacagtaggggtcggaattatcgtaaacaggtgatgtagaaaaatattcttctctgtcccctttagctgtattcagtttcatttggcatggctcactgtggcgtctctgggatacataatttggttattcacttccaatgcagggtcaattgctaactttggttgaatatttcatgcttctgtatcgctctttactgcctacccctgtatggtaccgtttctttttgaacaaggattatggaagcctcttctcctctcttatgacgggattgtatcttacattcaagctcacttcagtagttgagaaggtaggtggctttctagaattttggacctccctttttttttttgtggaagctaagggaaattggcaatgagattcaggttcaatccttctttacggcattgaaggctttgtcacgtaaagaggtgcactacggatcatatgcaactacagagcaggtacaatttaactccttgcagattcgaatctaccttatgcctcttaaggtttaagcccacatgagcaaagaagtgtctttctaatgtgtgcaggtaaatgcagcaggcgacctgtgtgccatctgccaggagaagatgcacaccccaattcttcttcgctgcaaacacatgttttgcgaagattgcgtttcagagtggtgaggtgttttttgcatatagcacatatctttgtgtatgaatatcttgatgttgaaagaatgtgattatgact

SEQ ID NO: 61558 - DNA, 614 bp, Arabidopsis thaliana landsberg
gtttggtgtaagtcaactacaatgtgaatatgttcttactttataaccgttacaaaatttaatgtaaattgttttcttgttacaatctgataagaagagttatataagctatgaacaaatactgatgtagttggtttggtgtttaaacagagcggtagggaaatcgaactgcttccacgataaagggcacactgcggattgtactatatcgaattatccgtatatggcggtttttggtatcattcaagttattcttagccagatcccaaatttccacaagctctcttttctttccattatggccgcagtcatgtcctttacttatgcaactattggaatcggtctagccatcgcaaccgtcgcaggtacatgcaattcttaaaagttttgattagttgcatagctgccatttttaagtactcttatttcaatagttgtaacaatcttgacatgattaattagttgcacaccaacttatctactgttaaaagtcataagaccatttacaaaactaacggttcatatgttacaatatgaaaaaggtgggaaagtgggtaagacgagtatgacgggcacagcggttggagtagatgtaaccgcagctcaaaagatat

SEQ ID NO: 61559 - DNA, 816 bp, Arabidopsis thaliana landsberg
taccacctgtcatatgtacaataattgcaagagtattatttatttattacttctgtttttaagctattaattaattttctgtttcataaagaaaacacaaaacactccacggaactatgttataatatatctatttgttatatacatcaacatccaaaaccaacaataatgctattactacaaaaacggttgcctcatatgtcaaaatgttctttttttttctgttttccttggttttcacaatttggctcaataaacagtccaaaatttaattagtaaatttagtttgacaaccagctaaagatattattgattgactaagataaagtttcagcctaattaattattttaacaaacatagaccatagtgtataattgggaattaaatggacggttaccaaagttttatatctagccaaaatatttatgtttaaaatagaaatagagcaatttgaggcaattacaatccacagttttttcctctgaaattgcagggatttaaaggaaacacagaaaataagaaatttccatttattacatcttcaattctatccacaaacaattggttgcacaaatctctaatttctaatgaaccaaacataacatatggagtagaatattttttttcttaataataatagaggccacaaaaacaaacaatttttcccattagatatatctttgagaaaagatataaccaaagcatcacattttttgtaatatcaatgagtatctcataaacaccaaacatgttgtatctcaaattgatgcaaaacaggactgtcgctattgatcgacatcaatctttaataatta

SEQ ID NO: 61560 - DNA, 2357 bp, Arabidopsis thaliana landsberg
taagcataccttgccagtatgttgggtatgctcgtaggcagccatttgccagtacatattggtgcgcttatagaaatccttcaaagtttctccaggcttcaaagacaacaacatgaccaaattagttgagcttcaaacagaatctccttctcagacaacagaataaaaggaaatggcgaagacaatcttaccactggggttctctgtgaatctgaaagtcctagattagctctaatctgttcaatccgagctcgtttctcttttcttcggagagattttccttgtccttttatcattgcaacaacaactcccactttcactgatccatcaacatccattgcctagatttaacataaccaaattaagtcaaatatagccatagctagctccagattcaaagaagttaagagaaaggtaagaccatatagtacctctacttcttcatcgtcatcttcatcatcagactcttcactgtttccttcatcttcactatcatcttcatcgtcgtcttcgtccccttcttcgtcatctgagacttccacccactcagtttcagtcgtctgttgtaaagacatacccagaaacttattgtctacacaatattttatcaactgatatcaaaagacagaaaaatggagattggtgtcaaacaaaccggaatgatacacttgcactcgtcaagtttgctaagattaagcgaatacaaatcatcaagagtaacttctttatcttttatctccatcatgccaccatatatgtataaggtatccttcccaacgaccatacaggaattaatacgtccacatggttttacaacctgcaaggaaataattgcaacgattaacaagataacaccaaagctagtaaaggaaattacacaatgttaatgaattttgccaaaacaaacctcctctgagaccgaaacttgtggatctagtctagtttttgctccctgtagagccttacttttatcagacctatttccatcaacagttagatttgttgccatacgttcagatatcccatccgaggagcctactccatcagtttgctcaatcatggccgatgattcatcttcttctgttgaatccatctcatcatcattattagatgccacaggttttgcctccaaagtcttctttgcctgtaaacaacgaagagaagttttctactcatttgaaacgtcttaaaccataaggctcatcctacgggataaaagttgaacaatgcatgcaaaagaaaaacagcctttttttctgttacaggtaattacagtacgcagcaaaaactatagtaggtgtagtcataccttatcttttgatgatttttcttttcgtaactctattgggtacctgtactccacagaaactgagagtgagtgatacaaaatgaaaaactcacattttaaaaaaccaagcatcttaagatagctataatttttacaaccttcaggaataatttttaataaacaaaaagtacgttggagaagaaacttcatagtgtcaatactcataataacattggattcttaccatcgacgattatctaactggaagccatagagttcatttaagaataaactcatcattacatcacctgccaaaaaattacagatgtcaataattcagcttacagattctgataaacaaaaatgatactagtataccatttcctgaccttccatttccatgtccacgacacccccaaactgcaaagcacgctttttgtggacacataccgaaaatccggcacgggagctaggtggcatcccaattttcttcacctgagtacagaaagtattattacattacaaagaaagaaaattgttaaatcaactgggttgttaagatttctaattgataaaaattgcaaaacatatatgaactaagtgtgggtattactctcccggtgatactagtattatcatgaaaacagtacaagaagtataattaaaagtgatgccatctagaattacatactttgttccattcccaagtcctgggatcaagagaccactaatctgcatgaacaattcctttctcagagctcttctcggatgagacttcttttgaataaccaccatataagaatatctgcagcataaaaggctttcctataagtaaatggttatgcttggacttaaagaatatgatatagacatgtgcattgtaaactaacctcatcttgataaacaaaaaactggaagccacttctagctgtaggccacatggcaccagggttaggttttatttcgtgccactatcaaattaaccccaaatatattcccttaaagctatagaaagttctggagagctaggaattgaaatgggtggaaacttcaatagaatgtaggtgta

SEQ ID NO: 61561 - DNA, 609 bp, Arabidopsis thaliana landsberg
ggggtggtcatatttttttctgacgattgcggtgcaccatgcgataaatcataatttatacatcactttacatataatttttcctgtaccataagatttgagaagttgactttggattctttagtgggaatgtcgattaaatttattcttcccttcttttaatgagaaggcacaaaattaaataaagagtaaaagtctattcaaaattcttggatcttgttacaattttgtttcttctctttattttcttatatatttctatgctataagtgatctgtttatcaaagaaacaaactataggttcataggatgttaagttcgatcgtgccactaatttagtcaccttgagtatatgatttactcacgtattacacacaaccttggcttaggattgtttttaattgctatcacaaatttagtcgattaatttcaaaactgacgttatattattaggatcactttagtaccgacgttaaagtatttcaaaactgacgtcaaaaatgttttttttttttttttttttggagtggatagattttattaaccacaactttcccaacttttatacaagtttacctttcaaaaatactatatttatctacatttatt

SEQ ID NO: 61562 - DNA, 615 bp, Arabidopsis thaliana landsberg
ttatcgattctttctcttaccaaatttttccatttatttttcccttctttttacctcgttctcatttccacaaaattctacaaaaacttgtttaatttattatatatctttcttctctcttgagtttcttaactaggaaaaaaccaacaacacttgttaagtttgtttaattaagaataaatttggtagatagcaaaaaatggtaataagtgaaagtctatatatttagctagcatttagcaatgaaggcggagtaaatatgttgttaactgtcatttaacgggtgactttttctccctgccaaaattaaatcttaaaccatgatcattagacttccatatgtaagttaaacaaaaaaaattcataaatatattatttttaacgtgcacatctaatttatcaattaaaatccctaacaaaagtatatcatagcataaagccataaacccaaactcgtaaactttgttggataaattagccaattagggcacccacataagtaaagaatgttaggagaaaaaaaaactaaagttaaatgaaaggtaaaatcattcaaatgatgtaaccaaaaatattcgtttgctctcattgctattttgaaaaaaaaatgtgagt

SEQ ID NO: 61563 - DNA, 1498 bp, Arabidopsis thaliana landsberg
gttattttccatgttttttttttaaaactgaaaacatattacatggcaacataacatatcctgtagcatattaataataggataagtcagaccattattgaaatgttgatattataaatcatattttgattattgttttagcataattatgaatagttcttccatagttctttcaaatttgtaagttatttaaattgatctaaaaattatttaaaagatctcaaactaaaatatttcatctactcagcaattagaagtgaacatctttgagcataagaaattgatataatgtagcaagtaatatctgaagaatcggtgactggtgagctcttaactttaagagcttgagtctagttagatttgtgaaacgaggggcctcttcttttcccttattatagtccaccattctatataacgaaatgaaaaattgtcaacatatgcgatatgattaagattcaagcaaaggagaaacaaaaatttgaatgtttacttcttcaaaataactacgatgaataatgagctctttacaatatcgacttaatgcactaagaagattttttgttgaaacttaattgaaagtgtgtcttgaaatttgttaaagttttgtcgtatcgtaaaagaaccagatcttgcactcttgacctttaaaaagctgagaactggtgcatcaattaagtttgtcgtcaactttcattgttatcagctacaaacatggaactttgagaaaaatttcaatagttttcatactttgcgacaccacaaccactttactctcctcaatctcctctacactttgcaccttggaagataacattttgaactcggattttgtaagattcaagcttgggagttgcttccataagtctgtccattgcggtgttactttactattttggatgtatttacaagttgttagtctcgtaagaatctttgacgtgaaatgattttacggtaaatcttgaacacaagtcaatacatctacaaaagaaaaatatattagcaatacacgacctaagatatgtaaaatttatttattccaaattcacaaatagagttaaagtaaataagcttttgtatttcactaaatcgagaaattattcggtaaaattaagatactatacataaatatagataagtaatttggtaaaattatatagatgtagtaattatttttttaaaaataatattttaaaactattttagcattatgtaatttttgtttttaaacttgaaatgattaagtaaaactaaaaaggtaggaaaatgagtcttttagtttcaactctaaatttgaaaaaaaatcattaaaaagtaaggaaacaaatatgataactatcttaaaaatatgagtcattctacaaaactctcatcattttaaaaactccaggttcttggaatttatctctcacgtacaagagctatctctagcaaaataaaaaatcacgtacaagagctatctctctcagtttccgggtcacaagttcaagtgccgaccctg

SEQ ID NO: 61564 - DNA, 1378 bp, Arabidopsis thaliana landsberg
tacactacttagacaatcgtaatcactcggtaaaaaacactgttacaaaatggggtcgtagagatctaccactaattaaattggatttaccttttactctttggctcctttttgaaaaaatttgaagttaacaaaataaccaaataaaataagaataagtcgtcacatttaatctcataggcaatttttgaatctaatacaaatcacgtttttccaaccctgatggtcaaaagcgttatgaatgtgctttgtaaaaaactgtttagtttgttaggacatgcttttatattattacaaattttaaatatcatgtttatgctataattgaaaaatacgaacgtcgaaatcactcaaagctcacaccaatctggctttgagtgctaagttagggtttggcattgactttgtttacgtgagattaccatacctaacgaacctatcatttcattaattacaaattgagtattaaaaaaacatataatatgtgttttcgtgttgttgcaaataatggactaagtaacaatattcattggtccgattttgaaggaaagttcaatgaaataaataaaagggtaatctcgtaataagagtgaaaaacaagccttaacctgtaaacgcttacgctagttaaatacacaacaaagaccgattcgcttttcactctctcgttcaaggtccgactcagttcccggcgagttcgactcggtgattgattttttcctagaaaaataaaatttcttcttaacgattgatcgattttggttttctatctttcgattctagatctagaattcaatttgtgaggtttggagatggcgagcgagctgatcaatcggcgacacgagacggatcaaccaaccgccgatgcttattacccgaaaccaatcaaaccatggttcacggtgactcgtccgatgcgttacatgctccgtgaacagagacttatcttcgttctcgttggcattgcaatcgctactttggttttcacaattttccctcgctccacacaatcaaccccttactcggatcctttctccggttacggaatccgacccgacgaatcgtacgttccggctatacaagctcagaggaaacctagcctcgagtacctgaaccggatcggagcaacaggcgggaaaatcccactgggattgaaacgcaaagggctaagagtggttgtgaccggtggtgctggattcgttggatcgcatctcgtggatcgtttgatggctagaggagatactgtgattgttgttgataatttcttcactggaaggaaagagaacgttatgcaccatttcagtaaccctaactttgagatgatccgtcacgatgtggttgagccgattcttcttgaggttgatcagatggaccattt

SEQ ID NO: 61565 - DNA, 1370 bp, Arabidopsis thaliana landsberg
gctaaaagggcttcatattctaaaacgcataacaaatacgatatttattcaaatgcttgtagatgtatataccgagatacatgtggtttaacctgctcaatggtgaaaaatccaactctacaaacgttaacaccataattaattgttttcatagtctaaacgcaactaatttcctgtaaaaagtatcagtaccaacatggcctatatcaagtacacaaaaacatcattaactgttattccaatttcattgagcattgagttgtatcagcatcatccatgttggttcatgtgggtcattcacgagaccaatggatggtgacagaaaacatgcattttcaattagcaggtgagttaataaatgaactaataccacttttattattataagcttaatgcgtgtatttggatattttttgttttagttaaagtaaacatacataatgatgacaaaaaacaaacgatattttattttgtcaacatttcctatacgatgcatagacatgatcaatgcagtgagatattttgtcaactaatcatatcaatgctcaatgaaatcaaaatggatattttgacggttcacggtttgattggtctaacacaccggtccgacaaggctttggaaaccattttttatatccatctgattaccaagaaaatatactgtataagataaacacaatcaatcaatagtatataagaccattctctaaacactatctttaattataatgtgagtggatcactcgtatctcggatttcagcccaatttgttttaacatgataggcttgtttaacgagaggctggctcatccatcgaattcctttgacatgatccaaagttactcttatcgcaaatagattagactacggttcaagccataacacttaaatccacacttcatagtctcttgaccaaacaacacacttatgcacactatctttttaaataaaacaaccgtaatttgggtcgatacatatagggttccttatgtaagcccaaaatgtaaattggctttaatcagccattaaatgggccaacaaggcctttaaatcaaaacagtataacgacaaaaacgtactttggacgtcaaaaacagatagacacgtggcagtttattgttgatagacaaaaatcgtgaagccgcttcttggaatggagattcttcactttggtggactagagactctttgaggtctcaagttaactctttaaagtttaaaccttttgacttaattcaaagccgtacaactttttttgttcgccgccgcgtcgccggaaaatcatcaccgttagtcttcttctctcccccggtttatctttttgctgctaaaatcaaaaatagggtttaatcacttcactgttgtaacaa

SEQ ID NO: 61566 - DNA, 697 bp, Arabidopsis thaliana landsberg
agtatatctatctccttatcaaataatcaaaaatcattttattttaatgtaatctaggcctaacgagtcatcaaaacatgggcgagtgagcctatatacatcaaggcatataaaaatacatgaatactttttgataccattatattttatttatagggttagatttaaacttttataaatcaattatctgttcaaaaggatttctccaataatattctgcggttcccaagaattgtaggtacgaaagattagagagttgtagctttatgcattatatagaagattttagtggctacataattgaccatacattatcactattcttcttatcacaaactttttgtgtatgaagctatataaaaagttgtataggaattaatttcataaacgggacagctgaagactagaacatgaactgaacaatggatttgattgatatttttttttaccgtattagtaatcggtaaaagtatatcatatgaattgtaaccaatcataaaacacaaaaaatagatgtattgaaaacagtactttcatttatctttctttttaaaagctattttatcaaaaaaattccattaattttttttaaatcaatttgtgttattaatcggatcttaagttaacaattaaagtattgcaaagatgagaatggcaatggccgaagatagaggaggacaaaaatgacatatgtaat

SEQ ID NO: 61567 - DNA, 1955 bp, Arabidopsis thaliana landsberg
aaaaaaaaaaaaaaaaaagaaactgtacttttcccagtatgatctctcaacttaaagttgcaatatcataccaatatattgtatagttgaatacaatttagaacgattctacgagtttttatcatctgatttgtttatgattgtatcggcctctcaagattttgttgtaattcaaaatattagtacacatttcaaaatgcacaaacttaagggaaaaagatttgaaagaacgattaatgctaaaaccataacacagctacaagttgctgtacaactttgaataccaaaccatttgagaaaaccaaagacgaaacctctctacgtatgaaaatacaacaagtcacaactccattagacaacaacaacaacaaaaattccaaaacttcattattcattagaggggatcttcttcttcagtactcctgctcaaatattccactagtaaccatagaaacatccacatggaatctaaaggtctctccatcatttgctctcgtgtggtgacacttcttgtgacctcttaaagcatgtactgacctaaacagccttcagcaaactctgcacttattgtcaacgtcactgaaccattattaatcccagcttcagcttctatcgattcttctctgcatctcttggtttgacttttggatttgtttctcattctatggaacgtctgatgaccaccaagagtttgataagtcgagaaaaccttgtgacagagcccacaccgatgctctatattcatctcaaatcctgatactgaatcttcaaatgcagtttcttgacgaacaagtttctgttcgttatcagtttcttctctaagtattcttgctccagcctgtttctgctgacccaattcatcatcttctctgcccttcttgtttgccaagtaacccgaaagctctttcgatgttccaacagatgctctgcttatccccacaagtttcttctgctcattactcaaaagcccatattcaaagtctccatcttttctcaaattcacctctggattcgaatccagagcttcaccaacaagtctctgctcatttctcaataacccgtcttcaaattttctctgagtcgaacccagagctttaccaaaatgttccaaaccattcacgaactttccaccactcatggacaagagaatcagagactcagcgacttctaataatcctccatcatccacagaaacaggaaacatagtacacgaagaagaagaaacagagaatcgaggaagaatcttcttgtacctggaaactctcttcgatctttttctcctctgcacaatactaaacctacaaaacaggcttcttcttgtagattcttcagaatgcgtcacttggagatgattaaacagacatttctcgtaaagaaaccctttcccgcattctttgcatcgaatcaggatctttttatttctcctcctcctcgtacagaatcgatgatcgagtaaagatttctgggttttcttcgggttttccctcaatccgtagttgcaagagagctcttcgtaatgattcatagattctctgaagccagtcttcttcatgagatttctcgaaactcgagaggttctgagcttcttaggacggaattcgaagatgggtttctcaaattcttgttgttcttccattaaaacgaagcttgttggaagacgagatgattggcgaagagtatgagggtagaaatagttgaaagaatcgatcttccgttacttttctcgagaaaacgcaaaagaaatcgccggagactgagcaataactgttgagcaagagtgatacgtaatgctctgaatcaatcggattaagaagaaaacaaaggaaatttttggtttttcgtagttctctgggaaaatgagaagagaggcacagagtgagagcgagcaagagagaaagtggcaacagagagatcaataagcactgagagatgtgagagcagctacggaagaagaa

SEQ ID NO: 61568 - DNA, 665 bp, Arabidopsis thaliana landsberg
atgcagtccatctatgtttggtagttgaaagtcttttagtttacttggcgcgtatggtcatgtattctgcaatatttcaggtagccgacaatctttttcttcttgctattttactttataggcttggaacctagaggataatagtaaagtataaaaatttcaaagtctctttgaaacacatgcttctcaagtcttcatacaactcaagcgtcccatctattcaatccgacgtcatctcatatagatgaaaagtcaccatctattcaataaagaaaagtacatatgaaagagtaatgtcatccaatgagaaagacaagtacgatcaggcgtttaagatattcatgacttatgaagatggcgaatacaataaattttataaaaaaaatctttccactttgtggatatcatggcttacaaaaactttaaaaatgaggtgcttgctttgtaccttttagttacaatacttaggttcttttgagtggaaccattatatttgtgatttcttgaaggctaagaagggtgagattgagttcaggacaatcttgttcatccctgggatggatgtttcaatgtcaaaagcaacattcaattctttgttaaacgtgtgtttgcctctgattttgagatggtgagttcatgtttttgtatgagataagttgagaaca

SEQ ID NO: 61569 - DNA, 470 bp, Arabidopsis thaliana landsberg
tacctatacaccagacaagaaagatgagcctgaactctgtggatcgagattttgttgtgccaaaaagttccgacagagtggaagagagagataaagagaggaagatgaagccggaggctatgctgtcaaaaagagagtacgctcgacgcttgagtagagactagtactagagataacaccgtctatgactaaatgactcttttaccccttattcacctactcataaatatctcttactcaagagagacattcgactgaccgcgaccaaaccaattcaaatcaaattccgatctatttggaatatactttatgaaactactagtaaaaattcgagccgaactacactgaataaccgaatgcctaaacctatagcaaaaaaaggtttggacccggcctatgtaattcttccaagaaataaattcgccaactggttcagcctaaacatggcctacgtatttcattatagtatt

SEQ ID NO: 61570 - DNA, 682 bp, Arabidopsis thaliana landsberg
cccttggcgatgcatatgcacaacaatggctctaacctcatcacgttcaaagctctcgtaagtccttcataaaattcacacacaattacaattagttctttgaaaagtgggcggttataaaaaaagtgaatgatggtgcatgcatgtggattcattagaacatgcaagcaagctgcatgcaaatagtgcttttgttcaaaatccaaatttaaattttttatattgaagaaactttcaacatttctataaactaaagcctttaataattagaacgatattcgtttaataaaatgttcaaacgtgatctccaataaatatgagactgtctttgtggataaataatcaggaatacaatgctacaatagactactattgggcacctttactggtggaatccaactcggacgacccgacaaaccatagattccccgatcggatagttcggatccaatcaatagaaaaacatgcaaggcattggacgaacgctgatatcattgttttcaactcttacttatggtggagaatgcctcatatcaagtcactgtaagtttttttaagttaaactcaattatactcaatatgtaacatgatgagtaaaaaaataaatatatgtataaaaggtggggatcgtttgagaaatcagatggaatatacaaggaagtggagatggtgagagtttatg

SEQ ID NO: 61571 - DNA, 476 bp, Arabidopsis thaliana landsberg
  unsure (1)..(476): unsure at all n locations
cccnnnnnnnnnnnnnnnnnnnnnnnnnnnnnnnnnnccacgcgtccgctacgcgtccgcgcggcttcaaccttgtaggtattctctttcttcttttttagccacccctctcttgaaaaatctagatctcgttcttccttgatctacgttacgcttttagtgaccggatctgtatggatctgaaccagatctacacgccgatggtggttttggcctggtctttcatagatctgatgcatggaggctcagatctactgtacagagatactgtagataatcgatgagaagaacgcagatccagccgcttccgcttgttcgatcactacagacgcttgtatcggattattcatgattgattcataagcagcatgtcttcctacggctatagttggtgcagatctcggatgtttgaaaatttagcgtatgacgtgaaagcttttgggctggaaaatggggaatgtaggatgatttcggga

SEQ ID NO: 61572 - DNA, 224 bp, Arabidopsis thaliana landsberg
cttcacttaactaatatggaccacaaagacacatgtgaaatcaatatttgggatcatgaatggattctacgttattagttgtgtttttgacatcacgtctttactctctgacctactgggaccgaaatgtacactacaacagggcatgccggaactgatgcccaaaaaacaacttacgacttgctggaaggaatgggatcatgatcccaaaattgggtttcaat

SEQ ID NO: 61573 - DNA, 528 bp, Arabidopsis thaliana landsberg
  unsure (1)..(528): unsure at all n locations
cccnnnnnnnnnnnnnnnnnnnnnnnnnnnnnnnnnnccacgcgtccggtaaacacgcactctctttctcttggacaggtgtacaagcaaagtgtatgacatgtttcggcgttagaaggaacatggaagttcacttcagaagatgataatcaacaaggtcattactcataagccaataacaataagtaatggcatcagcagaagggaaggctccttatacagctaattgttttactcaagatttccggattcccccgagttctcctgatcatccgtcatcagcttcaaaaacaataatttcctgattgggttcctagtaattctattaatgatcaaaatcatgccaatgcagtctgtatcccccacaatttgaattctgataagctacctgaaatgaaatggtggctacacgttaaaagtgacttggggggatgaagcaaattatacatgtcaacagctgaattcctaccagtcccgaacttnnnnnnnnnnnnnnnnnnnnnnnnnnngggcacctcaaaagtgggg

SEQ ID NO: 61574 - DNA, 424 bp, Arabidopsis thaliana landsberg
gaagactgcctttttcggtaccaactaaacccgtagtcacggccggtccatcttaatatgctgtctaatgcctaaaaagtaaaaactggcccattataaaacaaagttgaaaaaaattgcgaggtacaatttatcaactaagtattcttcatccgtctagacatcaaaagagttctaactctctccaagagatatcgatctagtgttctttcttaagccaatcgaaatgttatttatccatcctcaaattagccaattccaaatattgttttcaaattatagccttttccaaagattgtgttttcaatgaataattgtagaaatttaattttgatagttttttttataagaaaactacgcaaaaagtccagacttaatatccaaggtgatatcttttccaagtcaatagttcattgactattat

SEQ ID NO: 61575 - DNA, 543 bp, Arabidopsis thaliana landsberg
  unsure (1)..(543): unsure at all n locations
nnnnnnnnnnnnnnnnnnnnnnnnnnnnnnnnnccacgcgtccggtcacgcgtccggctcgcaataattgcgctggagaggccaatcacatctgtgagtcagcctcagccagatactctgttacctacaccagctcactctgcttctatctccttctgctatatctgctcaacctttaaagggtatttatctctctctctctgtctctctctctcaactagtttgagttacattggactctgatatcactgcagaagtacatgagactgttaaaagagggcatgctttaaagaccagaatcagaagctgattaaaggagagaacctttccaagacatggctacgcatgatctcaatgtggacattaaccactgtgatgctgatgctgactcaagctgcgatcaaaagggactggcgctgcaaagttcccaccggaaatctcaaattccaggacccccagctcctctgtgcggaaccctggagaggacgattcctcaaacaattcctcttccttggaatttgacatactcaataaagagaggga

SEQ ID NO: 61576 - DNA, 466 bp, Arabidopsis thaliana landsberg
  unsure (1)..(466): unsure at all n locations
nnnnnnnnnnnnnnnnnnnnnnnnnnnccacgcgtccgcnnctttttactagcattgcaaaaaaaaaaaaaaaaatagttttatgcaggggggtgtgaaggagaagttgttgatcaaagagaaaaaaacatcagaacatgaagaagaggaattatcattggtgaagagggtgtggaatgagagcaaggtgatgtgggtagtggcagcaccaggcatttttacaaggttctccacctttggtatcaatgttataagccaagcatttattggtcatattggttcaagggaacttgctgcttatgctcttgcgtccactgttctcatacactttgccaatggaattctgttatggaatggctagtgcgttgtcaccactttgcggtcaagcatactgtgcaaaagaatatgtcatgatgggagtgccttttcaaagatcatggtttggtatgtccataacttaacttct

SEQ ID NO: 61577 - DNA, 1608 bp, Arabidopsis thaliana landsberg
  unsure (1)..(1608): unsure at all n locations
gaacggcacgccagatgatttcaaacggttggttgatgaggcacatggtaattatttctcgtctttcttgttttcttgatgttgtataaccatgtagtgacgaagcacatgatatacaggcctaggacttcttgtctttttggacatcgtgcattcttatgcagcagctgatcagatggttgggctttctctcttcgatggttcaaatgattgctattttcattatggtaatttccataatagtagttcactttttatttatttcatgagttcttgcatgaataaaagacttcttgcatgcctttattctaacgtgttgatgtccaagtcattggtatgtaactagaaagtatgcaccataattttcgtggtacaaccaatgttgttcataatcttgtgtacatctaaagatgacgtcaaacatgtccgacatagttgaatatgagcgtgtctaaaaacacaatccattttcttcatcgtggaaataggtaaaagggggcatcacaaacactggggcacccggatgttcaaatacggtgatttggatgttcttcattttctcatatcaaatttgaactggtaaaggcagctacattattaagtggttgttaataatgtattggttgtactcactcttttggtatagtaggaaagtgttgcacactttttggttataggaatctgatgctgttgcatttggcttttgcaggtggattacagagtatcaagttgatggttaccaatttcactcgcttgcctcaatgatttacacgcacaatgggtttgcttcatttaacaacgatttggatgagtaaggcatctatgagactacacacctctttgtataattttgatttcagtgacagttggtcaaactgttgacgtctttcctgttggcagctattgcaatcagtatgttgaccgagatgctctgatgtacctcattttggccaatgaaatcctgcatgttcaacatccaaatataataacaattgctgaggatgtaagctacacatcacttttttttggtcatgcttttgtataaagctattaaatattcatccttattgaattgctttgtcttaattgatagtattgagggggactagctactgacactgctttcatcatagaacatcactaagtctctgaagtatatttctgggcataattgcttctaaattatctctagtttttagtcttgcaagtgttggttagtagaattagtactgttactgccagttagtgaaaacttttcatgctttttccaaatatgctatatgtagataaaaagttgtgtgagagagtaacatgtaacatgtatatatatgctttctcatgtacaacacatgacggtaaccatagtgccaactggcttgtgtaagccaatttaaactggccatacgcaggaaaagaagttcttgacgaattatcttttacgaatgtcagatgtatatcagtgggtaaaaaagtttaagattcttattgacaganaaattgcattaatttttctgtcgatgatctgaatcgttgctcgttgggtttcactatctacccacttatagaacttaacacggtttccttttgcttttaggcaacatattaccc

SEQ ID NO: 61578 - DNA, 1451 bp, Arabidopsis thaliana landsberg
tagtagtaactaaaaagtctatcatgaatacgctatcatgaatacatattagtattcatgaatacatactacatactagtataagtattcatgattgactttttcgttttttttcttctctttatttatcattaagaaacgaaaaagtcaattatgaatacactagtatttgtttctcataagtacagtaaatacatacaatcttttgcacatcattttgtgtgataccattaagtttgtccatacataagcgaatataatcttttaatgtgcaggttgatcttcttagtcgattacaatgcccatatttggtggaattacgtggatattgtgcagatcaaaaccataggatcctgatatatgaatttatgcctaatggtactgtggaacatcatctccacgatcataattttaagaatctaaaggatcgacctcaaccattagattggggaactcggcttaggatcgcccttgattgcgccagagccctagagtttcttcatgagaatacaatctctactgttatccaccggaacttgaagtgtaccaacattttgttggatcaaaataatcgagctaaagtttcagatttcggattagccaaaaccggatccgataaactaaacggtgagatttcaacaagggttattggcaccacaggatatcttgctccagagtaagtaacacttcacataattgtttcatatttttgcaaaacaatttcttttacaaaatattagcaaagtgtgttgatccattagtggttgttgactatcaatagtgtgtcacttttgaatttaaaagatggattatgatcagtcaattgctcttaacataaccatttaaaaacttattgggattgagataggtatgcctctactggaaagcttactacaaaatcagatgtttatagttatggtattgtgttactacaactcttaacgggtcgcacaccgatcgattcaagacgtccacggggacaagatgtccttgtctcttgggtaagtataccgtaatttattttcagtaacatattatcaatttgaactactcaataaacctccacgagaacatgtgcacttgtctacacttgtttagaagtacttatatagctagtaattaattgtcaaactgtggtataaattttcaggctcttccaagactaaccaatagagagaaaattagtgaaatggtggatccaaccatgaaaggtcaatactcacaaaaagatcttattcaggtctgacttcattacttctttctatctttcctttgcaatgtggagtgttgggttttcccttagtacattcctatatgacaaagaaagaagcgtttaatgtggttaacttggaaacatagtggatgtggcttcgcaaccatagactatctacctttgtgtttgatcaccacatcatttatataccaattgactactaattgtggatgacata

SEQ ID NO: 61579 - DNA, 438 bp, Arabidopsis thaliana landsberg
aaataaaaaaaaaaaaaaaaaaaaagaaaaaaaaataaaaaaaaaaaaaaaatttaaatttttaaaaaaaaaaaaaaaaaaaaaaaaaaaaaaaaaaaataaaaaaaaaaaaaaaaaaataaaagaaaaaaaaaaaaaaagaaaaaaaaaaaaaaaaaaaaaaagaaaaaaaaagaaaaaaaaaaaaaaagagagaaaagtaaagaagaaaaaaaaaaaaaaaaaaaaaaaggaaaagaaaaaaaaaaaaaagaaagaaaaagaaaaaaataaagaaagaaaaaaaagaaaaaaaaggaagaaaaaaaaaaaaaaaaaaagaaaaagaaaaaaaaaagaaaaataaaggataaaaaaaaaaaaaaagaagaaagaaaagagaaaaaaaggaaaaaaaaaaaaaaaaaaaaaaggaagaaagaaaaagagaaaagaaag

SEQ ID NO: 61580 - DNA, 1590 bp, Arabidopsis thaliana landsberg
ttaaccaagtttaaccgaaccaaatcaattttctaaaccaggattacaaacccgttttcgttaaagtactttgacgaaaaacacctccgaagaaactcaaaattacgatggtataccactcaactttcgataactactagaatccatcaatcaccacaggaaacaatgccacttctcctccgtcgatttccctctccctccgtcgtctcctccttcttcctccgtcgctcaatggcttcctcaacaatctcctcggatataatcactccatcaaacaccaaaatcggatggatcggaaccggagtcatgggccgatcaatgtgtggacacttaatcaaagccggttacacagtcaccgtcttcaatcgaaccatctccaaagctcaaactctcatcgacatgggtgctaacgtcgccgactcaccaaactcagtcgctgaacaatccgacgtcgttttcaccatcgttggttatccttccgatgtccgtcacgtccttctcgatccaaagtccggagctttatctggtctccgtcaaggaggtgttctcgttgatatgactacttctgagccttctttagcagaggagatagctaaagctgcttcctttaagaattgtttctcaatagacgctcctgtctcaggtggagatttaggagctaagaatgggaagctatctatattcgccggaggtgatgaaaccaccgtgaaacgtttagatccgttgttttcgttaatgggtaaagtcaacttcatgggaacaagtgggaaaggtcaatttgcgaaattggctaatcagataactattgcttcgactatgttaggacttgtggaaggtttgatttatgctcataaagctggacttgatgttaagaagtttcttgaagcgatttctactggtgctgctggttctaagtctatagatttgtatggagataggattctgaagagggattttgatcctggtttttatgtgaatcattttgtgaaagatttagggatttgtttgaatgaatgtcagaggatgggtttggctttgcctggtttagctcttgctcaacagctttacttgtctcttaaggctcatggtgaaggtgatcttggtactcaagctcttctcttggctcttgaacgtctcaacaatgtctctgttcaatcatctgactcttgatttaggttctgttccactttctgataatgcatctgttggagattttatgttgttatgaagtaaagatttgatcttttgtgtacccatttgttggtaaaacatgatttgaagtaaacttttgtgtacgcatatgagattcatacacagtagttttatgtgtactcaatgatgaggaaaaatgaaatctttatatactcagaactccagtgaagtgagctttgaatttgtagtttttacaacatatctggttataataaaatcccagaatctgaagaactgagtcttttatttttgaagaacatgaaaacaaatatttctcccaaggaaacttatccgctacacagaaagtcttggggaagagtaaaaacatggaaagctttcttttatgacgccttagaacttggcttaggcgttttgtga

SEQ ID NO: 61581 - DNA, 538 bp, Arabidopsis thaliana landsberg
cctgcacaagatcagcaagacctgaatcagtgatatcttttctgccttgtagccccagagcttcgacgtcggggcatctctcagagagcgatttcaacgattcatcggtgattaaaccacaaccccgctaaatgcaatgcccttagatcatggcagccttctgcaacagctgataatcctttatctgagagctttctacaatatgatacatccaaaaactgcagtaaagaaagacaccttccaattgaggccaatccagtatctgtaatacctgttcccagaagatgaagaggtaagcaaaattctgagcttaggattgttccacccaccacaacatatgtcagtaaaatccaacaagaaacgtctatttgtgaaaactaagaccctagagaattcagacataacattcataccaatagaatgagccaaagaagaactcaatcatagaaatcttattgtgacaggtctcttaagacgctctcaaactaaaaccccttaaagctgatggattacagcaaaaatcacccacaaagggact

SEQ ID NO: 61582 - DNA, 1100 bp, Arabidopsis thaliana landsberg
  unsure (1)..(1100): unsure at all n locations
gagaagcaggttcaacaacaactacacacactttgcaaagcaactgaagaataatcaagcagccgctacatccaaatatttaatgcacaaaaatatacaagagcttgagagaagactcactgatgaactataagccatgagtgtgcccatacacgagacagatagagagatcacagaaggtttagggttaccagaatttcccaacagacaagtaacgagatcccaacagcaacgatcaaagcagaacatctggctcggttaaactacctgaaaagttaactttacaacattttgggaactccaaaccagcttcactgcatctcacttctgtcacatgtggaagagaccttacatctatatactccagggaactgcatttgtccaaaagcttgcctatccctgttactgtgatctttgtgcagttgctaacctttaaaaccttcaatcccaaaacatcgtcgctccctaaatcccggaaagcagtgtctgtgacctcttcacagcaaccaatatctagagcctccaagttcttgcactgcttgagaatgcagctaagggaagagtcagatatattcaagcaccaatccatcctcaagttcttgagactgtctttacaggaatctgccagtaacatgatagattcgtcagagatatctctgcatccaccgattatcagannnnnnnnnnnnnnnnnnnnntgcgccagcgacgatatagattcgttcccgactttgtaacagtccaacaattttagtgtcttgagggaagatgcacaagctttcgccacgctcgaaacttcagcatcttcaacattgctacatttattaatgtctaaaaattttatctttctgccgtccttcacaagatcagcaggacctgaatcagtgattttggtgcaacctttgtaccccagaaccttcgagatcacggcattttttaaagagtgatttcaaccatttcatccgtttgggaaattttgaaaaaaaaacgcgaaccccaaaaaccccccccccgcgggctttttttaataaaaaaaaaattggggcccccaaaaaaattttttgggggccccccccccccccctctttttttttttttat

SEQ ID NO: 61583 - DNA, 482 bp, Arabidopsis thaliana landsberg
  unsure (1)..(482): unsure at all n locations
attactctgactcatctagagaagaagatcgcccatctagtttttatttaaaatactgccatttttaatccttatgtggagtaatctggtatcaaaaacttatcttgttatctacccatttactttatgctaagcattctaattatattccgtttnnnnnnnnnnnnnnnnnatttacagtatctacaagactgtaatggacgatggaggcgtgatacaactgttttatggagtatgcatactcaaaattttgtagactcgtagaaaaaacaggcatgtctattgagatatatacattttagataaatgtttactcaaaattatggtctgcaagcattttaatactttttgactgttgcaaattagataactcttgactcgaaatagtataagagagacattaaaatggttggcatatggtggcatgaaatattgtaaagtcttactttggtgacatagtgaatggacttaggttttacacc

SEQ ID NO: 61584 - DNA, 461 bp, Arabidopsis thaliana landsberg
  unsure (1)..(461): unsure at all n locations
nnnnnnnnnnnnnnnnnnnnnnnnnnnnnccacgcgtccgacgataacccaaagtgcttctctcctctgtctttttctcttttttgctatccttttggctagtggcactgctgcaagtgcaactccaagaagcgcagtgccaagccaccatgtttcaacattcaacagaagcctttttccttccacttttctctttggaattggttcttctgcttaccaggcagaaggagcagcaagtgtagatgggagaggaccaagcatatgggacacctacactagacagcatactgaaaagatttgggatcatagcaccggtgacatgggagctgatttttatcatcgatacaagggtgacataaaaatagcgaaagaaattgggctggactctttcagattctgtatctcatggtcaagaatattcccaaagggcaagggagcaattaacccccttggggttaaat

SEQ ID NO: 61585 - DNA, 974 bp, Arabidopsis thaliana landsberg
gcaacatcggtggcaagtttgttaatcttccaaggcacatctgcaggtgctttaactatatggcatatgttttccctagaatgcatttcaaggtgtattagtagaaactagaaagtaacaatttgtatcatacctttcaatcttataattaaaatttagtcgcgcttttgagttacctgtgaatggtttcaacaacgggataacaaaccatagaaccatctctccccctagccacaataacagctaactcctaaaatttgatatgcaaccgattatacatgtcagagctcaataagttactaaagcagataaatttgtcatcctaccttaacaaaaggtgcccatttctcaatatacaaaccacgactgaaacctccaagagctggaaaagagaaaaaaatatcgaggcaaacgcagggaaacaaagattacactgtagagctaaaaagtatgtctaggatatctactatagacataggtgtcagggcttaataccaactttagaataaatgtcaaggattgtctcagaacactattgctagtttcacatgagcattctggttcatgtaactcacaattttttgttttctcgttgactgtggcattgtacacgattaactggtttaactgttactagaaactatgaaaccacattaaatatggttagttaagggtttacccgttacagcagaagaaagctcatcttggttgttggcaactgcatttccacgtccatcataagccaatcgtttgctcttgatcataagagggtaaccgaaaagttcacctgcttttcttgctccttcaatatcgcttatctgatgtggtgaggtttaggggtaaaaacaattaacaaactcctcatgattcatggagaacttaatgagtgattctttcaacaaagtataaacaagggcctaacaaaaataaaatctggaagtgggatgccatgctgagagaaatgaacgttttgc

SEQ ID NO: 61586 - DNA, 1631 bp, Arabidopsis thaliana landsberg
  unsure (1)..(1631): unsure at all n locations
cttgcacattggtttgtaagatctcacggctcagtgtttatgtggatattctcaggttcccgtggctccattgcagagagcaaacgcccctccttctcctaataacatccaatggaaccaatcacagagagtttttgataatcccccagagcaaggaatccctaccatcattacatggaaccaaggaggtaatgatgtgacggtggaaggatcatgggacaattggagatcaaggtatagttgactttgtttctcgtggaccctctctcgagatttcgtgatatatgttaaaaacatatatgtttacattcaccaggaagaagctgcagaaatcaggaaaagaccactcgattctctttgtccttccatctggcatataccattacaaggtgattgtggacggtgaatccaaatacatcccagatttaccctttgtagcagacgaagttggcaatgtctgtaacattctcgatgttcatgtaagttactttcccacctcttttttctcatgttaaatctatcaatcagcttaacagtatctgcaatcattatgcatgcagaactttgtgccagaaaacccagaaagcatagtggagtttgaggcgccaccatcacctgatcatagctacggtcaaaccctaccagccgcagaagattacgcgaaagagccactggcggtgccacctcagcttcatctaacacttcttggcactactgaagagacagccatagccacaaagcctcaacatgtggtgcttaaccatgtgttcatagagcaaggatggactcctcaatccatagtagctttgggtttaacccacaggttcgagtctaagtacataactgttgtcctctacaaaccgctcacacggtaaccctaaaaattcagtgccacattgttctctctctttctttttttttcatctctcaattatgtgaaaacatgttctttgttcatagtgactagtgagtgcccaacatttgagtttattaacctctttcttacctggtttgtggtgcttgtgtacaaagcttctctcattgtaacgattgttgttttattttctgcaaaaactgtaaaatacattcgctaataatggctataagaagcttatctgctagcaaccaaacacataaatcctgttttttttcttcttctgacaaaacgtttgcgaaactgacaaatttttgaaaataatcattctttttggtattggaaaaggctaaccaattagaaagtgtactcataaatccacgtcgtctatttgattgaaaattttaatttggataagaaaaagataaaagagaaataaggtgagaaaaagtgagccacacgatggagttggcggaagaagcatcgaccgagtaattgagacgctctgtttccaattactactctctcgagctcctccgctctgcattgtcgccgagagttcctttcttgtccgacaaactacttcttctccttcgataagccaattctgcgccatagatttttgaaatctactgccggaaaggctgcatgcgatttcaactcccttttccgggacaattgagggtgtgtattcctgaacttncgttgtactatactactattccatgttttacttcgaacgaagaatcaatcattc

SEQ ID NO: 61587 - DNA, 1690 bp, Arabidopsis thaliana landsberg
tgttaattgtacgttctcactaaataacaaattgtcgatcaatgttatttataaaacctcagtgaccttgcatgttggctttatgtttccaagcctttgtttttttttctatgatgctttcattaagttattcggaccaactaatcattgcgtttaccagttaaacagtataattaattttaggaaaacggatactatttttagtctttacatttgcatgtgtagtatgtgcatatatataactactaatctaccatcagtttggttataaggatggtggaaacaaacaattaaacaaatgaagcatcatcatatatataacatagtctacaatactaaccactttgttaacttagattttatttatgaatttgaatttgaaaatgaaaacagtatatatgatataaaagtgaacatggcatctaaatgaaatgatatatgaatcggcgttggcgtgaacaatattagattcaacgaaagtaggcgatacgaacgtgacgggcctccagcattttgtacagtcgctgacgtaagcaacgtgatctgtggttgtccttatatggaacgtgcagtacagataagcagaccttgattttcatttacaaaaataatattgcatacaataattaacccaaaaaaggcgaaaaagaaccttcaaatagagtctttaacgtatattttaattaaggctagtagttcaggaactttaaaagagatgagacatgaaaacacaaatagggctgagagtgagacgtgtgtttgcttatctttcgtaactatttaattggttactagttgtaaatttgcattagatgatattggacgtgacttatcttgaattattatatggtaatttggattcaaaatcctcgtccatgcatctacggtgatgtgtccaacgtaaaacaagttatatgcaatgtaacttttggatgcatactagaaacacaaaagaagtcatgcaatgtaacttttgaaatttggttatgtcaaagattgatttccactgattacacttagtacattgtttagatagtcgaaaatttatttgactgcagtatgtgaaaaactcttaactttgacttcacgagatctattaaacaatttgaagcaggcttatttttgttgttgttatgttagtaagtcaaatgctgaaaacataaaccattttgtataataaaaagtttatgaaaaaataaaaaaagtttatgaaactactattaggaggtctcattaccccgagattagtcaaccatttcaagaatctctggtgctagttttgtttgttctgttttttgcaaaactgaaagtcgcaataatttgacgtctatctatgcagtagtaatttagtactatcctagagcaaagcaggatggaatcaatttactaaataagattataggaccattaggcccaaaagtgaaatatggatataattattgggccgatcatggtgctgtcatggaaaattcaagataagcttttttaacaaatgtgccagtgacaatgatgaggatgaagcaacaatataatgcaacactgtttagtcatgggaacccatcaaagtatcgggaatcacatcacacataaaagtcatttatctctataaaacttaaaaaacagaaaaaggaattattagttttactaaaggttctcatatgaaaagtaagtaaaatttatatagagttta

SEQ ID NO: 61588 - DNA, 425 bp, Arabidopsis thaliana landsberg
  unsure (1)..(425): unsure at all n locations
cccnnnnnnnnnnnnnnnnnnnnnnnnnnnnnnnnnnccacgcgtccgatgngagtaaaaatgcagcacctttaccattggacacaccaagttcatcaggtgctttaaggaacagaactgagcctttggaaatcaaagaagaatatgctcaatgtagtgatgaatcattggacctcaacaatgagaagattgggggtcctgcatcccaggttatagaaaatgcatgcacaatcacagctaaagtgggaaatgatggagttagaagtaagcctccaggaaaggaacagcaggttattaggcaaaagaaccttctgaaaactcggaaaaaatcacaggtaaaacaagaggagaataccttgcaggatttctatggtaattggtctccttcagcagcaccagcaaaacaatttcagaatcaattggca

SEQ ID NO: 61589 - DNA, 550 bp, Arabidopsis thaliana landsberg
cataaccctatatataacagcatatcatcacgagggtttggtttaaaccggactgcgacaaacgtacgtagcgggtgcataattgacactgaaacacacacaaacacaaaaaccatgtaagtatcaataagttatagcatttgtaagtaagtgagacaagacagcttaataatatctatcttctccgttctccactatcacaatcacggtcacaatcacggtcaaagtgattagtatacgtgcagagagatttgaaaatccaatctattgacctgctttattgcctaatctacctatttgattctgtaccacccgacataaatcactctcgatccagtcttctcttttgagtgtttctatttatttatactatgtaaattagttttagtttcggattataacaaaaaaaaaagattttaatttttttcaaagaataatttataattgctgtgaggttttgtttgttatacgtgaaaaaaattagactgttgacttaatatgtgtcacattgctctgtgtttcagcaatagcttttgaatgaccggtttta

SEQ ID NO: 61590 - DNA, 787 bp, Arabidopsis thaliana landsberg
cttgacttcctccgtcgtcgcatattgcacctactaacattttttctcttctttattcttccaaccaattgtagcctatggtcttttgtaccaatttttcaaaagttgtagttggtagaggttttgtgaacaaatctgtaacataatttattttctaacatagattgcatcgttttctgataaagatcatcaaattgtggaaatatgtagtttttttttagttttttttttttgggcggaaatatgtagtttattatcctacttttgatgacattttcctttattcaattgagctgtaactactactttattttatttttgtattgtgttaagttgttgtatagtctttatcggagattacatgttctccgaacttatgtaacagcaagcattcacaatttgtctcattatttaccaaaatttgtgaatagataaagtggtaacaaaagtcaatgtcctggagcaccattaatagtagaaccttcaaatgacggtagataacttttaatgaaatcccttttgggttttgcattggatgagataaagtgatatatgtagttaataaaaaggatcccttacaatattgtaattttggtcccatgtttggaggtgagagcaaatacgtatcttaaggcatacgtatcgcaaactcatgtcattatccaaccacaatcgttggcgacatatctttgtttaataataatacatcaggcttgtgtttgagtaaagaaaatcctttgacacgtccaatgtaaactcttttagacgtttttttagtcctactctg

SEQ ID NO: 61591 - DNA, 506 bp, Arabidopsis thaliana landsberg
  unsure (1)..(506): unsure at all n locations
nnnnnnnnnnnnnnnnnnnnnnnnnnnnnnnnccacgcgtccgactacgcgtccgaccacgacataagagacaacgaaaacctctccattgtgcaaatcgtggacaccccaaagaacgttccgaacgggttcgggtctactttcgtgatggacgatgcgatgaccgaaggaccagagctgagctcgaagcacgttgggagagcccaggggctgtttggcttggcctcttttcaggaccttgggatgttcatgctcaccaatttcgctttcaccgaaggagcttatgctggaagcacgttgagcatgcttgggaggaatcccatatcggagcagaatagggagttgcccattgttggtggcactggcgtgtttagatttgacactggctatggccattgctaataggcgttaattccgtttttacccctcaacatttttgttgctgagtccaatgtacaagtgtggcatggctagtgtgttttttttttatttttaaaattaaattt

SEQ ID NO: 61592 - DNA, 764 bp, Arabidopsis thaliana landsberg
gacagctattttcttctctatcttatctccttgagttatttttaatttttttttgtccaacggagtggatataacttaagattctctgtctctatcaactaatgcttgatttaccaacaaatttcggaaaattgatagttttagaattactcaatttatatgtcgactacgtggaaattgcgaacacgtaacgtaacggatccaccgtgaggttaaggttgttttctagtgtatacgattcttgagcccaagtggggtaaagagcccatgcgtcacaaaacaaacaaaacgtttcataaataatacgtgtaagtgggaatggacacaacatcagttggtggctctcaacgtttctcttccttcgttagtttgactctactttttctcgttagtttgcgtaaagtaggcttctaagattagttaaaaaaagttaaaaagttaaaaacctagagaccattctagattggtaaataactaaatatgatgtaaagtttaagaccaaaatggcaaaatactatatacctaatcatccagtaatttctaaaaagtttttgattgaataagaaaacagaagagaaaagtatttggtttagactttagagttttaaggactgcaaggattttactatcgaactttctagttcaggtaattagatagtgatattattgtgttcgatatttcaatgacgctacacaaagaataattcgtctttttttttaaaatatcgttattgtacaaacttcatacgaaacgaagaacacgc

SEQ ID NO: 61593 - DNA, 585 bp, Arabidopsis thaliana landsberg
ccttgtggtcaagcaagtttttcgataagtaaatggacctaccggttagggtgattggagacatgaaccgatgggcttaaaagttcttacgacttaagacttaattaatttaacctcttttcattggatcacaacttcatggtctagacaatctgatgcgccttgtatttatttattcatcatggagataattaaataacaacttgtgtagctatttgtttccctggattcttcttactctcttcacttaaccatatgagtgcacgaggaccatgaccttaccttcttaaacgaaacatcaccctgcctaaaagaaaagactgctttcgatttttcaaaatcattaccatatcttcacttttggggactgcatgtcttaaaccgtaaaacatctataagattttcttaagcgttaatttacttcaccaccacacatatatcgaacatgagtacagtatattaaaaccggcatagatagcaaacttaaatttgcgcgagagagcatatcaagagatgagggagatatggagattgtgaaggaaaatataaggctttctttttgccaccggagcgtgacgcgatgtc

SEQ ID NO: 61594 - DNA, 476 bp, Arabidopsis thaliana landsberg
  unsure (1)..(476): unsure at all n locations
caggtacctgtccggaattctcttgtcgtcccacgcgtccgatccactttcttcctaattctctcaataagggttttacttttttgcttaaacccgcggccatggcgacgagggcagcagtggcggcgccgcgcgtttttcggcggtttttctgcacaaactcagcctctccttctttccccttcgttcctacgccgcctcctggcgccacccccactccaacttgacccacggcggagcccaaccccaacctcttcgtctctggtcttagcaaacgtactactacannnnnnnnnnnnnnnnnnnnnnnnnnnnnnnnnnnnnnnnnnnnnnnnagggttgtaactgatcgagtctcaggttactctaagggttttggttttgttcaatatgctacaatagaagaggctgcaaagggcatttgaaggcatggatggcaagtttttggacgggtgggttatatttgcatagtatgc

SEQ ID NO: 61595 - DNA, 509 bp, Arabidopsis thaliana landsberg
ctacattataccgttggttttcttgtgttttaatattctgttagggttggtccaagcaaactttattacagcattgagttctaatcaattaggcgaagctttggaggaaacatctgagaggatccctttcaaattcgctcaaacaaagttttttcatggtgtcctacaagtcagtgtccgaagagagttcctcacctataaaagaggttccagatgaagaagctccatgtgatcaattcaatcttcagattcaggctgcatctcagcttcacggtacttaagatgtctgatatcactgttggcaaaaccaatcgcctatatgcaatttacacgatggctttatccatgtctcagtttcaaacttacgagtactagttgattcacattgtatcgctagaagattagcatttatctaaatgagaatctgacgcgtgtttcccatcttttcgcatagcataataatctgtatattcatatttctctatcatatgagtatatctcgctgacga

SEQ ID NO: 61596 - DNA, 487 bp, Arabidopsis thaliana landsberg
  unsure (1)..(487): unsure at all n locations
cnnnnnnnnnnnnnnnnnnnnnnnnnnnnnnccacgcgtccggaatcatcacttactggaagcctcgttgtgagtaagagaaatggcttcctgcaccgagcacaccaacttgatacctatgattctttctttgcttagaattccacagaatatggagactgttcttttcaatcactccccacctttggaattcaagggtttgagcaaggaggaggaagactcattgctagggcaagtggaaatatggaggtacatgacatgcttcacggactccgtggccttgaaagctgtcatagagcttcgtatagcggacatactagaccgttatggtaaaccactatccttgtcgcaaattgtggagaacatagaagacgcacccttcccaaatgccttatttttccagagannnnnnnnnnnnnnnnnnnnnnnnnnnaacttcattgcacaagattcagagacaggagaaaccctcttccgcttgacacga

SEQ ID NO: 61597 - DNA, 1493 bp, Arabidopsis thaliana landsberg
  unsure (1)..(1493): unsure at all n locations
tggcacctacacctgtcatgaaactttctttgaagaaaacttggttaaccaaagttcctatatatagctgaatgtagaaagtatataactctgttaaaacatcgatgaaccttagcgatctctagtttgataggtaccgcgtagaatttacctgactaggttggctgttttagctgtatcatgaacaagggactgcgaagctggagaaatgattgaactccatagcagattcgcataggagagattatctcatctcctgcagaaactttagtgcaaggcgtatgcaagtcagaatttcgtaaaaatggtaatggagagtttgagtcaggtggggatcaaaatacttctgccccaacaatatttccttccaatacattgaggatcatatattctgaagttaagtgggtaaggctagttacatacctgaaaggaggaaactttcgacgaagatttatgattgatgtgcttccattcgttagaaaatcacacattgtctacgtttttttggttaagaaaccgacacgcactataaatctattgtaactccccatagccaagtgtgctcgagatgtcatgctggttctaggaaccaaaacagaaagaggcaataaaatcagaaaagagccaataagacaacaatgtaatataccgagaagattaaaacgacttgagtaaagcaactaactttctatcgaaaattcaggaatactttcatatatagtgacaatttcatgaagcaaattaaataactatcaccatatgcaaattaatctatgaaaagatctcacagtcacagattgatctcaaatgacctcgatacatcgcattgagatactacagcaaaaagccaaaaagtcaaaagtatatactttactacgttaaaacaatattcaacatcaaaaccccaaaacatatcaatcagacaatgaaattacaaaactgaaatcatatatcctcaaatcggtcgtcatcaaccatggttacactgaattagaaagtgctgctacatagaaatcgaacaatgaagctcaccgatagagtaaaattaggcatgcttccatctccgagagctaaaatcctagagaccaccactctctgccgacgctaaaggttgaagatgaagaagacgacattgctttgacgggccttttaaaatattaaaagagagacacatcaatacctcgtggcccatttatatagaccccgcttaattttgtctgattgttgactgttgacttttagggaccacatgaaactattaaatgacttttcggatttcaaatattcaattgagagatatttttttctgttagtttcccttaatcatcatcatnnnnnnnnnnnnnnnnnnnnnctctctttccttcgttcctctttctttacacgcttgaaaccctagcaattccattttcgtttcctctaatagaatcttcatctttttttggcgtaacgttacacgaatttaaacatttaggtttttttttttttttttt

SEQ ID NO: 61598 - DNA, 1853 bp, Arabidopsis thaliana landsberg
gagtttgtgactgcggtttgattttgtttgaacagtcaatgtagagctcttgcgaatcgcattgaagtttcggtgtgctttgacatgagagtcacctgagccaaaaggtgtgaatcaagaagctgctttggttcagtttgagtaaactctgaaaatgcaagtgagtttccatatataaagtaatctaacgatatggagaaaccctcaaatacacaggtctctaatcatatgttggtccgttatatcagtggattttcgtatttcctttacgtcgatttgctatatgttgaactagtttcagactatgaacaaactatgatctcgctaaaatgttaaatacctaacggaaattttgaatactaatcgaagatacgaggataaatttgaatgagtaagcaaatgcgaatcggcgaatctttctctctcgggttactcagaaatttgagttcaaaacgaagaagatagaggaagcaatgaactgaaaactggagaagagaaaaaagcgattgactacctgagaaagagataggagctgctaccaaggacgccattgtacatcaaaacgaacaagagatctgagaagagtaacatacaagaggaagacgaacacatacgccatttgtccacccgaagagttatctattttctaaaaaatatcccttaagagttacttatttcccaaaatacactcaaggaattacttatttgctaaaacccttcctattatttgtaattcgcaaatatgacaccacaacatttcactttcgaatcaactgcttcgatgaaccgatgctatctcttcaatgaacaagattcataaacagaagagagaaaagaaattagccaaaacacactttagcttaagcagatcagtcaagtcaaccaaaatcaacatcttgtcatatgtcttttgcccatcgccgtaatatgtacaaacaaagctgtgattgggtcttcttcatgataacaaatgaatcaaaattaagagacactagtttggttactttttaagatatgtttcctatgaggacctgtcagggaagtctctaacgaaaaacaaacaagtattcacattctgcttcttcttgtgttcccatctagacgaatttccttgaagcaaatttatgaacagatgtatccctcctgacaatgctacatccagtttctactcctgtaactgtcttcagctttttattcgctggaccttcacacagcccttctttattcagatcatccacgttcactctctggttcatgtcggcggatttcactgtcccaggccctgtcaatgccaaaaacagacgattcgtgaacacagctaaaagtttttcctggtcagcgaaattattctcagagctcgttacagctgaaagcaaatccttttgattacctgccgtcttctcatacttcaactgtgggctaacacctatctctccttcctcagtttctacatccacttcaccttctccatatgaaacagagaatgcattctccttctcagtgccactgcacgctttaccctctttagcatcctcctcctgtttcatatccatgaatgcatcaatatttgcatgatgttaagatagacatagcaactgtctagaaaactcgaaactaaaacagacctgagagtaagattttttttaactagagcggaaaactgaatggccaatgtaaattcagagaagaaatgtataattagcagaggactagaagtctagaacaacccaccttcatacacgattgcattctgctcaatgtgcgatcagtcaaagactttttgttgcttggattctcatggcgaaaggtatcacgatttggcgaaacacaagatgccgggaggggtgtgttct

SEQ ID NO: 61599 - DNA, 421 bp, Arabidopsis thaliana landsberg
  unsure (1)..(421): unsure at all n locations
nnnnnnnnnnnnnnnnnnnnnnnccacgacgccgcccatgcgtccggtgaatanttctatactctaggtggggctgtttgggctcaacaacatgacaaataatcggcgactcggcaaggtacatattacatagtgctggacgtacgctttaatatactttaatttccgtgcttacaatttaattcaatttttcaatatagtggcgcctcacatgtcaataaatcataatgggctttatagcctcaataatttaaacaaaagggctatcgatccaattgactgcgtgaggtagatataggagcatagaatggtggtatggtttcgtaaggaaaagggtgtatctactcgaatgtatacagattaatgtgtttggggttagaattgaatttgaaagaaggtaactattaaatgatgccttaaa

SEQ ID NO: 61600 - DNA, 575 bp, Arabidopsis thaliana landsberg
actctcctgagcttgttgatgtagctgaaaacatcagctcaagaacaagtggagtttatgttatccgaagacgaaaaggtacggttactgatttccgaaaaggaagtgaaatccgttgtgagattatgtatctcaaatgttatatcgaggttattggatagattatcatcattgattgtgattcttcctgaatgtactgaatttactgttcttaaaacattatatgatattgagtggttgcgtaaagtattgccaaggattgagttgatgaaatatcttgtctttaagtggaccgatgcatcgagtgaaattcttgtgattgctcacaagtgtgagctggattctaggatattgggtgtgaaggttaagctagttgatgttacagggaagattttaaaagcggcctagttatggaattgtgattgttccttctaaaagcaggacttgtcttttgaagatctggctgcctctcataaggatattaaagactttggttgatgcagagggatgtgagtatgagcataaaatggatgaagtatcttgtgaatttatagaaagatctatggggtcttttg

SEQ ID NO: 61601 - DNA, 1152 bp, Arabidopsis thaliana landsberg
tttgttatcaactgatcagattccaggacatggcctcactctctgattgattgactacgatatctgatgcgtttaaaattgttttgctttggtttcttctttagatgttgtgatgttgattgattctggtttgaatattattctttcattcttttttctatttttcttctgaagaatttgtttgttatgtcttttgagcttttggcctagtttggttaagttccaacaaactgttcattatacatgtacaaagtagaaacaagcacttcacaatacacaacctctacttcttataatttgaccatagaaagaccaaaaaaatcgaatgtaattgtgttattggcagtggtgaaagtgaaattacaaattacaaaaaccaaaatttcaaagtaaaataagactaaactcgaagtgacacaactcgcgagttcgctcgttcgtaaatggcgcgaggtctgtctctatgctccaatggaagaaagtcttcgactttactctcaaactccatccctagggtttcaatttccttttctcctaaaacccttttcacttgttcatatccacttcaatcccgccacccagaattctcacaacgattgttctgtaatcacgcctgtgtcccggagactgtggacgaaacgaggtataaggagcttttcaataagagaatggatatggcaggacttaaacctcacaaccgaattggtaagtggctaatttcaattccaattggttccactaaaccagaaacagtgattggataaaattgtgttgtgtgttttcagctttgggagtttcaggtggtcctgatagtatggctctttgtgttctaactgcaaaatggaaaacacaaggattaagttgtgttaataagacagatggttttattgatggacttgttgctatagttgttgatcatggattaagacaagagagtaaagatgaagctgaacttgtctgctccagagtttctcaaatgggtaagtttttgagtaatgaacatttgaagtaacctttttgagtatgttttagtaacttgaggaacgtttataggaatcagatgtgagattgcaagttgtgattgggttgatggtagaccaaagctaggtcatttgcaagaagcacctcgtgaaatgaggtatgagatgattt

SEQ ID NO: 61602 - DNA, 104 bp, Arabidopsis thaliana landsberg
tacgaagatgaggaagatggagaagctaggggcggaggaggccgcaccaataaagggaaaaagaaagcgaaaaagagcggcgggggaaaacaggaaggaacaca

SEQ ID NO: 61603 - DNA, 393 bp, Arabidopsis thaliana landsberg
  unsure (1)..(393): unsure at all n locations
nnnnnnnnnnnnnnnnnnnnnnnccacgcgtccgcccatcgtccggaaaaacaaaagagtagtggcctttaggttgtgaagaacaagagctcaaatcaaatcgcatcgaaaaaaaaaaaagaaagatcatattcatggcgatggcaagcctggctcgacggaagggttacgccgtcgttttgtcgtacaggtcgtcgttttgtctgacacgctggaggggattcgcgtccggatctgacgaaaacgacgtcgtctttatcggcggcggtcccggcggctacgtggccgacatcaaagcacatcagctcggtctgaaaaccacttgcatcaaaaagctggcactctcgggggaccctgcttaaacgtcggaggcattcctttacaaggcacttc

SEQ ID NO: 61604 - DNA, 314 bp, Arabidopsis thaliana landsberg
ggtggggctttgggggaaaaaaaagccttaatcacctttgaggattccaaaaatgaggaaaatgaaaaacctattgccggtggaggccgtattaataaagggaaaaagaaagcgaaaaaaaccggtggtgggttagaggaaggatcacggggcacccgtgttaacggtagaggatggagatgttgccagcaaacgcttgttggttattctctttgtgagcatcatctcggaaaggaagggaaggagcatgaacaagagtggggtggcgtggcggcgaaaaaagcggggtggtggaagtgaagacaataagaacg

SEQ ID NO: 61605 - DNA, 1616 bp, Arabidopsis thaliana landsberg
ttacataaaaattaaaagttgtaagatttatagtaattataaaaataaacaattcgtaatatcaacagaaagttgtaaaaataaaagtatttattataaatatatatatatgtgtatataatctttaaaatgtaaatgagaaaaaaaaaggagtgagggagtggattaggatacgagtggcattttctttcctttttttcactatatactgaaaatacacgttcatgtgattttcatttttcaatatatggaaagaaacaatattatacgctggatatcttttaccaagaacatgtgtaacagtataatttcaaaaagagggaatttaatatatgatgatatcaattagtttatgatacaacgaatacttattttagacattaaaagtttgacttggcacatatttcgtgatattttttactagtttagcaaattcaaccatatcgtttatagaggttaaaaataagaaaacaccaaatcggaaataaaaggttatatacttaacaataaagcgaaacgacatgatattttatgattttctccacattattttttatctgtatcttataaactaattagtattggagaatatcatcatatacataagaatgattcaatcattcaaatcctagaagaagatttcaattctcaacaatctgtaaaatacatttttacatacattatcaccgcttacatacatttagaacaaaatttaatccattgaacaactgatatactacaataacggttatattttatatcagtcagttgaaaagcttcgtttaaaaaaaaagagaggttaaattattgttagacaaagtgatattacactaaaatgaacattatatataatctattttcatcaacaacacaaaaatatcttccaatcgttatatatggatgttgttgcatgactttttcaatgtatcttagatttgataagaggacatgtaaataagttatcttcaacttttattgcagtaatatatatttgaatcactatgtcgaataattattgtcgatacaaacgaacaaaaagcaagtatgtatgatcgacgatagaaaaatacattcccaaagggtgacttgcgatccaagatttctgcatagagatggctcacaatctgtaaacacgtaactgataatcgaatcctgtatactatacatacaaacatgtatgtgtctaagtacatacaatctaaaaggcttcagccttcaagaagagtgaagatccaaggaacaagatcttggccaactatgctcctctgacgcacccctaacctgaagaacacggcaatataaaacaagtgtcagtgaaagctgtttacgtaatatgatttttttcagcatagagttttggaaacttgttttaaacctttgatggtaaaggaggcaaagatgctcgtctcgtaagctcctctctttcctcttgaacagcctttaatctttctcttaacaattccacttcattttcaatctttaacctctcataatcaaccgcagacatcgattttctccttgaacccgaaaagctcagcgacttcttgcgtggacgacataagggaggtagctttcgagcaatccccgagacaatgatactgttttcatccaacgat

SEQ ID NO: 61606 - DNA, 605 bp, Arabidopsis thaliana landsberg
  unsure (1)..(605): unsure at all n locations
acatatgcattcgctgatgcagtctatttgattaaccgaatgccaacagaagtgttacagggtgtttctccatatgccaagctttttcaaaaacctccgaattacttaaagctaagggtttttggctgcttatacttcccatggcttcgtccatacacgatgaacaagctcgacaatcgctctctcccatgtgcgtttattggttactcattaacgcaaagtgcgtatctgtgtctcgacatcaccactggccggatatacacgtctcgccatgtacaattcgttgaaacaagcttcccgtttgcaacatcaactccggctccgactgaaccgctctcggaatcaagtatgccacatatagctcattcgccgctcccgtgctcagttcttcacccgtcgcaaccacaagctccagaatctgtatcgccgttgttacctccttcgccaccatcgtctccgatgttagctccgttatcgtcgccataaccagagttgttttcctcctcgtcaaatcacacggatgctagttctcctcaaactcaagcccaatcaccacaaagtccaataccatctgaaactcaacanaattccaacagcccaataac

SEQ ID NO: 61607 - DNA, 329 bp, Arabidopsis thaliana landsberg
  unsure (1)..(329): unsure at all n locations
nnnnnnnnnnnnnnnnnnnnnnnnnnnnnnnnnnnnnnnnnnnnnccacgcgtctgataggactctcttttccactgctcaaaccaccatagtgattgattccttgtacgagggtattgacttctacacaaccattacccgagcccgttttgaagagctaaannnnnnnnnnnnnnnnnnnnnnnnnnnnnnnnnnnnnnnnnnnnnnnnnnnnnnnnagatggatataagtaccgttcatgatcgtgttccttgctggtggttctactaggattaccaacgttcaacaagttgttgcaggaacttcattaatcgtaaaggaacttttg

SEQ ID NO: 61608 - DNA, 499 bp, Arabidopsis thaliana landsberg
  unsure (1)..(499): unsure at all n locations
nnnnnnnnnnnnnnnnnnnnnnnnnnnnnnnnnnnnnnnnnnnnnnnnnnnnnnccacgcgtccgtcttctcgtccggcagaattcatctgttggtggggggccatgcccccgtttacccgcacagcagcagcaacaccacctacaacagtcctaattaagtgcaaaggctttactgcaacaaaatcattcacagggttcccaaggaaatcaagctctgcagtagcagatgatccatcaactactgtaggagatgtcaaatcacaacgggggagtgcaaccacagtctcttggtggacccagtgcaaatatggcaaagaatgcactggggtttgggggccattatgcatccttaagtggaggttctgccaatgttacaggaaacactggacctatgtcaaggaatattagcttcaaaacaaccgcaaatagtgaatgttctgctggtggtggtaacaatgtattaaaccaaagaacatctgagatgccccaaaagttac

SEQ ID NO: 61609 - DNA, 1576 bp, Arabidopsis thaliana landsberg
tgatgttcatcccctgctcatttattggccttgtaattccaagagctatctctgatcgtgtctcacattttcaaggtgtttcatccaagaagattatgaaagttgtaagtcccttattctttcctcttgtctcattagcttccctgtctattactagaaaatgtcttctaactatgatcttttaggaaccatctgatgaagcaaggttttggggagcatttgggttctatgcttttgcaacttcggtatgcactttttgttttatcggttattttacctcagaatttgttgtttgtttgtctgatcgttgactaaccggagaaacgttttcaggcatattttttcgctggattaaatggaggattcatgacatttgtcatctccatttctatgctactagggtggattgctttctgtttgtcagtcaagtcctatggctataattcgatcaagtaagacttctagacagtacctaacttttgtgaagttgatgattagtttaacttgaatattccttttggatcataggacatatctttagccaataagatccttgtttatgataaagttcatttcatccaggtctcccatgttttatgtgatagctcttgttccatgccttctgtattctctctattttggtggtattcttacactattattaattgagaagacgggaatgatgggagcaattccaccaccttatggttagctttactgaactcaattctttccaaaagcatctctggttcagctaaaccgattgagaattttaccattaaaacatttaaatagcttgttgtgattgcaagtctggctttcactgtggagatgtttattgtacattattttggtttgcaggattttatctagcagatgtagcagtagctgcagtcattggaatcgtcaccggcttgtgtttgggtccaataataccaatttgtgatcgttggctggccaagtcgtcgatcttgaaattcttgcttcacttcactgtagtcatgttggcggtatcatcacagttctttccttatagcaaagatgcaccaaagagagttgtactccaacacacattcatctctactggtagcgttttctcacacgatatggaactgttttcgcctttcggagtaatcttcgtctgctgaaatgaagtaaatgtttaatgtgcctgttgcaggtggaaatgaaatcacaggctcaagttatgatttagctgtcattgattcaaattctatggagttcatttttaagcatgctccggaggtggcaaaggaacttcatgttggcccttctttttcattgggaaacgctgaagcgtctcctcaagaagcttggatggtacgttcattagattcgtttctatgtacatgctattggtaagatagcaagtgttttcagttttgaagtaaagaattgtttggtatctgcaggcacttttccctatttcatgtgtattaacaacaaacgggaggtttcctgctaaagccaacaatattttagaacgatatagccaattcccactcctacaagcgcatataccgcaaacaacatttgaaaatggaactcgcagagt

SEQ ID NO: 61610 - DNA, 620 bp, Arabidopsis thaliana landsberg
ttggattttgcatcatacctatttaaccttccaccggtcttttcgttttttattctgtctatttcttcaattattgcactaaatcgctcaaaatctaacttgggacaaaggtgtccaatacttagcgtgattcgtcttacatacatttaatggtatcttcataacctagaatcccattatactacaatatatcggttatagtatataacatcaatataatcaacaattatatatatatatatatacgagtagcatcaacaatgttattgctgcgaaagtaggcgaatctcttttattccgtgttttagatgatgtctagatttcatatgaccacttttggtaagcatattgtgactccacttttacttttgtactaaaatggtatatttgttatttctattattaagctagtctagctatttacatatgtaagaaactaaagattgaaatgaacacattaagttctgaactcgactttttagcagtagaaaattgaagttcacaaattaaaattctttagttaaaaagcaaaaggtaatttggtaaaacatcactttaaaataaaaaaaaatcataacctaacatttaaagggaaaaaaaactaacaaattttaatactt

SEQ ID NO: 61611 - DNA, 557 bp, Arabidopsis thaliana landsberg
agtattatattgagaacaacaagcaataagttaaacagaaaaatcctaacgttcttatttttttactgttaaataataattttgacatattacaaaattatgaattaacctaaataaatagaattaattctctttttgtacgatgtagagagatgggaatattatatacccttttgaaataaagacgattcgaattagatttcaaattaaagctgaagaggtcctttttcgtcattttggagtttctttttgagacatttttcctcttttgattttcgctttttccgtccgcttgacttctgctgtttcagactctcaacaacggagagagccggagagattgaagaagaaaggagaaatatttgcgaacccccaagaatcgtttttgttgattgattctctcatggaaaatctctctcattctcggaatccaaacaggtcttcttcattacctaagaaaccttacaatggcaataacaccaccggaggttttagctacaactccggcaaaacggctaatacaaccaccactactacatacgacgacgtttttggtg

SEQ ID NO: 61612 - DNA, 491 bp, Arabidopsis thaliana landsberg
  unsure (1)..(491): unsure at all n locations
nnnnnnnnnnnnnnnnnnnnnnnnnnnnnnnnccacgcgtccggtgngtggacatcaagctaagaaagggaaagagaaagatcacagaaagagaattcatctttctttgcgaacagctaaaaacctcaaagggaaagaaggcatgaatagaggtgttcttcagagctcaccagtgcaacaaatgatgactggaaaccctaactggtggaacatcaatatcaatagcatggctccacaagctcctcctttcttgtccactcctaacaactttcctatcccttgtgctcccacttctcttccctttccttcttggcatgagaatcaagatcttccagagtcatggagccagctacttatgagtggagtggtggatgaacaaggttaggctgggatgggtcagtttattcaaacttaaaagttggagagcttggaggatcannnnnnnnnnnnnnnnnnnnnnnnnncttttgttgatgttaaacaagaaaact

SEQ ID NO: 61613 - DNA, 603 bp, Arabidopsis thaliana landsberg
aagaattgcccactgtaaatgatattgaaatagtcccatcggaatataagagtgaagaaattaaacattataaagaaccaattaatggcttttgtggtgtgtagtattgtgtccacaaatatatgaatggtcacgttggtttgatatatccaaaacgatgacatttaaatcggggaatgtaagtaaagtacgtgtcataaccaatagttctaaagtggtgcatgcaatttttcgtcattacaaaacacgaaatttgtttctagatgattggaacaccaaatcactttaattgcttaagcactttgatcgtattcctaactaagacattaaccacgcgttccatgtgcatctactcctcagtatatatggtttatcgtgtaaattaaaacttctttttttaagtttgtttataggctacataatttttttactgcatataatattaattatctgtaatatataagaatcttaaagtgtttttatttctaagtccccttgggaaactttgtaattattttaccattttataattgaaatgctttaaatttttttatttaatactgttttttataaattattatattttattcatttcattttttt

SEQ ID NO: 61614 - DNA, 420 bp, Arabidopsis thaliana landsberg
  unsure (1)..(420): unsure at all n locations
ccccgcaggtaccgttccggaattcccttttcgacccacgcgtccgccatgcttccgcttccttaatctctttgtttccgcctctattttccttctaaatctctggttgctgcggatcccaaaacccacttattggttcctctgcaggaatcaaagcatagtctattattgttctgaaacttgannnnnnnnnnnnnnnnnnnaaatccctctctcccagtttattaggtttatgataaactcctccttcagacgcaggacccacttggttcaatctttatccgttgccttcctctactggttctatgtttcctcattgacctccactttcccgtcacatgatctgatattatagataaggtgtaaactattattgtctctgggtcctgccgaatatttgttcttcaatttttttatatg

SEQ ID NO: 61615 - DNA, 1261 bp, Arabidopsis thaliana landsberg
aaggatagaacagagacgacggttcaagatcttcaaatgaccagaatgttttaatgttagccgttggatcttaccgtgattgggacggctgcgatctcgaaatgccagcatggcagaaacgtcactttcttatggaataaagccactgctcaatgtttagtcacatatattattattatctgtttccctttttttaatatcacatactattataattatcttattcatatattctatgactacattttttttaatacaagtctatcatatataataattattgatttcttgtgcccacccaaaaacatatgaatataatatgttcattgctgtatttttaatattatttcactccatgaccgtatgaacaaatctaatatataaaaaaagagtgcacattttaaaagaacaattttttgtaattttatatgaatgttagcaagttgtactactaaccacgcgcggtctatatgcgtgggaacgacacccacgtaccattgtcactgaaaattttgggactgcttattttacagtgtctttttataactgatatgcaatttgaaaacaactgcactcaaatttatataaaaacaaaaataaagctgatttacaacgatattattgtcaaaacatgttattaaatactagtaaacaaaaaatttggaagagtgatcatttagtaaaagtacaaattatgttagtatatttggatgactaacttgtcactgcgccacgggcacacggcgagtatagagaatacgtacactcgcgaggctcactcttttcaccattcatagtgccacgtgtcgaataagctaaagatccacggtgattcgctctctcatgggatcatggctcatcatcatcagattaccgttgggcacaccaatataacgtcatgaactacttaaccatttttcttattttgtattccacttttgtgtatgactgggtccaaacgacttaaaatcctatcaaagcgagctttaacttaaattatgtaccaagattaaactattttataaaaaatatgaatgaataaaataattgacgaagattatgcgaatgaaacaaacatatcaagattaactaaatattcgactagtgactagagctacatgatggtatatgtatatatcaactagtatgagttaatttatctttgaagtgttgactgacgaacggtgttttatgcagttaaatgaagggagaaccaaagtaagtacaataatcttcatagactattttaaaagtgctttta

SEQ ID NO: 61616 - DNA, 791 bp, Arabidopsis thaliana landsberg
ctcgaacgttaatctgcaattttcagattatcacgacgtggaatttgaaatagactcacacaactagtctacgaggcccactggaagaagaagtggattgtgtaaggtgaaacactcactaaaaaatatagaaagtataaaccaaaccgaaattttggctacttcatttcggttttattgggtgaaaccgatagccaaaaggaaagatgaaaaaatgataatcggttccgttcgattcgaaaccaccaaaccaatattgtattctaactttatccgaaattataggaatgtaccaaatttaatcgaaatcattgaaaaattacactttatttttcttacaataaactgaaccgaagttggttttcagttccaaatggaaaccgaatttcaattctagaccccaaaatactattcgaagaatgtacaagcccactaagaacaaataatagcaataagaagatggctctcgcggcccaacccaaacaaaatcgcgtcatcacgtgagtggcacgggcctacagcaattccacaaccacatcgaatcgatgacatttccatttgctttaagaacatccgccgcgcgagaactggcgggaaaattcagccatcgcctcgaagaaaaaacctcccaaatctgagaaatcggaaaagatgacccacaccgaaaccctaaatctgctcgatgaaatcgagtctcttgtctccgatcagcttcaagtggtaattgccgatttccttctccatttctggattccttaatttaactagttagggttcttcgatttccactt

SEQ ID NO: 61617 - DNA, 966 bp, Arabidopsis thaliana landsberg
aattatgacataaatcatttcttattcacttacaaaaaagtaatatattctttatttgggtgtctttacagatctgacatggaacaagtgtttgctgattggaattttgaagataattttcacatgtccactaataaaagatcaatcaggtatatatcaattttccaattcaagtatttcataattatataccaatttcacatcttaatcatagctatttaagtattgtttgtttaaaatatgtttgtaaacattcatatgttgggacagaccagaagatgaattagtggagctattgtggagagatggtcaagtggttttacaaagccaagctcgtagagaaccgtcagtccaagtccaaacccacaaacaagaaaccctaagaaaacccaacaatatttttcttgacaaccaagaaacagtactaaagcctaactacgctgctctagatgatcaagaaaccgtctcctggatacaataccctccggatgacgtcatcgaccctttcgaatccgagttctcctctcatttcttctcttcgatcgatcacctcggaggtcctgagaagccacgaacgatcgaagagacagttaagcatgaggctcaagccatggctcctcctaagtttagatcctcggttataacagtcggaccgagtcattgcggcagcaaccagtcaacaaatattcatcaggccactacacttccggtttctatgagtgatagaagcaagaacgtcgaagaaagacttgacacttcgtcaggtggctcctccggttgcagctatggaaggaacaacaaagaaaccgttagtggaacaagtgtaaccattgaccgtaaaagaaaacatgttatggatgctgatcaagaatctgtgtctcaatcagatataggtttgacctcaaccgatgatcaaacccatgggtacaaatcgagccaacggtcaggatcatacatcgaagaagc

SEQ ID NO: 61618 - DNA, 1420 bp, Arabidopsis thaliana landsberg
agcacagacataaataatctgtacaaagatgtgatttgataaatgataaccctaccaagtgtacaggtacaaagttaccaaatctgtgaatctctctcagtaaagatcataccggaatcacgagatcgcggtattacaactagagtgatccaagagtcacatcgtaaggtcgcaaattcatgcaaataaataaatcctaagatatcattttttatcaaatcgttagaaaattttacgacctttattattgagctttcaacttcaatcctaaaatataacaaattttaactcatttctcaatctcaaacacacaagggagtaagaaaaggtctttaactttcacctgatttgaaaggcgagtgggactaagtcggataagggtgtggctagcctagagggagccggtgagttcctacaaagaggacacgtagcacttgtccggagccactcatcaacacaatcagtgtggaagcagtgattacattccggtatacaccgaacgggttccctagcctcgtaatcacatagacatatcgaacatgggccgttgttgggcctcggtaatctccggctatctcccaacactatccttggatatgactctatcactggccggtctagaccgagcttcacctcagccgcggcagacggcaagtcaagaactacgtcactcgtggcttcgtctcttcctgtagattttgaccttatgcagatgtatgaggccagcattataaaagatatgagaaccaagatgcttacggcgatggctataccgtagccaagcccaaccccactggcaggaggacttataggagacatatatgtggagagagtgagtgagagagagctagagagagacttaaaaatgtggaagacgaagagagtttgtaggagaaggggacaagtttgacgtagtccgcgggaaacacaattaaatggtgctgcagaacattaattatctcacatatgtatatattagattggttatgaagatatgtaatttgtcctcctaaaatctttcatcttctttatattataatggaccgttgactctgaaattgtagtgattctatggaagttttatattttagcacaaaaaccgacaaaaaaagtagtccttgaagttagtgtttaattataacatctattgtacaaccttttcagccatatatcttctatgtgtacgaatttcaaggacattattcattcaacattaagttatcttatcaattagatcttgaagttcttagatggttcattacgattacgaattagtcttgtttagtcaaaaaactctttttgttttatttttatagagtttcctctttcctatataccatcctcatcagccaaaaacaaattctctagaaataaaataaaattcgtcttgaaacatctccaaatctacaattacaatcgt

SEQ ID NO: 61619 - DNA, 698 bp, Arabidopsis thaliana landsberg
gagatgcgcataatggtaagcccatattggcccgacctcatcgaatgcacccggaatgaactggttgatcacggcagagtctcctaggcacacatctggtgggctaccatgcaaacatccgtgctctatccggggaccgcagtatctgtcttgtcacatggcttgctaccatgggttaaaccatgtccggacttgatcttaatacttgcattcttagtaggaactctgatctaggatatgaatggttacgataatgaaaccggtagaaaacccttctgacgacatgtatcaatagattcaatgaacattatctcgagactatacttgaagataaaccccatatacgtgctcttcttggaactgaactcaatgctctttagattctcatcaacgccttcaaacctgttatatagagttttgtttaggacaaagtgattatgggccaaaacatttatgttgaacaaaaagatcaggctaacgggtatatcttacgttgaaggcacgttatattcggggtatattggcctgagaaatttggagatagtaagaatggctgcatcatgagaggaacagatataacgttccttggcggctgcttgatcgtataataagatatgaccgttgcataagtcgtccatatgcacatactgtccttgtcttatgatcgagtgatgcgcctcgttccctaaaacattata

SEQ ID NO: 61620 - DNA, 179 bp, Arabidopsis thaliana landsberg
ccaaggcagacggcgaagagtgaacaaattcaacatagttgctgctcttgtcaggtttctgcgagtccgtgactggctataagacctactctaaacaaaaccacccgaaaaaacaattcatttcagctcagaatttcccttcttagcatatttattcgctaacaatttacctcagagaa

SEQ ID NO: 61621 - DNA, 999 bp, Arabidopsis thaliana landsberg
actaaaggtcaggattattgccttctaatcactatgttttccaactagaatattgcctatctagaaacgaatatattccaatgtctttagcagctaaaagaagtaaaccaaaaatattgtaaccaccagttcagtaaaagaacctttcattgacgtgaattctactacatctaaaaagaagcattatatacatataaatgaaaactatccagagcagtgaccgctcttcaatttattctggagcttcgactgatccatttgataacctttcttctggttcagacttgcaatcaaggcgcaaaaccgacaaccacgaatcaacctaaaaccatacaaaaccgcgaaatcattgcgttcaaatgctgtgggatctctcaacaacaatctgtgtgtaaagatgtatatgtatttggttcacctgtgttttagaggtgcttgagcactcaaatcttagaccttgacgggttaatatgtaaaagcaataatgggtttcatcgaattctctcgtgtagcttggtaccgaaccaatttcaacaatatctgctagcaatgtcgaatcttgagggctcaagtctgcaatagagaatttcaagagacattacaagaagaatacaaatttgaaacaggattgtaaaagctgaaccttaactcacctgttgacaataaatagaagaaaagacaagggccttgaaggacgacaaaccgaggaagccagtcgtctacttctgtatcgtctattggtggtggttcacccggaagagctgcccaacgctaaagtcaaacaaaaaaataaggcaaatttgtaaaacatcctagtggatcaataatgataagtaattcagagtaaggccctacacttctgataaacaaataaccagataaacgggcagagcgcaagacttcatccacatgttccaacctatgtagcagttcagcaagaagaaattgagatatgcgcttttaatctgagaatggaacaaatttgagtatatgacttac

SEQ ID NO: 61622 - DNA, 735 bp, Arabidopsis thaliana landsberg
  unsure (1)..(735): unsure at all n locations
taatggaaaaaaaataaaatgagtagaaaaaaaaaaaaaaaaaaaaaaaaaatgaaaaaaaaaaagaaaaaatatattaaaaaaaaagaagtatcgtcagttatnacanaaaaaaaaataaaaagaaaaaagaaaaaaaaaaaaaataagaaaaaaaagaaaaaaaaatttaagtttaaaaaagaaaaaaaaaaaaaaaaaagaaaaataaaaaaaaaaaaaaaaaaaaaaaaaagaagaaaaaaaaaaaaagaaaaaaaaaaaaaaaaaaaaaaaaaaaaaaaaaaaaaagaaaaaaaagaaaaaaaaaaaaagaaaaaaaaaaaaaaaaaaaaagaaaaaaaaaaggaaaaaaaaaaaaaaaaaaaaaaagaaaaaaaaaaaaaaaaaaagaaaaaaaaaaaaaaaaaaaaagaaaaaaaaaaaaaaaaaaaataaaaaaaaaaataaaaataaaagaaagaaaaaaaaaaaaaaaaaaaaaaaaaaaaaaaaaaaaaaaaaaaaaaaaaaaaaaaaataaagaaaataaaaaaaaaaaaaaaaagagaaaaaaaaagaaaaaaaaagaaaaagaaaaaaaaaaaaaagaaagaaaaaaaaaaaaaaaagaagaaaaaaaaaaaaataaaaaaatgaaaaaaaaaaaaaaaaaaataaggaaaaaaatgaaaaagaataaaaaaaaaaaaaaaaaaaagaagaaaaaaaaaaaaaaaaaaataaaaaaaaaaa

SEQ ID NO: 61623 - DNA, 177 bp, Arabidopsis thaliana landsberg
  unsure (1)..(177): unsure at all n locations
cnnnnnnnnnnnnnnnnnnnnnnnnnnnnnnnnnnccacgcgtccgctcatgcgtccggcgacgcgctcgaccacgcgggcgggcgtgttctagctggctaaacagaacggccaaggggcaaacacaacagctcagatctcatgtagagcgagagacaaaaaaacgtcggttaactt

SEQ ID NO: 61624 - DNA, 340 bp, Arabidopsis thaliana landsberg
  unsure (1)..(340): unsure at all n locations
gcccnnnnnnnnnnnnnnnnnnnnnnnnnnnnnnnnnnccacgcgtccggtagactcaatgaactcgaggaagaattacattttagcctttgatgaatggaaagaggatgtgctgccagaaattttggatggacacaatgtgtatgatttcattgatcctgatattccgcatagggtagaagagttggaaagagaagaagggatgagacaggaagaagctgaagatgatgactttgagattgatggaactgaattgacacccgagcagcaagcagctttagctgtgaacaggaaaaagaaaagcttgctcatccagcagcattggatcaaaaagagcaat

SEQ ID NO: 61625 - DNA, 708 bp, Arabidopsis thaliana landsberg
tgcattttatcaaatgaagaaaggccatatttagaggtcataagagacataagactgccaataccagaaattaataatggccacaaacaaaagcttccaaatgaatagcggataaaggctaaaagaagaccaaccgattgacttcagcaactctgaagtttgtttacagatacatgtttcctcgtcatcaaggcactttaacaagcagtccgcaatctctttcctgaaataagagcagaaaatgattctgacttctgaggggatgagaatgcaaataaagaagatacagaaaagctagaaatagaaaattgggacgaaaaacataaatgattgcataccagggtatatgagaaggaaatgaatcttttgacataaggattacttctgatatcacatccaaagaattcagcctttgcacagtagttccagaagcaaggcgttgtataatttcactgagacagctattacctgcatttctggtgaatgtttctttaagtcagagacaaactaggtaccgtcactggtaactagaaagctactaacatgatttagtaccaaaaggaaagagaatagacatacttggaacaatagtctgccagcaggacactaacagctttggccgcgccatccctttcatcaagaaggtgaagcagtgatggtatcacaacgtccatgcacattgtatcagagaagctgtctccggactga

SEQ ID NO: 61626 - DNA, 516 bp, Arabidopsis thaliana landsberg
  unsure (1)..(516): unsure at all n locations
cnnnnnnnnnnnnnnnnnnnnnnnnnnnnnnnnnnnnnnnnnnnnnnnnnnnnnnnnnnnnnnnnnnnnnnnnnnnnnnnnnnnnnnnnnnnnnnnnnnnnnnnnnnnnnnnnnnnnnnnnnnnnnnncatttgctgtggagatgtcttcggcagtttacaaggggtgggttttcactgatcaagcccttcctgcggatcttatcaagagaggaatggcagtggaggatccatcctctccctatggccttcgccttgtgatagatgactacccttatgctgttgatggactagagatatggagtgctatccagacatgggttaaggactacgtctccttgtactatgccacggatgatgcagttaagaaagactcaaaactccaagcttggtggaaggaagctgttgagaagggtcacggtgacttgaaagacaagccatgggggcctaagttgaacactctttaagatctgattcaaatttgtgcattatatatggacttgttcagcactccatg

SEQ ID NO: 61627 - DNA, 368 bp, Arabidopsis thaliana landsberg
  unsure (1)..(368): unsure at all n locations
nnnnnnnnnnnnnnnnnnnnnnnnnnnnnnccacgcgtccgagatataaagaaagaaaaattcaaattctccttcgattcatttcaattctccttcttccccgttttcttgttcttcttgttccagttcttgaactcacccagctagctgaattccgaaaaagcccttttcttgtcccgaaatgccgaaccccttttctttcgcttagccaccaccaacccgccgccgatccccgtttaagatgatcgtccgcacctacggcccgcgaaaaggaaccctctcgggaacgtattcgggctcgtcctttctaaacgacgacgtttcggagccattcagggtttccttatttcaggagattgccgaccctc

SEQ ID NO: 61628 - DNA, 573 bp, Arabidopsis thaliana landsberg
  unsure (1)..(573): unsure at all n locations
cnnnnnnnnnnnnnnnnnnnnnnnnnnnnnnnnnnccacgcgtccgcnngtaacttggttctaccacctctctctcccaaactctctttgttgtgctgcttcagcgtctggtagcaaagatggcgacattgactgcttcaagtaacttagtctctagaaattctcatgtccaccatggaccaacaactgcttcatatgagtctaaagcagtagcaatgggacttagatctctgaagcagacaaatactcataatggactaagaattttgaacccggtggatgagctacttaacagaaccccaattaaaaccaatgcagtgcaagctatgaggaagggacctcaaggcaagaatgccaggcctaaaggcatgatcacatgtggcatgactttcataattataggaaccgaggtggctccatggtgcaaaactggtgggttgggagatgttcttggaggtctaccaaccgcattggcnnnnnnnnnnnnnnnnnnnnnnnnnnnnnnnnnnnnnnatgaccagtacaaagatgcatgggatacaagtggtgtaattgaagtgaaagtggagatag

SEQ ID NO: 61629 - DNA, 1163 bp, Arabidopsis thaliana landsberg
gcatccagatgttctttaactctgtttgcaggcgaaatcgtacaaatctggtttctccattcttagtgatgatatcgtggagattgaccagccaagagacttttttctctatagctattatgggtaagcaatttttcctcattgctatctgtttttttcctttgatcaatagatgtgtaaacacattaaatccatccctgttgggtttgttttatagtattttcttattctggtccttgattacctggacttttgataggggaatgatttgtattggactgaagagatttcagaaagcattagagcttctttacaatgtaaggcatttttattttttcttacgtgctttttatacattaaggactttcgttttagttttaactcaacctaagtacttgtatcaggttgtgactgctcctatgcatcaagtcaatgccatagctcttaaggcgtacaaaaagtacatattggtgtctctcattcacaatgggcaggtaaggctgtgttctttatattttactttctttgtttatctagttttcggtcatgggagcatattgcacgagtctgaatcaactgtatgtttttgagaaatgttggtttcacaattacatcctgtgtctgattttaatttcaagcattggttaatcttatgatgtttttcttataatcttgtttgatttttacttgtgcagtttactaacactctccccaagtgtgcttctacagcagcacagaggagcttcaagaactataccggagtaagtttgaacccgatcattagttgtatttttcatgtttgaatggagtctggtccctttttcacttcagtccaaagatttcagttgttttgtactccataccagctaaatctattttcaggcttatgattttatcgttcacccttttctcagccttacattgaactgggtaattgttacaacgacgggaagattggtgaactagaggcattggttgtggccaggaatgcagaatttgaagaggtaaattgcctctaaacatttaccatagtttctgtaccaatattaaatattcatccccttccataacttggggcgaaatgctctttcaggataagaaccttggattagttaagcaagcagtgtcatccctttacaagcgtaacattctgagattgacac

SEQ ID NO: 61630 - DNA, 798 bp, Arabidopsis thaliana landsberg
tttagtcctagagcatcccctggaaccactgggccactctcagttgttgatagtagccctttaaaaatgaaaagggagttgaggaatgcttcatcgccatatgggttatctgaaagtgaggactcaggagctggagacaataaaacaagagagcgtgcttttgcgagtggtgacttgttcacaactcctaaatcagggtcgctattacttccgacaaggaaaaacaagattcaaaccagtcataaaggaggtggtgcatggaagcaaggaaagagtgaaagtgtctcgtcgttgacaactcctggctttcatcctatcatggttaagtcagagaatttaccagtagagaagccttttcacaatatcaagattgcctcagataagaatagaaggtgatttatacataattagttcttttacttaccacttcttctcaaatacacgaaccaattgttctaacttgtctctctctctggacagcaaatatgggcgtccacctgcaaaaaaagttaaagatcgtaaacctgctactcggcttgcctcaaatgcaaatactccttcagatattacaggtagttattttctttgtgcatttcgagttccaatctttaaccatattcatggttattggatagtattatcaaactaatttctgggaaattctacctatatcctgaacgtgacttaccctgaatatttgaggtttgataactattagttctttctcagttattttcatttgtacaaagggatgtatttgatttctaagatgatagtgatggtagttggatgtaatct

SEQ ID NO: 61631 - DNA, 716 bp, Arabidopsis thaliana landsberg
  unsure (1)..(716): unsure at all n locations
acacatgctccattgacccccaaagccaaatgctctccaaaatcctctatataaattctttaataatcacatctcttaccaaacgaacccaactacacaagtctctctctcttttcccatttctccctctctctctttgtctctctatcatcaattatgcaaaaagcaattcgaccatacgagtcaccgtggacgaagaccgtgccgggcaatagcattttccttttaaagaatgaagataaaccatcatcatcatcatcatcattatcatggttaacatcaggatcaccaaagccaacatctataagcaataagagatcaagcaacctagttgtgatggagaatgctgtggtggtgtttgcaaggagaggctgttgtttgggacacgtggcaaaacggctgctactgacacatggcgtgaatccagtggtggttgagattggtgaagaagacaacaacaactacgacaatatcgtaagtgataaagagaaattacctatgatgtacataggaggaaagttgtttggaggattggaaaatctgatggctgctcatattaatggtgatttagtgcctactcttagacaagctggggctttatggctntgatttttaatcctcctaaatctagttgccttcttatttatttctatccctttttacattatttgttaatatatgtgaacttgtaaaagattgttacgtgattggtttga

SEQ ID NO: 61632 - DNA, 1491 bp, Arabidopsis thaliana landsberg
  unsure (1)..(1491): unsure at all n locations
aacaacggatgccttcttcttcacgaggacgattcaggaacagggatggtcgacgcagcatcatatatatgttctaccgcgaaagcagcagcctcttctcaaatggaggcagccattgatgcattgtcccgggatttaactaaattaagaactggaagagccgctccaggtacttatcacctctttctttcgggtttaggttaagcctctctctctctgtgtgtgcttattgtgtgcatttgcaggaatgcttgatcatattgttgttgaaacgggaggagtaaagatgccactcaatcacttagctttggtctctgtcttggatcctaagactctctctgtcaatccttatgatcccgatgtatactgattctttctttctctttttctaagaaaaacttcgactacattagagtgtcatttttctccaacaagccgccattgacgctttgtttgtctctgcagacggtgaaagaacttgagaaagcaatagtcgcgtcgccattaggattaaacccgaaactggatgggcaacgactggtcgcatctatcccagcgtatgaaagttcttctctgtcaaatttcattgtttatcacagccgtaattgactgactttgtctgatttccgctctatgtttttatttcgtgagcagattgaccaaggagcatattcaggtaaagcatccaagtcatgtgttattgtttagtcactgaggttgagccttgaccctatctatctatatgaactccaggcaatgtgcaagattgttacaaagtccagtgaagttgtcaaacaaagcataagaagagcgaggcaaaaggtagttttgaatggtgtagagaacaaccatagaagctgtttgttgtaaactgtctccaatacgtcagaacatctaatgatcagagacattttttttggtcaggcactggacacattaaagaaagcaggctcgagtctaccaaaggatgaagtaaaaagactggagaaggaagtgagtgtcattgtatgatctttctgcaaatatgcatcctacttcagttactgaaaataatggcctttgtgtgaacaggtagatgagttgacgaagaaatttgtgaagtcagcagaggacatgtgcaagtccaaagagaaagagatcaccgaagcctgattcatcatttctatacatcactagtcttttcacgctaccttgaaagaatcttttattcattgccaagatttgttttcaacttttgaatgtttgatttggggatcttggaactgcaagaaaattgatgatgaatagcgacggtaggcccttcatagggcccaagataggccttaatagaattccaataagtatgatgttatttattcgagtttcatatatatagtagtactagtactaatttggctttgtagttgaagagaagtttccaaacttgataaccaanngtaggggggaagaggtaggagatgagtcaatttgtttaccaataattttacatga

SEQ ID NO: 61633 - DNA, 1182 bp, Arabidopsis thaliana landsberg
attgcgtaaaacagaagcataccgagctagagctagagctactcccagaacggtgaagcatgccacttaaaccaccaccttcagccacggctggagctccaccggcagttccataggctccggtggtggctggaaatggatttccaaattggtcaagctgttggtgagtctgctgcgctccggactggttttggtaagactccatattccttttacaattgaacctttttttagctatagacaaaattaagacactgatggataaagatgtatacgctcttgaatggtatttttatagaaccgcaactttggatagggatcataatcacatatagtattatgattattatcaaatcgcgttgaagtgacacacgtggcgattacgtaagacgttggttttgtggttagtgtgacacatgtccgttataatcgacacacctcttttaactcgatatccgtaaaaacaacttatttgggccgtatgggcctgaattgaaaacctgagtaatatacattgccaaacaactgcggtcgtttccgtgataacttgtatgcaaaagaacatataaacttgtaaagaattgaattaccaaataattacatgtgaattatacgtggttgtatgtgtcaaactcacaagtattttaataacatggaatagttgaagcgatagaaagataaataaacgaaaccagaagtagatattttatattaattcaaagatccatcacttacatatattatttagcgactcaatgaaagaaagccacatcatcatattattacaccacacaaatacttaaaatatgcttaaacaagttgttaatcaatctagtgatgaccaccgggaagcttctctttaatcttatccatcgtacttttattttcatggtgaacaacgccagtattaccataacttgtggtggttccagttttgtgagttccatgatgacctggcagttgctctttaatcttttctgctataccttttttctcatggtgaacgacattagtgttagtaccataagccgtgttagtcccagtttgatgtgacccatgatgacctggtagtttctccataactttttcggtcacactttttttctcgtggtccacacccccagtgttagtagtaccataagttgagttggatccagtttggtgtgatccatgatgacctgg

SEQ ID NO: 61634 - DNA, 451 bp, Arabidopsis thaliana landsberg
  unsure (1)..(451): unsure at all n locations
nnnnnnnnnnnnnnnnnnnnnnnnnnnnnnnnnnnnnnnnnnnnnnnnnnnnnnnnnnnnnnnnnnnnnnnnnnnnnnnnnnnnnnnnnnnnnnctgctggaactcacgacgtgagctcgaagaccggtggtcccttctgaaccataaagcacctccctcgaactcgctcacggcgctaacaacggtcttgacatcgctgttaggcttatggagccactcaaagcggagtttcctatatagagctacgccgatttctaccagtcggttggcgttgatgccgttgaggacaccggtggacctgaagtccctttccatcctggaagagaggacaaacctgagccaccaccagcggggcgtttgcccgaggccactaagggttctgaccattcgagagatgtgttgggcaaagctctggggcttattgacccagatatcgttgctctgtctggg

SEQ ID NO: 61635 - DNA, 454 bp, Arabidopsis thaliana landsberg
  unsure (1)..(454): unsure at all n locations
nnnnnnnnnnnnnnnnnnnnnnnnnnnnnnnnnnnnnnnnnnnccacgcgtccgccggtcagtactgtgctaccaaacaggcaacaaggctcaaggaactagcatcgtttctacaatgggagcctgtttgagcacccacattaaagctgggttaaattcaaagcatgttattcctcgatgcaaacgatcacagcagtccaattagcaataaaattacaaaagatgttagcacaccaatcagtaaagtctcagaggtgtcagagcctaacactcctaagattgagggtgagaccttgcagccatccaatatgaagaactttagtttgacagaactcacagttgccacaagaaatttccgtaaagacagtgttttaggaggagaaggcgattatggaccatctttcaagggctggagtgataatcaatcattggctgctggcaaacctgtcactgg

SEQ ID NO: 61636 - DNA, 410 bp, Arabidopsis thaliana landsberg
  unsure (1)..(410): unsure at all n locations
nnnnnnnnnnnnnnnnnnnnnnnnnnnnnccacgcgtccgctttatggtgctagaactatggatgatgagaaggctcagagatgtgtgaaggctgtgaaggagttcatgcgtctgatgggggtgttcacggtggcagatgctattcctttcttgagatggtttgattttggtggctatgagaaggccatgaaggaaacagccaaggatttggatgagatttttggtgagtggttagaggagcacaaacaaaatagggcttttggtgagaacaacgttgatggaattcaagacttcatggacgtcatgctttccttgtttgatggaaaaacaattttattgcatcgattccggtaccatcattaaattcaatttacctgccaatattttcaggggaactgaatcaatcact

SEQ ID NO: 61637 - DNA, 497 bp, Arabidopsis thaliana landsberg
  unsure (1)..(497): unsure at all n locations
nnnnnnnnnnnnnnnnnnnnnnnnnnnnnnnnnnnnnnnnnnnnccacgcgtccgtgtcgcgtgggcgcaactgtttctgactacgttttgctctacgcctctccctctctctcaaaaatcgttctcttcgattttagggctctgttttgctgctgcctccgttccccccttctcataaacaacgcgttttctcttctgcttcgtatctattctttgcttttggtttnnnnnnnnnnnnnnnnnnnnnnnnnnngcggtgcggcactctaatcgatatatccaagcaggactgaatgaactaatggagtctaaacgggggaaaaagatgtctacgattagtaggaggaaaatcattgttctaccaagctcccctcggatacagcattggagacggttgacccaacggggggatccaaaaattccggacttgttgtttactccaactgcgctcgcaaacctttctgatatccatccagattgatagttcattgcatgc

SEQ ID NO: 61638 - DNA, 714 bp, Arabidopsis thaliana landsberg
aacccctctctttttataagcgtctcaactccagtgttgaagtaccacaaccaccacactcttttggagggcatggaatgctactgtctgagttaagcttccaagtcgagaaatgcagtggaacatatgcgtccgagtcttttccttgacctgctgggattcgacattcatatcctttcccttctgcatttttcttcccatctctctcttgatggaagccctcacttagttccttgcagcaagaaagacatatatcgactgaacaatttttgttcggacagcttttgtgaaaattggcaatggatgtgcggcagagatcactgtcgtatagggatgaagagattgtcaacaaacaaggaaacatttagaaaaatacgttaaatcaaatacgagatacaattcaaagaaacagattgacaaatgtgtttctatagatggataacgaaactatgtcctgttttatccaatatgcaacgtcttcacttgtttaggatataaagagaactaatgaacagtagaccccatataccaaatcccaaagataaccaaaagtagcccaacaaggtatagaacccttgtcttccttgggcatatgacactcataatgatgaaaacaactctctgcccattgcttaacatgatatgaagcttattttcgttcaaatgaaaatacatgaaaaaggaataacgtttaaagacagttattaaaataac

SEQ ID NO: 61639 - DNA, 667 bp, Arabidopsis thaliana landsberg
ctgtatccgccatttcacagtgtaataacatcattaataactggtcacggcatgcttatttttactgaacaggtggctataacatttttaactaagttgcacatttggattagtatgtttttcacatctcatatcttggttgtttttgattcctataaatgatttacgaaggagctatgcactaatcagtgacctctcatataaaaaattcaatactaaatattatgaaaaaacctatgttgatcgatgctaatctaatcggccaatgcgctcactaaagaatgcattggcttgttacacctagatggctgcaatagcaacatcaaagccaacagaaagagagtgtccgctcggacggccatatggacatggtcatgaccaaatgacagccctactcatagattacctcccagatggttctaacagataggcgtcatccgctgccaaactacacctctcattttccccaccgcaagacccggctggagaaccaaaccacttgaggcagaatcacaatctttgaatcttccaaattattagtcaccttttactttaaataaaaatttcactcataacatcaaaattgtagttccaacaaaaaatcaaaaatttcaaggtcccaaataattctaaaaaaattgcttagtttttggggtctttattcaaa

SEQ ID NO: 61640 - DNA, 989 bp, Arabidopsis thaliana landsberg
ggggggggacctacaaaaaaacgtgatcatggatggattattttcttttgacattggattacggcgatggacccagggaactgacgtcatccgttatggggtccgtagtgtggtcctctaaaaagtattgacgctttttgtcatctctctgttctttaggactcgtcacaaattttacttcctcagattcacatgaccaaatcatgtaaccattttccaaataaaatctttacatttagatttagattcagaggaattgaattagcctcatcataatgtatgatactacatactacactagtgacacggaaattacacgacgaaaataaacaatgtgaagaataacaaaatttcccgggaaaagagagatagagagtgagacacacgcgcgagtgatgcgtgtggtagtaaatagaacactgtttgatgatactgctgcgactacttaactcttattacaaagctctcttttgttgtctctctcttgctctctctgcaaaactccggcgagaagagaacgttgtcgtttcattcgtcaagtaactttcattagtaatgggaaaagcttcacggtggtttaggagtctattcggagttaagaaacccgccccgggttatccggatctatccgtcgagacgccttctcggtcaacttcctctaatccaaaacgccgatggagtttcgtcaaatccaaacgagaaaaagaaagttcaccgattaatcaagttcctcatactccatcgctaccgaattcgacgcctccaccgccgtctcaccaccaatcgtcgccgagacgacggagaaaacaaaagccgatgtgggaggatgagggaagtgaagattcggacaagcatgctattgcggtggctgccgcgactgctgcggttgctgaagctgcagtcgccgccgctaatgctgctgctgcggtcgtcaggctgacgagcacaagtgggaggtcgactcgaagtcctgttaaggcacggtttag

SEQ ID NO: 61641 - DNA, 1631 bp, Arabidopsis thaliana landsberg
gtgcggttaatttagctctcatagttagagcttataaagttacatctcgaagtgtgttggtccaatcctacagaggcaataaccactcgatggatatataaagtcatcacaacttattagacccttgaacactaagtaatgctaccgggtacaaaagaaaacactcacatatgaataatgaggagatctaaatacgtcatactcaaggcaagatatttgtatcacatgtatatagcaattaacgattcatccatgagaatatttacattacaagccaacatatacataacttcaacacaaacatgtcattgatgagtagattttattaagaaaggtgtggttattgtagaagcatttatttggagagtagataggaccattgatgaaaacaatatgaattgaataattggtttttatctgattaaattggaaaacagtgtatgactaaacgagccacgacccatgcattcctacatgtgctccacatacctccgagcattgctttctttagtatatacacactgatagaccccatggtcggtccattcttttgcattaatttctttcatgtgatattcacatactcgttcccctcatcagaatttacatctcttcgttaaaggttaacaagaagacataattacattttcttccgtccattaaagaaaaatgagagattttttttttaaaaaattgaaggtctttaaagtattgagaaccgtgacctatttataaggtttaaaaccaacaaccaaatttctcatttgttgggttgtgaaagataatttggcgaatatcatacaaatgcgattaattacggtttaaacatctccattaaggtattgacagtatcaaaataaggagaagaaaatggaacaaacaattttgtccagaggtgtataaacttggagtatcatattcttatagcagatgaaataaaatactagttagtttatttgtttggaaaacaaaataggtaatgtgaatatatattttaaaagtaattttgatactacagccctttaattaaatatttttaaaataataaagaaaggaccaatcatatgtttgacaaaaaaagggccaatcatataattctgttaccatggatctaaaatgagaggagactcttgctttttcacaaaaaaaaaagaaagagatagagcagcaaccgcagcagcatcgaagatcatcgatcggtttctctctttcattaatcagatctaattgatacccaaccttcttcatcggaggccgtgtaagctagcttctccttcttcatcttttcttacacttatttgatggttgtttatgtatcgattctatggattaagagcttttagcacatattaatttgtccccagtctcgtcgtatatgcagacgtatttagcgcttatggtttgatttagatctgtttaatttagcgtttcaacctaaaattgttgacaactcaaaatcggaatcccccaaaaagtgtctgttgacttatgaatatggccatctccaaatcggtttttgatccatcatcattaaatttggtaatatatagatctcacgaggaaacatgggcggtagatttggagtcctcctagtcctcttcctctagagctggtcttgtcatgctacaaac

SEQ ID NO: 61642 - DNA, 334 bp, Arabidopsis thaliana landsberg
  unsure (1)..(334): unsure at all n locations
cccnnnnnnnnnnnnnnnnnnnnnnnnnnnnnnnnnnccacgcgtccgtccagaagttggagatactggcctaaagaaagttctatttttaagacttcatttctataaagtagtgggtgctacccgtgtgaaagaacctgaatgggagggttctcctggcttgacccaaaaatttggaataatctcaacattgatcagcactaccttctcaagtccacaaaagccaccgccaccacggccatctgatgtaaacatcaactctgctttataccctggagggcctcctgtgcctacttaggcacccaaacttctaagggttgttgacacacctgaa

SEQ ID NO: 61643 - DNA, 1675 bp, Arabidopsis thaliana landsberg
tgattcaaacttcaaagtcatagacataggtaatgagacacgttctgtgtaaaataaggaggacacgagggctattggcctatatattcccaattcttgtttgcactaatctaattggttgtattaagttaaatatattacttaagagtcgaggaaattgcatacataactgaggtttaaattgagaagcagtagaagaaaaatgggtgtagaattttcaaactcgacgacaaatcatcgaattaatttcgatacacaagttgtgacaaagagagaagagatactcttagtcttaatccaacagtaaatgtgattataacgcacccccacatgtcggtttcataattgggtcacaagtcaatttcgggatgttgaatttggaggctcctttcaaaaactcaagctgcatgcccaacgctctttttcattcttttggggaaaaatattaatttcctaattcaataatttcattaagatggacaaaaatcataaaatgaactttcaaatttgaaggaagcgattatccgacatccacatggtttgagagatgagatgatacggatggtctcgtattggacgtaatgtcagagcatctccatccattataaaatttacattgagtttcttaacaatagctagttacataatcaaattttaatgttaacactacgtcattttttaccaaaaaacaaaaaaataaacaaaaatgatctctaccttctcagtcctcgaagaagactaaagattcgctcaccacaaaacaggacaatatatatagccgagatcatctcccatcaagcatcactactagagttatttaatttacatactcgagatcaaggagatttccggttagttgcaaacgccatcaaaacctatgatcataaactagatgaacgataagcttgttaccaccccgagcaaggaggaagactagctagcccactttctccgacttcttccaattagtattatgtaaggaatatggaaacgtattatgtgcatgcagaaagaaaaacaaatcccgggtctatgggtttcctgaccgacttcttccaatcatattatgttgagacagtcattaaagagatgcaaggcttttttggcatccataaactctacgagaacaacaagtgaagtcggttttgactaaaagtccagagacgacaaaagtggtgaattaatagtctatcgaacttgcaaatactactatatatgatcattaatacatagatccttactaaccttgaattttgtaacgtgacttccaaattccagtgaccaaaaggtccaacaaaaggaatgctacaattcgcttaatgatgtatctccaaccaaaataacacgttttgtccgttgatttgaaagtcaaatctcttgcttccataactatcgccatattatctccaaccaaaaataacacgtttccagctaatcgtcttttccgtacatactacgtttccatattctaagttttttttttaatttaaacattattattaatgtaataattaaccaaaaaaaatagagttaccttacattttcgagtctacttacaacatgaaatccaaaatacacgactacaggaggttgaatttctttatttcgaagaacaaaataagagatttctttcttttttttttttgccaaaaattgaaacctatattgaaaaaat

SEQ ID NO: 61644 - DNA, 339 bp, Arabidopsis thaliana landsberg
  unsure (1)..(339): unsure at all n locations
nnnnnnnnnnnnnnnnnnnnnnnnnnnnnnnnnccacgcgtccgcctactcgtccgcccacgcgtccgcaagatctcattgcatttccctccctttacacgggagatagcgcaagaagcgtaatctccaagttctcatctttttgttccctttttgttcagagacatacatagtcccgccccagaagaacaaattgctacaacctattttgatttgagatctgtctgtctctttggtttcagttcagggtcaaagtgaggaatgcaaagaaaatggggaggagagnnnnnnnnnnnnnnnnnnnnnnnnnnnnnnnnnnnnnnnnnnnnnnnnnngaga

SEQ ID NO: 61645 - DNA, 227 bp, Arabidopsis thaliana landsberg
gtacgaatggagagctggaacttgtttagtgatgaacgtgaggtattctcttgcgtctacttctttttttagcggctgagcttaatgctatacaccgcatgtttgtgtatcatctattaatcctgatagagaaatccatgaacctagtagaagattgttcataacatttgtcgcccagagatacttccttttcacattacctttgtcacataattaatactctccgg

SEQ ID NO: 61646 - DNA, 536 bp, Arabidopsis thaliana landsberg
  unsure (1)..(536): unsure at all n locations
cnnnnnnnnnnnnnnnnnnnnnnnnnnnnnnnnnnccacgcgtcctgataaaaaatgtacttgctaccaattctcagcattgatacataaaacagcaaacacatggtggcaggcatgatgaaaggcataaccatttagataaatcttatagagcacttaaagtcatgatgataataaggaatatatccaaggactatcattaacctataaactattgtaatgtgtacaaacatactttatataataaagatcattgcttcagcaaaatcaacaaaggtgcaaattgcttgctgcaaatttcctcttatgcacctactagtggagatccctttcactgctaaataatattaaatctaatggaaactgaaaatttaaattgctatttttctttttacctttgtaaaaggattgaatttgaaactatgtaaattaagagtggtaagagaaacttatgcaataaactgtgaatcaaggaataaaatccacttgtttttaaattgcaggaatggtatctgactcccaaaacagaatacaat

SEQ ID NO: 61647 - DNA, 1062 bp, Arabidopsis thaliana landsberg
ttcttttgatttcaaatccaagtatcgatcttcgattcctccaccctaataaaaccctaaaaaaatgcaatcggattcgggtttgcctcccaagacgtattcgggtgtcaaattcgctctcgttggattcaatcccatccatggaaactcggtatgtcatctctctctcgctctctattttcaatcgtagattcagatttccgtaacggtttctgattttgcaataacagttacggtcgaagctagtgagtggtggtggtgttgatgttggccaattcactcagtcatgtactcacctcatcgtagataagcttctctatgtacgtctctctctctcttattatctgatttcgtctctcgttgaaaaaatcttactttttgttttcttcaacaaacataggatgatccgatttgcgttgctgctcgaaacagcgggaaggtagttgtcaccgggtcatgggttgatcacagcttcgacattggaatgcttgacaatgcaaattcggttagtcataaccaatattttaaaatggttttatatgtaatgttttgttgattgcttaattttggtattcacagatattgtataggcctcttagagatttgaatgggattccagggtccaaagccttagttgtgtgcttgactggctaccaaggtcatgatagagaagatattatggttggtgtgttttttgttttttgtcttcttcttgttgttgttgtgtttgggagttaaacttgtttcttccgttttatacagagaatggttgagttgatgggtgggcagttctccaagccgttggttgctaacagagtgacccatcttatatgctacaagtttgagggtgtggtgtctctactttggttcaactttcctttagcttagtgtttttcggggagtttacattctgtcgagtctttctttctgcgcaggagaaaagtatgagctagccaagcggattaagaggattaaacttgtgaaccaccgttggttagaggactggtaagaggcatacaatagtttttttgttttttttcgttttcgttttgtggatgtgaa

SEQ ID NO: 61648 - DNA, 1343 bp, Arabidopsis thaliana landsberg
aggcagtgctgagaaagctgatagactattataagaatttggtgaaatctagtttgccaggtgaaaccgatgacaacgtctgtgaaactcgtccatcagatgctgatgttagaagcggagagtcattgggtgcacatggagcaacttctcatgggcaacattttgaattgtctgattctaatgtagttgaagcaacaagtagagacatagcagtcgtagagacacctgatgtagcttccctaacaaaagatctggatcaggcactgcatgttcaaaagctgacaagggaagaaagagatttgtacatggcaaaacaacaatccttggttgcggaaaatgaggcacttgataagaaaataatagaactgcaggagtttcttaaacaagaagagcagaagtcagcttctgtaagggagaagttaaatgtagctgttaggaaagggaaggctttggtccagcaaagggatagcctgaagcaaactattgaagaggtgaacgctgagcttggtcgcctgaaatcagagattatcaaaagagatgaaaagctcttggaaaatgaaaagaaatttagggagttggaatcttattctgtgagggtagaatccctagagtctgagtgccaactgttgaaaattcattcgcaagaaacagaatatcttttacaggaaagaagtggtaatttgagcatgacgttgaatgcgttaaatagcattgatattggtgatgaaggtgacataaatgatccagtcatgaagcttcaacgaatctcccaactgtttcaaacaatgagtacaaccgtgacttctgctgagcaggagtcgagaaaatctagaagagcagctgagttgctacttgctgagttgaacgaagttcaggagacaaacgatagtctgcaagaggatctatcaaaatttacatatgaaatccagcaactttccagagagaaggatgcagcggaggctgcaaaggttgaagccatatctcgttttgaaaatttatcagcagtcagcaacgaagaaaagaataagctatatgctcaactgctatcatgtggaaccagtgtgaactctctaaggaaaatactcgcaggtaccaacagttgcctagctgatattttcatcatggatatggagtttctgcatcatctgaaggcaaatatggaattatgtgcgaagaaaactggaactgatttgtctggcttgcctcaactcagtacagagaatctggtagacaaggtatttaaataattttaacagcttattatggtatatatactttcaaggtttttctgcctctgactattttctgaatattgtttttcctatttctgcgtaggaaatcta

SEQ ID NO: 61649 - DNA, 524 bp, Arabidopsis thaliana landsberg
  unsure (1)..(524): unsure at all n locations
nnnnnnnnnnnnnnnnnnnnnnnnnnnnnnnnnnnnnnnnnnnnnnnnnnnnnnnnnnnnnnnnnnggttggaaagtgtcccacacggcggatttcgcttgggcttcagtgtcgcagcacccaaacgctccaaccgcgactctaaaacgcaacgtgaccgatgtcttcgtcgggcctccgctccggccgctatttactactgtggctgtataaacattctagttatggaagattctgatcaaccagccaaatgnnnnnnnnnnnnnnnnnnnnnnctagtgtgtagttactacagaaagccagttgttgaaaagaatataaggaaacgaactattgttaatgaagataatgaggaggactcaaacaatgaaacttctctgttgcatattcagaagaagaccttaaagcctgataataagttgtacttttccactggttcttcaaaaagctttgcatctgctgaacccagtgaagaaccaggaaaaccagtctttcagttcgagtcttcaaaagagattcaagtt

SEQ ID NO: 61650 - DNA, 1314 bp, Arabidopsis thaliana landsberg
gagtctttccaaacttttcaaatagatgtatacaacatacttatcccaagagtattctgtaatatatgatctcaagcagctgtatatgtgtgtgtttgtgtgaaacatcatcttttgcagaaacatgcctcaacgaacaagttttacatctgatctaattataaggttttaagttatcgtattcagtagagattggggaaaaaaagaaaactcactcatctttaagcttctgaatcttctcagggtctgtctcattcatgtgtttcttaaattgttgcctcaccataccaaccactagctcagtgttgtgttgctgcaagacacaaacgtaaacataacaaaaagttcacttcatatatctcctccactccaggctatctaatcctaatagaaacacacaaatctctttctcgaggaatcaaaacagaagtgacgataatatcaatctcaaccttttctgcttgcagcacatcaacacatattttcaggcttcaatcaaactgcattcgtgtataacttacctcaagagaatcgactgacacaaatgaaaacctctctacattttgctctaaattactaagtgactaaaagtgaaagcatgtgaaggtaacgaacagtgaaataaactcgatttagcttcaaagtaataaaaatgaaattctttaatccaacattatactacaaacaagaatagcaatcaaaccaaacacaataccatatattctgagtcagacaaagcaggttcatattcaaagctcagagaaacaaactagttataaacctcacctgcttaccaataaatttagctctacgaagacattctcggtacaactgcgcataaaaaagagacaaatagatcagtgaaatagcatcaaggaaaggtaaaacaaatcacaagtcaatgtgggaattgttactgaccctaaccacattgttagcgagttcaggaggcagagaagtttgcagagacggcattttcacaagagatcttgagcttcttcaattatagtttcttttcctgtaacgtaaaacacaagatcgcaactatcaatcagaagagacgatgaaatacacagaaccaaaaaccataaaccctaaagctgcagtcactcactgaagagcaaagcttagtcatttaagtccacaactcaaataaaagttgatcgagaaggcagagagattggattaaagagaagacatagaagaaatcaatacaacatttcaagccaaatagagagcgagaggaagagaaagacaaatagatcgaggcttaccggagaaaagacagggcggcgaaatttcgagcttgagagt

SEQ ID NO: 61651 - DNA, 306 bp, Arabidopsis thaliana landsberg
  unsure (1)..(306): unsure at all n locations
cnnnnnnnnnnnnnnnnnnnnnnnnnnnnnnnnnnccacgcgtccgaaattctgaaaggcctgcaaaggggttgaaaggggaggcctttggggcggatctcatcactacaagctccaagcaacagagcaccgggggtaatagcacttatataaaggtgaaaaggttgaaagggccgcgaaccgggttgaaagggaaggcaccggtttttaccctttactacaagctccaagcagcagagcacagggaattataacaatatcaccactggatccaggattaaaggaacaaaattctcttctgatggg

SEQ ID NO: 61652 - DNA, 556 bp, Arabidopsis thaliana landsberg
  unsure (1)..(556): unsure at all n locations
cnnnnnnnnnnnnnnnnnnnnnnnnnnnnnnnnnnccacgcgtccgctcgtcatccacaaactttcggagttttctttcggtaattaataaaatctttgcttaattaatttgcccttcctggaggggcaattaattaattaatctctggtgagtatttataaatatggagagcctggaagaaagagtgtttatgttcatggatgaacaatattatttttccaattccaatgaatcagagctgcatatgcatcatcatccctctgtgtctgtggagaacatatcgtgggaaaacaacaccgacttcgatgactcacccgagagaactttgtattggaaatctcagatcgcactgcttcaggaaattttagagcgataccatttaagtggatcaaaattgagacgagaggttggtcgaatcataaaagaggtgaaagcttcggatttttgcagctgtttgaaggctaactcttgggattgcaccacctgtttgagaagacgagtggttgatgggctctgccgaacaggattcagtccaacctttgatttcaaatggga

SEQ ID NO: 61653 - DNA, 977 bp, Arabidopsis thaliana landsberg
  unsure (1)..(977): unsure at all n locations
aacgaacgtcttttaaacataccatttaatagtaatatgtactaatgttattgaaaacttactttctgctaatattggaagcccattaaactaaggcccatgaaagaaaacacccacaccgacgtcgtataggaaagatgtagtcatgtgaagaaaaaaaattaacggtcaacgggaaaaggaaaacgatggcgcgtcaaatgctaaaccattaaactacggttgtggacggcaaacgcttgtcgtctccgaaacgcaaccgcagagaacccaaatttatatcattctatatcttctcttcttcaccggcgtacaatagcactcaactcttaacttacgcacctctcttctctcatggcggtttcagtctcagctccggttttgtccctctgttacaatcagagcggcgaattgtctcgtagtttgggatatagactaccgaagaaagtgggatttagctctggtcgtcgttcagtgagttatatcggtttcggtgcggagaaagttggaagatttagggttagggttccgatttgcagagctgtacctcctctcttgttcaaagatctcgatgctgatgatttccgacatccttttgataagcaggtccgtaaaaattctccaaatggtcgtaattggaaactatatatcaaactttgatgatgtgatttgaaatatttggttactcttttgtgtgtgtcactgtgttctttgtgtttgttcgtcgcaatcnnnnnnnnnnnnnnnnnnnnnnnnnnnnnnnnnnnnnnnaaagtttgaatgcactgtcttttgatgcagaacacgttgttactaagggctataccggggttgaacgaattcggcaaagctcttttaggtgtggctctttctagttacttggcacaaagagagattttgaaacagattatgtgatttaacgactttggggatgttgcagggtcaatgacggagcagattatgcttcttgagaacat

SEQ ID NO: 61654 - DNA, 435 bp, Arabidopsis thaliana landsberg
atgccattattgttatatattatacttttatacttcagacttattaatgacttaatcaataataagccatgcgaaatccatcttattctaagagaaacacatgcagtaaatgaattaattattacgagtcatcaattgtttttgcaaataaaataaaatggtcatatgtttagtattctcaagtttttatggaaagtaattagtcaagtaaaaaattctatattaacataataggaaagttattatagaaatcacgtgttcatgctcaaatgtttatgatatgttctctgagaatattccctaaatgtttgaatcgaacttgatttcatcgtggtattattgggttatatatgctactgaaatttgatttaagaaaaacaaaaaagacagaggaatttcgaaatttggtgtactctgtgactcgatttcagagca

SEQ ID NO: 61655 - DNA, 1093 bp, Arabidopsis thaliana landsberg
cctatgaatttatcactctgttatgtttcacctcataagtgatattaaaaattacaaaatctttgtataaacatatttaaaaagtttgcttgcctcgcaagttaggtttagggatggtcaaatacgagaagcctttttgtcctaataattttcttttttattttcttgatgaaacatgaagaaagtgaaaaagggattttcccttgtcacaattatgaggttctattgtcacaaaaccggaccaaaccgggaattcactggaccagaagtaccaataaatattgggacaaaagaatagagcatcctaagaagtttatgttggatctgtcaatgcacttttgttgtatattaacgcctctgaatggtcgtagtaattgtatagatcatccgaaggaaaaaatggactatcttcgtgtggcgggtctcttgagttgcggtttctgaactttattttgctttgggatagtttccagtacttgtatcgtcctctgtctcttagctgttcaaaaacaaatgggtcattaagaattaggtgtattgtaatagtggaaatattgaaatctcttaagacgatttgactaaccattctcatgttgttggtagctctcttggagtttccgctttgcaaactcaaactttgagtctggatccagagctttgagtttctgaacaaagacaagaacacttgctattagaaacaaaacagattaataatcaaacaccacggctttattaactcaaacactcacatcttgttgaggtccagcaagtttccgcttttgctcagtaacagcagttggttttcgttggattgcggataccatttgttctctactttgctttgtttgtcttttaggctcgacaacatctgtggctgagtgcttcataggtctaacatcagcttcttctctcctcgtctgttgatcattgcagtacctcccaaccacatttgcattatttgttcccttgggtctcctccccgcactactttgcgattttctttcatgtttggactccacactgtgacgaggatctgaaaacagtggccaccatgagtgtcaaaatataggaaaactttcaactagagaacaga

SEQ ID NO: 61656 - DNA, 1486 bp, Arabidopsis thaliana landsberg
tttatgtttgtcgcgaatttagattgctggtccggcttgattttttaatacgacttaatagtagtctttgaacagtttggtacctttcacgtaccattatgataataaggtcgtgaaatcctgacacttaaacatgtgatgattcaaaccgaagaccaccaatagctccaacattaatggttaaacgaaccttccttgattaacaaaacaacaaccaacgaataaataaaccgcaaaaatgcaaaaaaaataaaaatactcaaaataaagaaagaaagagaaaagagtggtaaagtctctgaagactgcatcatttccgaaacacagaaaacgacaaaataaactatataataaaaaaaatacattaaaaataaaatcacatgaaagagacagcttagataagcttcaacgtggggagagcgcaaatacacgcagaagaagagcatatgatagagagcaaaagaatctgtttcctatgttctgacccacgcgcatccctttagcgcgtctacctcactctctctatgtgtctctctcaacccaagcacaagcaaaaacacacaatttaggagtttccatttccaattttgtgtctctatctatgtcaatgaaccctagaattacacttcaccaatggcagattctttatttacacacccaggacaattctaataccttataaaaaaaaagctctgttaaaaataagatttgttgtaaacaaaccaaaaaacagaatgattactactagagtactagctagctactgtagaatctatacagcgaagtggttaccattgatggatccttcatttataatagtcgggttagattcgatccgtggagttacggtctctactgatgtgacacgacgctctattattgttgttgttccctgttctattgttctgcgacgaagatgaagatgacgaggaagagaaaaactgaccaaagactactgaaccacctctgattgagcaaacgggaacgttcaaaactggagtaaccctaacgtttgagctatacgatctctccattcctctgtgtctatacccgcttgttccaccattgaagctactcggactgcttgagcttcgttctaggttctggaacacgattttacctgaagagtttagtcttggactgtctacagagactcctctgttcattatcgctgatgtttctccaccggaacgtcgcatcggactgcgtccaactcttcctcctccggttcctgatgttgaatggttcactaacctcattctcggtggatttgggtttaggctacgagccggagcaaatggattcgcagtgagattgtggtttaggttaatgatgtggttatggttaggtctctctgcatcgagagagagtcttggaagatcttcgtggtcatggccagaggaggaagaggagagagacatacgagaagaggatatagagacagattcggaatcggaatctttgaggagaggaagactcatgagta

SEQ ID NO: 61657 - DNA, 713 bp, Arabidopsis thaliana landsberg
actctattattgtcttagatatgttagacgagaagatactagtaatgctaattagtcattaggaattccattaataatcgctattaaacgcttagacatatgttagacgagaagaaaaatagaaaatcgaagacatatgttagacatatgtactatgagctttaacaaaaaaaaagacatatgtacttagtacattgtactatgagagtatgagtatagtaatacttaattagtcaatagtatatcttttgttctttatcacttactatgttggttgattttcaatgtctttgtaaccttttctatgtttcaagaacgtatgtaataaggtttacggacgcatagatgatattttgtaatttgttttagtatttttcatttttaaatgaatttctgaagaattataaaccgaattccgtaattcagaaaaaaaaaaaaaaaaaagaattccgtaattcattgttagaatccaagcatcgtgtccatgatttatagaaacgattgtaatactagtatcatatttttcatctaatacaattaagaaatactaaccaataattactgataatttatcttaattaagctgaaattgttaaaaaaaaaaacgtacagacatctcttacacttaaatatttctgatggaaacactaaaataaaatattttgatcgtagaaaatataaactaatattaaccttatttttttctttttttt

SEQ ID NO: 61658 - DNA, 541 bp, Arabidopsis thaliana landsberg
cggaaatattttttttaaataacgaatcaacatttttagtataagttacatggttcggatatacactcatctcctccatttcctgcagtaacaatcccccttccagcacttttccacctttgcacaatcggttaataatcgaactaaaagtaacaacatccggatcaaacccactcataaccatatccctgtatgcttcttcaatagcatggagattgtagtaggagcttaagagtatagtatgagtgataaggtttagttccgagatttcgggaactaaagccttagctgtaacaaagtttacaactttactaaacccatcaatcagagtattgtagctaaccgtatcaggcaatatacccatcttcaccatctcagatagaaactgataagcctcatcagctaaaccatgttcacataaacccgaaatcacagtgttataagtaacagtatcgatgctgattactctatttctaagtaaactaattgcaaaactcaaacgacccactgtgcaaaaagaatgaatccatacattgagagc

SEQ ID NO: 61659 - DNA, 554 bp, Arabidopsis thaliana landsberg
  unsure (1)..(554): unsure at all n locations
nnnnnnnnnnnnnnnnnnnnnnnnnnnccacgcgtccgcagaattgtttgtgataagcatctcagtgtttctggcctccaaactgagagcatcttcactttcattgctgaaaatgcctgttctctccatacattgcgactgccaaggagcagtatgaatgattccattgtggaacagattgctgggaggctttctatgatttctttcttggatgtgagctactgtattaaaatcggtccctatgcacttgagatgattggcaagaactgcaaactgctagaagggttgtgtcgaaacatgcacccgttggatactgcaagcaagccgcttcaagatgatgaagcatatgcaattgcctccacaatgcctaagctcaagcatcttgaaatggcttatcatcttatcagcacttcgggtgtccttcaaatacttgcaaactgccctaagcttgaatttttggatcaaagggggtgttggggtgtgacacttgaccacatgtttttaaagcagaaattcccaaaactgaaggttttgggggcctttgttcttgacac

SEQ ID NO: 61660 - DNA, 711 bp, Arabidopsis thaliana landsberg
atcacttaagctcatctccaatcactttaggcattaattgtgatgtctttggtatgttcttgatttggtacgttgttctaataatgattacgcaaccaaattaaatataatgtttatatgaattggtcaaagattagtacaatgatgcaatctcctttttagtggccaaccttctcaaaccaatattatggatataatgaagatctacaatattgttaatttttgtcatctcggccgtatgattttaatatagagcgatctcatcgatttctcaatatttacggttagctttttgaaaaaagtttacttccttcaaaaattttttgcgtacaacaatgaattcgtttcaaacatatatcttagggccattgcttttgctttggattagagttaccatttccatttgctacaacattttcttattatccttatctatgggaaccaggaccacatatgccaacttgattcacaacttctatatctcaaaagaatttcatttacacgtcaaaaactgccataaatacattcacacacatacaagaacatacaagaacacaagaagatttatgagagcaagagcaggttaattagaccctttagaagaattggaacgtcttctttaaagatcttgaacatttggttaccataaaacgaatttgtaccctatgtcccattacatgcattttttataaacattttttttctggtaaa

SEQ ID NO: 61661 - DNA, 700 bp, Arabidopsis thaliana landsberg
accgctgccggcatcaatgacagcattgtcgtgggtggcaatttggcgttgagcagcagtgaccgcattcatatcaacgccacgagcggctatttggacaccgctgactacgttttgttctcggtcagcacgggcacaaccatggcttcgaccccggcgctggtttgggatggtgcggttcctggaaattacctcaactacagtctgttgcaggttggcaacaacgtggtgcttcattactcgtccgccaccgcaccgtcagttaccgcgtcggccaatccctcttctgccacccgcaatcaggcggtgacagtgaccgccaacgtgacccgaggcgacggcaacatcgtgggtgttacggtggatttgacccagattggtggctcaaccacggcgggtctggtcttggacagcgcatacagcactccggctacttatatttacacgaacacttttttggtcgctgctggaacttctttgggagaccaatccctgatcgttacggccaccgacgattcttcgcccgcaccgttgaccgggacctatattatcacgccctacacgatcacgggcaacgccgtgacttgggatggtggcggaactgacaataaatggactttccacccgaattggacgagcgacatcgggccgggccttattggcgacagcgttactttttctggcagcacgcaactgacgc

SEQ ID NO: 61662 - DNA, 506 bp, Arabidopsis thaliana landsberg
tgtttgtcctttttttcaagttacataatcgattgatttacggaaattgccaacccatgaaaagtcatcttaaacataatcaagtataactttagaaatatatcaagatggtttaaggatctttcaactcaatcttaaaaaaacttaatagctatggcatataatcaaataagctgtaatttgattagtgaaaataactaaaatgggtcaacgctcaaaatactacaaataaaactgttgaaatagacacataaaatttgtggctatttcacagtttcttatagttgaattggtttatacttatcttgtgtcttttgtctagaaatttgtggcaatctagaaattctcttttgtcttttgaccttttttcatgggtcatcacctatttgttttattctttttaactcggggcaaaacaatttcttcagccgatttatattaattaaccgagagtccgagaccaatataccatgactaatcatcacactaataatgacagagcttat

SEQ ID NO: 61663 - DNA, 995 bp, Arabidopsis thaliana landsberg
caaaagccgacaagtgcgtgccgtttcgtgcacgtttagaaggcccacaaagcctcacgcgcctcggtcccctcgacactttctcccctttatggccctcaaaagccgatgatgcttgaaccaatggcatttccgttaattcaacgaacacgtaaggtcaattttatcgattggcacacgtgacgctcccgagacgactaggctcatacgtccacgtcagctaatcaccgagccatttcaaattccaatcgtataccaaccgttcgaatgttcgatggaactagagccgttcgatcggaggaattcgaaaattctcgcgatacgataaaaatcgtgcgttacggctctgtcggaacaaatctaaagctgactaaacgactctgacacagctaacttctctttgtgaaagagagtgtcttctgcttttgttttttgattcaatttcgaaattcaaagttctgcaactaattctttagagggattctatcgtccagacagcgaacccagaagctgaagcatagatctttgtttccaggtaattattaaatcgtttaatgtgacacagctctgggtttcaattgtttcttcatgttctcttttgaatctcttgcatgttacacaagctctaaggaaaaaggttttttttaaaagcattttttgttccttttcttatagtaaagacaagttgtggatttgtcaccaaacttgtgtgtagtgtgttttagtggagtttggttcgaactcttatgaagtttttatgcatacgatttattgaaaaagactcacatcttctctttaaaacaaagtctctcttctctctttattgcttttcctcttaaaccagcttaatcttcaatctttgtggtttttgatctgtgtttgaattgaagctcttgttcctcagaagggtattcttgtcttttgactttcgtttcccaggagccttctcattaaaaccaattcaacacaatcatgtaatagaagataaaaataaa

SEQ ID NO: 61664 - DNA, 1794 bp, Arabidopsis thaliana landsberg
atgtgtactgtttctcaaccatcaaatgagattatggatggaatactattacttgacacatgcgtacgtgattgcgataaacgaaaaaaatttatatacaatcacgatgaacgattttcagacaaaacaactatttctacgctactagtaattaatacacgagactacgacggacaagtggtatctaaaacacgttggaagtttataaactttgcattcataatcttaatttttttgcgttctttgaaatgtgtaaagacattaaacatttgatcgaccattattatttgcatggtagcttattatggttagaattacttgactaatctttgtaatttcttctttggtaaatacacatggatggtccaacaagaaatccaattgaattcgaacatcggcttcttgtttttgaatttcagtgcaccatataaaattcaatgaatgcatcatgctctagatgtataagttaatattcatatcgttatttctttccatgggacttggactagtaagtgcgaccatcaaatttattgctatattaatgtctaattttcgtatgtgatacattcaggtggataagaagaagccccatatccacatatgtatgcatagccatgcttttatgtttttctccatgcatattttgatccaagtacacgcgccgcgccggtatgtatatgttaacgcatgcgttatataagcaaacatatatcataaatatgtggaccgggacgtgaaggaccaaacaattttgacgccgcaatagaagacttcgttttatttgatcgttgtattatcatttgacgagagcgagagacttgatttcactgcaacgtagggcttaaacttaaaattaaatgaatgacttgtgattttaaaagtattaaatatacaaggacctaaaacagacacgtaaagccccactctacggatatggtgacctgtaattaagctatgattttgagagattgacaattatcaaactatcatacgtaaattacatgacatttgaaaactataagctaacaatgcaatagtcgaaactcaacctctgtaagcaattggcattgagacgagacgaaattgctaaaagcagaaacaaatgtttgttttcatttgaacataaacattataaccacaaagaaagaaagaaagatagatgcaatgggaaataagatgatcaccactacaaaactcgggcctaaccgaaacaaatgggaacagctctaaaattacaacttgtattaccttttataacttaagcagagtttaaagtctattcacctcgttttccaataactaacgtttcttaatccctctacactacgataagactcactggaattttgcttaatacctaatgtttttggctacgtaacaactccaccacagctgagaccactcctttcccctccactgttatgtccaaactcggatcctctatcttcttattcagtagcttgtccacctctcccctcaatctctgcacaatcatattatcctcttcgcatcacaagaacacatgaagaacaagaaagatttgacagagagattccaattttacctgtatcagttctaagatgttcttcgaggctgagaaatggagataccctcccaacatctctataccttccccggttttgcttgggataagattgccaccaaacataaggagtgcatagtctgatatatttgtcgagtctcggatataaacacttgtcgtcttcaccttttcgctgtagaccaagtacggcaaagagaagagattcactcttgcgttgacagatccagggt

SEQ ID NO: 61665 - DNA, 1337 bp, Arabidopsis thaliana landsberg
tagattaactgagcctgtttctttgaaactactgtaagagagaatttaaactaaattagtaccgaagataacattatttcagaatcagaagaaacatcagagagagaaaaaacaccttatcccaagcccataatagcttctgttcttagccccgatctcaggattgatgtcaaaactcctctctcgtgtttcaacctatattgaagcgagattttattagagactcatatattataacacattatggttactaaaagaagtttatttcaacctgagggatttggtttcttccagatggttcaacatttggcctgaatactcgaactggtactggagtactagaagaagatcccttaacaacgtttatgttgttgaaaggtccaggggtttctgtaacgctactttcataattcttttgtttccttcttggagcataaccaatttcgtgacaccttgaagacctatcaaacagaaagataataataacttaagagaaagtccaaaacctcaaatctaatagtagtagtggcgagaatatacgatgataataccaatagttcttttggtgtgtgaccaatcggctttcgagtttagcaagaacgacggttcgctcaaatccttgcttattatgagctggttgtatgaaattagcttccaatattccaataacgccacgtccatcacttccagcagcattccaaaccctccaaaatggctgaagaaaatgaagttaagataagtactaacaatatcaagactaactcggctggaattattatcagtcaccttgataagccggttcttatggtaaacattgaaaccttgtatgtcgatgtgatgatgagcatctttcacaaagccaagctttagagaagcaaccatctggagtattttttgaaaacataagagaaatttttgagagtgttttaagattatgaaaagtgagactaaggtaaggtaaggtaatacctcttcttgatctggccattctggagaacgcataggtttgtatgttttctcttcaatcttcatcatgtcgtctaagacgctgtgatgttcgacatcttcgccacgaagaatgattctgaaattatccggacgtttgaggtacagaattgatgcataactctacataaaaacaaaaaccagacaatggtgaatgaaaacttaaagaagaagaaataacaaattggatttgtgttaagaaacatgaaacatcatacacgtagcgagtgtcgataagtcagccaatgccttgagttaggataagttttagcaaaataaatgttcttctcatctctgttcacacctctgagttgaggatccggtatcaaatt

SEQ ID NO: 61666 - DNA, 506 bp, Arabidopsis thaliana landsberg
  unsure (1)..(506): unsure at all n locations
tccatgatagcggtaccaagttcttctttgttgagccctaagatgatcagattcataagcaagcatctcttgttaaatatgttcaacaccaaacccctccattgcccaaacnnnnnnnnnnnnnnnnnnnnnnnnnnnnnnnnnnnnnnnnnnnnnnnnnnnnnnnnnnnnnnnnnnnnnnnnnnnnnnnnnnnnnnnnnnnnnnnnnnnnnnnnnnnnnnnnnnnnnnnnnnnnnnnnnnnnnnnnnnnnnnnnnnnnnnnnnnnnnnnnnnnnnnnnnnnnnnnnnnnnnnnnnnnnnnnnnnnnnnnnnnnnnnnnnnnnnnnnnnnnnnnnnnnnnnnnnnnnnnnnnnnnnnnnnnnnnnnnnnnnnnnnnnnnnnnnnnnnnnnnnnnnnnnnnnnnnnnnnnnnnnnnnnnnnnnnnnnnnnnnnnnnnnnnnnnnnnnnnnnnnnnnnnnnnnnnnnnnnnnnnnnnnnnnnnnnnnnnnnnnnnnnnnnnnnnnnnn

SEQ ID NO: 61667 - DNA, 154 bp, Arabidopsis thaliana landsberg
aaacaataacagtctaagttcatctaaccattgtatcttaagaaaacacggcggctgggtgggtggcatttttgatcaagagagcgattggagccgctaacgaacagaccagcatgaacctctgcaaagttgataacagagccaccggaggcgg

SEQ ID NO: 61668 - DNA, 990 bp, Arabidopsis thaliana landsberg
attactattaaccaacatttaatatggtcttctaatcagattttctctctatcaattttctttcatctttctcacaacatgtatcgtatgttttctctctcaaatgatttccgacctatggctatcaatctaatgtaacttagatctctcttttcctttttagactgtcgcatctttcatttccttattgacctcaaacggcctacggatactaaaatccactttagcacacaaccaaaaaaaaattaaaaactgtatagaggtaacagtgactagtaggccgatattgggccaaaaagtaggaaattccattaagccaggcccattataaaatgcccatttaaaatttgttttgttataggatcacacgaaaggcggtctattattttgttcgttcttcgtttattcacagcaatcgatttgtgtgtgtttcaatttctaatagcttcacaatggcatcgtctggatcagccgacgaagatttccagtctcgcgttgcgaagatcttcggatctctacccttctctcgtccttcgtcttccaagttttccacgtcgtcttctgctccggcgtcgcggcagcaatcggggtcggtgtggactctctccgacacagaggtagagaagcgggagtggaagcgagattcgtacgatagagacgagattccttgtgcttcatcctttgacgagctcttaaaacagcagaagccttccgaggatgatctcaaagatattgattgcggcgaggattttgatggtgtgtggagtatcagagcctccatgggccttgatcgcactctcgatgacgaggtaaatcaattttggtctcttaacgattgtttctcattgcttagctaattgaaattagggaacagtgttggtcttttctcttggatttggtagattcatatgagaagagcattgaatttttaatgtagtatcatattggtttgtgtgacttatagagtttttgtacgtgaatcatcaacct

SEQ ID NO: 61669 - DNA, 847 bp, Arabidopsis thaliana landsberg
  unsure (1)..(847): unsure at all n locations
aaaaaaataaaaaaatataaaaaaaaaaaaaaagaaaaaaaaagaaaaaaaaaaaaaaaaaaaaaaaaaaaagaagaaaaggggtactggagagncaataaaaattaggaaaaaaagcaagaaaaagaaataaaaaagaaaaaaaaaaagtaaaaaaaattttattatgaaaaaaaaaaaaaaaaaaaaaaaaagggaggaaaaaagaaaaaaaaaaagaaaaaaaaagaaaaagagaaaaaaaataaaaaaaaaaaataagaaataaatagaaaaagataagaaataaaaggaaaaagtaagaaaaaaaaaaagaagtatagatagaataagataaaaaaaaggaaaaaaaaaaatataagaagaaaaatagaaaaaaaaaaaaaaaaaaaataaaaaaaaaaaataaataaataaaaaaagaaggaagaataaggggaaaaaaaaaaaaaaaaaagaagaaaaaaaatgaaaaaaaaagaaaaaaaaaaaagaggaaaaaaaataaaaaaaaagaagaaaaaataaagaaaaaagaaaaaaaagaaaaaaaaaaataagaaaaaaaaaatgaaaaaaaaaaaagaaaaaaaataaaaaaaaaaaaagaggaaaaaaaaaaaagaaaaaaagaaaaagagaaaaaaagaagaaataaagaaaaaaaaaaaaaaaaataaagaaaacaaagtaaataaagaagaaaaaataaaaaaagaaaagaaagaaaaaaagaaaaaaaaaaaagagtgaaagtaaaaatgagaaggagaataaaaaataataataagaaaaaaaaaaaaaaagaataagaaaaaaaaaaaaaagaaaaaaataaagaggaaaa

SEQ ID NO: 61670 - DNA, 424 bp, Arabidopsis thaliana landsberg
ctttttttaatatatatatatatatatttcctttgacaaaatataatattgttaacttatacaaaattataataaaatcatgttatccactacatttacttgatatggtaaacaaaattagaagttggatgaaatcagaaataaatgtgtatgtatcaccaagttgataataattagtggcctttacaccgaatctggtccattactttttttttttaattggacatatagtagggttctccaacttgcataaacgccgcttattttcaatttaattcggaattaaacaaatatggtctgtacataaccatgataacattgggtaatcaggcctctcggagcctgccttgaattaggggacgaaagcaatgcttccgctggggaaatagagccctacattatacgccgcccattacccaccatg

SEQ ID NO: 61671 - DNA, 1336 bp, Arabidopsis thaliana landsberg
tttctctatctatagtgaaagtcttgaaggttactcaaaagagataagggaactatgcaaaaggttgttgaagtatatagcaataagcttgggtctaaaagaagagagatttgaggaaatgtttggggaggcagtgcaagcagtgaggatgaattattaccctccatgttcaagtcctgatcttgtcttaggacttagtccacattctgatggaagtgctctcactgttcttcaacagagcaagaacagttgtgttggccttcagatcctcaaagacaacacttgggtccctgttaaacctcttcccaatgcccttgtcatcaacattggtgataccattgaggtattaattttaccatatcaatttcctataattattatatcacaatttaaatgaagtattttaatttgtggaaattatatatatatatgtaggtgctaagtaatgggaaatacaagagtgtagagcatagggcagtaacaaacagggaaaaggagaggcttacaatagtgacattctatgcaccaaactatgaggttgaaatagaaccaatgagtgagttggttgatgatgagaccaacccatgcaagtatagaagctacaatcatggtgactatagttatcactatgtctccaacaagctccaaggcaagaagtcccttgattttgccaagattctcaattaaactattattaatttcaccccatcaaatctccattaactagttaccacttaatttgctttctttaataagaaaaattatttgttgaacttttgtgtgtataatgtataggaatgttccccacctagggtttttaatgtcatgattaaattccccaatgtgaatacaacttgtaatattttatatgtatgtgtgtgtgtgggtggaattaggtgtgtattttatgtatataccgaaaaggaacaacaacaaaaaaaaagatgaaaaaactaacatttcatccaattttttatgttgattatattcttgcatttagtttcattaatttgtatcattataaaaatattccaaagattatcttcttaagtctcgaatctcaatctaaataattagtctctaagagggatatacttaggacttgagtgaaatcaaatcttggtcttttattttctccttcacgggatgtgaagtagaatgctcaaagatttatttggacaatttggatttcggaagataacatcataagaaaacaagacaaaataaagaaaaagggtccattattattttatttgttttgccaaacgccaaaaggcttccattacacgacaaagaacaaaatattaaactctttttgaatattagttaataaatg

SEQ ID NO: 61672 - DNA, 637 bp, Arabidopsis thaliana landsberg
  unsure (1)..(637): unsure at all n locations
attttcaacggatttctttatggccctttttggcgaatatttaatgtctttctttttttctttcttaccaaatactctgtcaaaagccatctatatatttatcttttcaacgaaaactcaatctaaaaaaagaatgtaataaacgtaaatgagatttttttttaatttcaaacaaaggaatgagattattattattgttttgttttgttttgtgtgttttcaatccataatccgtaatctcgagtcttttagccgtttatgatattttcttagtcaaaaaatttgtctaaagagaggtcgtaataaatgaaggtggntttttcttcttctttttaatttagtttggtactaataataataatgaacaattaattggagataaagaacttctggatcgtggattattcagacaaaaccatgtgttttattggtcggagtcggcgcgtaaaacgctgttagaaattggacaaaatttggccattatgggccgagttacggtttagagactctcttncggcccaaccggttcgtgggaaaaattcatcatattatacatgggatcagcaaaacgacgtcattttggcggcggttttctcagcgtttcctaataacaggtatattattatacatgggatca

SEQ ID NO: 61673 - DNA, 487 bp, Arabidopsis thaliana landsberg
cggacggggaggtagacctcctgttgccgttcccagcgcgctgatcagtcacgcgcggagaccgggtcgagttccggcaggtctgtcagctccggcatgcgactcctccatgtaactggctaagattggttcgacagtcacaaccataagacggcggaaataactggtcaagtggatttcaacagtcacacggatactgtcgtgcggacggccgtggcactcgtcaacctgctgaccgaaggcgaggatcgcagccgggagtaccggccgccgcagggcgccgagcgggcggcgcggctcaacgccctgcttaaggcggccggcagccggaccgaggtcaacgcatcggaagcggaagcgttcgacccagtggcggccgcgctccgcgctgtcttcgcggccgtcgccgacggggacgtctacggcgccgctcgccgggtcaacgacatgctcaggaccactggggcgcacccggtcctggagccgg

SEQ ID NO: 61674 - DNA, 1877 bp, Arabidopsis thaliana landsberg
ttaatggtcgctcatagttggcttccatttcaatcaaaaaggcatgtccatttacttctcttctgtgtcgctgaacatatggcttctggcatgatctaaattatcaatttgtgacattttggcatatgatatgtgaattttgaaatagactattcagatagttttttctggaaatccttttacagcttgagaactctattgcacaagtcgtcaacgccttctagcttagcacagagatcaccaaatgcagactgggaacaaatacatgtggctaaatctcttgtgaggaaagtaatcgaagatagtttgaagaaattggagattgagccctcaagatatagtaagccgataaggtgggaattaggagcctgttgggtgcaacatctgcaaaatcaagcttcaagtaaaagtgagtctaagaaaactgaagatcccaagcctgaaccagctgtcaagggtcttggaaagcaaggtgcactgctgaaggagataaaaaggaagatcgatgtgaaagctaacaagactgaacagggcaaagaggcccctgctaatgacactgacaatacatcagagactgaggatcaaaaggaactcgagaaacaaaacgaggaaatagaaaagatgtggaaagaactggtgacagaaactgcatatcagcgccttaaagaatcagaaactggtttccatctcaaggtttgtctgtttcttcagtggataagatattatagttgaggctagttgtaagttataattcataaatctctggtatctatttagcctagtttgttataatgaatcttaccttgtgttcaccctctccatgaacctgttctgcagtcacccaaagagctgattgaaatggcccgcaaatattacactgacactgctcttccaaaactggtcagtttctttgatctcttttgtcctgtttagggaaaatcctcagttcctcataaatttagacttgatatgttgcaggtggcagactttggatctcttgaactctcacccgtcgatggaagaactctgacagactttatgcacaccagaggcttgcaaatgcattccttgggaagagtggtaaccatttcattttatagtctttggaacccgctctcgtcaaactagatggtagaatgtgcttacgtagagaaaagcaaagttctccatttcttttaggaatcactcttttctcctctctttttaggtcgagctggctgaaaagcttcctcatgtgcaatccctctgtgttcatgaaatgattgttcgggcgtacaagcatatactgcaggctgttgtagcagctgttgaaaacaccgctgatgtggccacctcaatagcaacatgcttaaatgtcctattggggacaccgtctgacactgagagtgtatacgatgaaaagattaagtggacctgggtggaaacgttcatttccaagaggtttgggtgggattggaagcatgaaggctgccaggaactgagaaaattttccattcttagaggactgtcacacaaggtttgcaactgtcagtgaaatttgttttcaataatgactatctaacctgagattctcatatgttgcattactcatcggttcaggttggactggagcttgttcctaaagactatgagatggacacgtcttatccttttaagaagtttgatattatcagtatggttcctgtgtataaggtaccatgcataacgatcttactgtaataatcagctataatgaaacagtgatttgtttcagttacttaagaacactgctcttgtgtgcagcacgtagcatgttcatccgcagatgggcgcactttgttggaatcatccaaaacctccttagataaaggcaaactggaggatgctgtcatattatg

SEQ ID NO: 61675 - DNA, 503 bp, Arabidopsis thaliana landsberg
  unsure (1)..(503): unsure at all n locations
tgaagcaattttgnggatatcaatctacggaaatatttttgcgatggatctaatattgtgacagattggtttcgaacataaatctcttgttacatgctatttgccgaattgctagaaaaatttccttgcaaatatataacatgttcttttgtattgaatttgtgagttacattcattgctatatacttatattgatgacatatacgttataatcgtttggaacagatctttcagctatacattattatgttggtatgctacgtgatactcttttaacacccaacaagtaacaaatttttgttttcaataaagtaatataataaagtcttgcactgatttgaaaaagttgagttcatttagtatttttgacaggtctcactcactacaatattcatcatcattccctaatttatgacaaacacaattattatccaacctaaaaaaataaaacattatatagttagaattagaaatgattaagttttttttttccttgtagatct

SEQ ID NO: 61676 - DNA, 604 bp, Arabidopsis thaliana landsberg
aagcgcagtaaccagtgcgactcggtttcctgctcggtacccgacactaccgctgcgaggtgtacggcttccctcccggcaccgaactgcgcgtggaggcgacgcgcggtttccacgacgacagcggcatggccgcgttcgcctgccgcatcgaatcggccatcggctgcgccgaggcctcgctcaacgttttcagcccacccgacgcggaggtctttttcgccgcctccgcgggagaacccacatgacggacaccatcctggtcaccggctccagccgcggcatcggtcgcgcgattgccttgcgactggcacgcgccggctacgatctggtgctgcattgccgctcgcgccgcgatgaggccacagccgtcaccgccgaaatcgaggcactgggccgccacgcacgcatcctgcaattcgacatctccgaccgcgccgcctgtcgcaccgcgctggaagccgacgtcgccgaacacggcgcgccgtacggtgtggtctgcaatgccggactcacccgcgacggcgccttcccggcgctatccgacgacgactgggacagcgtgctgcgcaccaacctcgacggtttctacaacgtgctgcat

SEQ ID NO: 61677 - DNA, 1239 bp, Arabidopsis thaliana landsberg
gcatgctcttgaaatgttcgtcatgttgatgtggaacgcatcagtaaaaggaagcctggtgaagttgtttttcttttgcgccaacagctttcttttatcttgtggcttacgaatggaattatttgagtcacgtccatggtaacataaattataaatacacattgttttgaatctcatatgtcccaattgtagtctggtttatacatgaatatggttagattctgcaacgtgtattcacaaacacatgctatcttatatgcttaatgctcttgcgaactattaaggacagatacatttgcattctcacttggacgctatttttttaactgtagttaccacctcatgagcctggtgtggtccagagagcggtgaaccattttttacaggttaatatctgaattcttttcgaattgtacctattagatacaatgggttttcttctcattccatggccactcccacaaaattatcctgtaactagtgatcttaaccaaatttacttagacctgttgacaatttcgtttaagtttctccaacctgtcttttccttagtgcttactttcatctactttgacctatctactattcgttatctcattaaaatcctaatgttgttattaagcagagaaaagatggtgatgttatggtgattgatgttcggtgtgtcccaagtaattatcatgccagatataaggcccaggagcgcacgtaggtattctaatttagtttcagttgttctagagattttgatgatccatatgtgttctgatagtattgtagagtactaggttatgatttgaaagtatattcccttcaattggaaattgagaatttattcactcattgtagatacttctaccgcttgctatccgggtcagatccattatcaatccttgaaaaagaccgttgctggcatgttcctgaggagttaaatcttcgctttatgcaggttcacttactaactactgtattgtcagcttaaatatcagcactgatccaaaaaatttattttcccttaaacgaagagtccttttcacagtgagaataagagatctctaacaacatcatcaatgattggtgtacaggaagcatgcagagttcttgttggatctcatgattttagctccttcagggcagctggttgccaggtcaactttctttgtctgtttttggttaaatatctctttatatcatcctgatacacaatcaatatgaatcttttgaatggttggatatttt

SEQ ID NO: 61678 - DNA, 1465 bp, Arabidopsis thaliana landsberg
cccacaacataacaatcaacaaaaatataacactatgataaaaaatggaatttgaaatcagtagaagcaaatatgaaccatgcatcttttcaatttcaatcacagttcaaaattgaactgagtaaatatgtgaaacttacgtagagcatttggccgacattaccgtcttccgccggagactctggtaactgaattgcactccggctagacggattgtctgtaacgaaaccaaatgggttaaaagatggatcctcatcacgatcgtttttactaccaccgctgtttccattctccgacgtggcgtttatgacagagaagcggattttcgacggcgtggcagtgattctagaggcggtggattttgtggcgacggtggaggagaatgagtggagcagaggaagaggagagagcaaagacatttttgattggtaagtaaaaaagcgtatttcctgtatttatatatgcgcctcgaaagagagagaaaatattgaaaaattagtggttaatgatgacataaattaagattgtgggtaaaatctagaaattgatatattttttttttttatatatgctgttttataagctcataaatatcacattcacaagtttgtgcgttttactaatgtcatagactcatagatttcatttcagggaatctatgtaatgcaattttggatttcatttcatagcattccctccgtttcagtgtaattgtcgtttaagtgtcttaagtgaaggaaaaacaaaaatgatatgtttaagtgcgaaacgacgacgtttgcagcacgtgctttgaacctgtgtgtgaaaaccctaagcctaaggtgtctctatgttggtgaaaatgctagagtcaccagttcgagccccaaaagaccaccttaccgtcagaagaagaagttaaactacctaactgctttcaaaggtcaatacccgcgcaagatcactctcgggtcggatctttccgtgtaagacccgtccggatctatcccggaccgatcaatttcacgagtgttctccttcaatcgaataaagtcaagtgctttcatcaaaatttacccgcgaattgaagaaggaagaggaaccaaacctccaatggagagaagtgagtccgttgatgaagatgtatgtgtttaactctaaaactcctcttttcaattctggattttgtgaagattatgaatcgattcgctcaagggttgtgatgatgttacatttgatttcattgggttgattatcatttttgttcagctccttcacaagtttgatgcctcaattgagtaaatagggtttgctagaatcaaagtttatagctttttgttattacaggtccaagcatctgcatatttagagaacgacgaggttcgtgaaagagatgatccaatgtcagatactttacggataggagaagaagctctagtttgtagtagtgagcatgagattgatgttggattttgtcaaaacg

SEQ ID NO: 61679 - DNA, 1563 bp, Arabidopsis thaliana landsberg
gctctcagctttttatgtaacttgaatgaattctcaagaatttgcaaagagatgtgaaaaagatttgtctgtgagtaaaaagagagagagagagaaatgagaataaagaagaagaagaatgaaataataggaaacttatgaagacgataagagagattggacactgatcgttattaaaaaaatacccaaatcctgacaaatactggagagattaatagagagaaagatgcatgcagagagagagagatcagtagtctctcaataatgaatgaatgaatgaatgaatggtacgaaagagagagagagagagagcgacgagaagagatctctttgttttcgtctttgcttgtatgcgcgtgagataaggcgcgtggtgttgtggctcagcgtcattactttcggtcctttggtttgtgtttgtttccttttttctgaccctttgaaatttctttctcaccttatccacgtcatctcttcttttattatctaaatcgaattcctactttttgataaaatacgtttttcgtttttgtattttaagggaccagaatatagtagtatgagtttgttgtattatactacaccactcgggagtatcaacgaattttgtcattttcatacaatggtgtccagagacttattacaacaccttaattaggtatgcttatctaaacttaattcgaatcattcaaatcataatactttatattttaactgttatgtttatcagtctatgcatctaattggctctatatatatatatatatatcatttattttacttggcacatgataatattatgtttggcttcagccgaataaaaacatgctgtagaaaaaatctattaaagaatttatcaaaaataaaactcaaatttttaatagttttgtaaatgatttttgcttttgatcaccaatccatcgattaatacgaaataaatatctttagttataatataaatgttggttgttttttgttggtaaaaacatactgtaggaaataaataatgtatacaatcattaagaaaatattgaagcactcaaattgtcaatatttcttattgcatttttatatataaacttccattctatgattgatttattttctcaagttatatgtatacgaagtacgttgtctaataattgagtcctcgctcccaccatcggtttgccaatcctacacgaatttgattctctaaataaagacaaataatattctccaagccacactcaaaaaaaaaaaaaacatacattagtagtgggaaacagctgcatattccacgtgtttgcccacgtagattaattattatttctctttaatatttgacgtccacgaaatatatatacaagtggattgtgtttttggctagcgcgtgagaacacgcagcaaactgcgagtagaggaaacgagacgtgatgagatttgtgtaaatctgggccacttagagtgggatgtgggacctattactctgatgtacaaattctatgtattttgttattataaaaaaaggcggcttaatagtcaattcttacccttacgttgatcgtaccatcctcgacttct

SEQ ID NO: 61680 - DNA, 182 bp, Arabidopsis thaliana landsberg
  unsure (1)..(182): unsure at all n locations
gacacctgcaacaagagcagactcttgcctttcnncccagcggtanatgagcctttcgagaanggcaanaaccanntcacgtggagccgtgtaaacctgcgacagccacccgcaggggacccaacaatacagggggggnnnnnattnancccacaaagggcagngaaaccacccaagaccaa

SEQ ID NO: 61681 - DNA, 372 bp, Arabidopsis thaliana landsberg
tgaaacaacgacgcgacaacatgggacttgttttacctttccttaagtcttgtttaagctactcattagtgacatatcaacacaagataaagtgctttatctatgcaacattggaggtctagcaaaactcacaagtaagtcaatggaggtatcagccaaaaacagtggagccggattaagtttctcatccatgaccttatttttcttaaggctggtaaacaagctattggatcgaactcccctaggttggattacaacgtacaagcacatatgaaaaaataaagggtgaagaataaagtacatcaggaggaatatattctaaatgattaaaatgagggaacttacgagtaaggaataatagaaatggatatg

SEQ ID NO: 61682 - DNA, 522 bp, Arabidopsis thaliana landsberg
  unsure (1)..(522): unsure at all n locations
aaaccaaagaaaaaaatacatgactttttcttatatatacaaatcttttttatttaaaaagccgttagatttataaagcgtttctcgatgagtcatgtaatctctccttttgtaaaaaaagaatcatcatctaatgcataaacattgagaaagagttgtagttttttttttaattcgttcatagagtcaccattttctttcttgatgttatccatttctccaggctttttaattgccacgtgggaaattatagcaaagtacaagtatgaatgtgtgtaaggtcagtcatgtggcggcaatatgtccacgcaaattaaacgtacgggacccgaaggttcctcgataagagacaaacaaagttcactgaatctttacttctctgtcttagaacatttgtggccgagacacacgtgaaaaggcggcctttttaaccgataactacaaagctccggttccaatttatctaactcatttnttgttctaaatattatctctagcattctcagatagaactttttaaaa

SEQ ID NO: 61683 - DNA, 1217 bp, Arabidopsis thaliana landsberg
acaaccgaagcgttgctgctgctcctttaaaagctcatatcatgaacaagggaagcctgaacacagcatggagtttgcttcttcttcttccattaggccttttggtttagtcttgtgaattacctctagccaattcggttcgatttcggtttgtattttccggtttacttgttactttggcttgtgatttagtcttgtttcttagccaattcggttcgatttcggtttgtaagtttacttgtttctttgcattactctgtctgagtgtttaatacaatgttagttttggttaatatcctaaattcaaattggaaagaaaacattaaaggccggatcggttatactactgtggaatttggaaacaaatgttattataagtgggcctaatgggaacttctgcccattaaaggcccattatttgaacttattagctttaagcttgtccacgatttacattagctatcttcttcgtctccgggactgagaccgctctctcttccttatcctccatcttccaatggtttaatccagcaactgtcgacgatgtcgataacgtactccgctatttcctgtaagtttcttcctcactgtgtgtcgaatccgtcctcaatgctcaattttatccatttattgtgagactgtgattgattttggtttccgttgttttatccagctagtacagtttctgggttttcaccaaaaagtgtaccttttgctattcatagcgtaaccaggaggcaatttcttaatcccaacacgttttatagatttgggttctctccttctcttcaggtcagattcctttactagtcagtatcatccaattctccagactctgcttcgttgttgttttggttcttagaattagaccacacttcgttgcttccctttgaagtagagagtcaatgtttactgatatgtgcggatatgttgtgcagggaagtagcattgagtttagccttcagttgaattcaagagttgtgcttagtaaagagcgtcgatctctgccattagttgtgagaaatgatccgccccagaatgaagacttacctaagcagtacacaaggcgagagaagaaacctttcccagtccctattgtggacctgagacgagctgcgagggagagagttaagaacaacaaagacaaacctaagagacctttacctccgcctaaaaatggtatgggttgtgaagagccttgtgcctctcgcttataa

SEQ ID NO: 61684 - DNA, 574 bp, Arabidopsis thaliana landsberg
  unsure (1)..(574): unsure at all n locations
acggtaatttttatctttgtgtcttatgaaacnagcttttttctttcctaaatatcaacaagaaaagcgtggatcgggacnnnnnnnnnnnnnnnnnnnnnnnnnnnnnnnnnnnnnnnnnnnnnnnnnnnnnnnnnnnnnatgtcgagaggtactgatactgaatccctatctaaatagactaggcactggtctatttttgaatgaatatacggtgcttgctgcaccatgaaacttctatatagagcctaacttggatctttatacttttggttactcagggagaagaagaagcaaggagaaagagcccaatctcagaaggctaacgaaacaatctccaagtgtctgggagatactctatataacccatctttcttggttgaacggaaatcttagaaaatcatttgtgacttctttttttgttttcttagcaacaactatgcccaagaacatatatatctcatttctaagaacatttcagacgtgtatatgtttgctttttttcctttcattacatgagtttacataatgttgattcatgagtattttatacattgatgaagttactgttggc

SEQ ID NO: 61685 - DNA, 335 bp, Arabidopsis thaliana landsberg
  unsure (1)..(335): unsure at all n locations
aggggggggagggggggaggagggggnagggggaggggggggggggggggggggggggggagggagggggggggggaggggggggggggggggggggggagagagggggggggggggggggagggagggggggggggggggggaggggggaggggggggggggggggggggggggggggaggggggggggggggggggagggggggaggggaggggggggggggggagggggggggggggggagggnggggggggaagggggggggggggaagagagggggaggaggaggggaggggggggggggggaggggggggggggaggagggggggaggg

SEQ ID NO: 61686 - DNA, 1334 bp, Arabidopsis thaliana landsberg
agaaaataaaaagtatttgcaagtaaatgatatatatataaacttattgatagaggtattattgttcaacacagacggttgggatatttaagaaataatgttgtgtaaaacacaaattaatcaggaaatggtattggagaacttgaatgtgcagtccgggaacgaccaatcgggagtgctcacagatatgctaactctaaattcaacggtcaggatcttatacagaaaccccgcaactttcttcactgtccacgtcacctccgctcccctccagctcagctattcccagcttatcctcgcatccggtcaggtaaaccatttcacattttattgatttaaccgggctggttattgattcttgatgaactaatttttttaacgtgtgtgactaaaatagatgggagagttctctcaacgaaggaaaagcgagagaatcattgagaccaaagtatttggggatcaaattcctctgtatggaggcgtaccggctctgtttggccaacgagctgaaccggaccaagtcgttttgcctcttaacctgacttttacgttgcgagcacgagcctacgtgctcggccgattggtcaagactaagttccactcgaatatcaaatgcagcatcactttttatggcgataaactttcaagacacttgatctctccaaggcctgttctgatcattgatgaaaatgaacagtataatgatgatttagagaaggttaaattagtttatgatttactcggtgatatatacatgtaaagagggagggaaatgttttacttttgtatataccacatttttcattgttatagtgcgtaaagatattcaatattttggaattaacttgaatagtgttgtcatcaactgacgattttctcttttttgagagaagtatacattaaaatatcataattacaaaatttaaatatttcaactgaacatgttagtagtcccaagtttaccacgtgtgccacaaattctaattacattctaacgattgcaaggatgctttaggggctgaagaagttagcatgcaaacccttttgagccaaacgcatagccgaggcaaccagaagcaaaacgctgagagaagcacctaggcaacccaccaaaacgttaaacaaccacattgggcttttcctttggggctttttgatagagatccacatgaaacatggatacgtaaacgtcacaagcaaggctattgctccaataagaaccgctagataaggcaagaacgggaatccaacggctatagtgaaacaaaccaagctcaaaaacacacgcaacatcatccggacaatgatggatgcaggcttttgtttcttggtta

SEQ ID NO: 61687 - DNA, 517 bp, Arabidopsis thaliana landsberg
aaaatgttataataattcggccgcatagacgcttatcaagatacccaattttaacaatatctattagaaatccttttaaagaaaaaatcaaccaaaacaaaatcatgtctacggacagccgattaatccctctagacattcattcataatctttataaacacaaaatatttaaaataaaaatatgttaaaatttgaaaaaaagaagaaaaaaaaagaaaaaaaaaagactaattctaataagcgtctagacgtttaggggataagctgtctctgaacaaccaattaagctttagctattttgagaacaatggatatgatgaccaaacccaactaatcacaagaataatatttacttatttaatctttttgcttgaatcatctactaatcatattcttccaaatgtattaatctaattgacactcattatttaccgcttaatttaaggtgatcatatccaactactaattaatcgatggctgagatcaagatgacaaatatgcagtagctttcggatt

SEQ ID NO: 61688 - DNA, 373 bp, Arabidopsis thaliana landsberg
cggggatgctgttcaccacgctcatcgtcggcatcgtcatccgtaagctggtgcgttgattgcccgagggtgactgggtggcagagtgacgaccatggaagagcgcaaagagtccgaagagcgcacggcaccggaaccggcggtcgcgtacggacttcggggcaagtcgttcctggtgaccggcggcagcagaggactgggctacgcgaccgcccggatcctcgccgccgagggcgcgtcggttgcgatctgcggccgtgacgccgacacgctgacgcaggcctcctccgagctgcggaaggagttcggcaccctgatcgtcacggtcgccgtggacgttttttgcttatgactgaacatgggagtactttac

SEQ ID NO: 61689 - DNA, 504 bp, Arabidopsis thaliana landsberg
cgatgccgaggtggtccacaccgacgaggtgatgacgtgcagagcatgttccacccagcgggccatcgtgggacggcggctcggttcgtcgggatagtgcaggaatccgcacagggcggtgaggcccatcaccccgccgttgtccgccagcgcgcggaggatgtcgtcggacttcgcgcggatgtgcggcgacttggccgcggggtggctgtggctgatcacgatcggcagctcggacagctcgatggcgtccgctgtcgtggccgggccgcagtgcgagacgtccaccaccatgccgatccggttcatctccttgaccacgtcgcgcccgaagcgcgagagcccgtcgtcgttcgcctcgccgcatccgctaccgatgtagttctgggtctggtaggtcagttgcagcaccctgataccggcaccgtaggccacctccagcagggagaggtccttgccgaggaagtcgcttgtctgcggtccgaggatgatcgcctcgcggcc

SEQ ID NO: 61690 - DNA, 1274 bp, Arabidopsis thaliana landsberg
  unsure (1)..(1274): unsure at all n locations
tgcgcgcaacccataaaccacaaaagattacaaagacaattagactcgtaaaagaaaatgagctagaatatcttcgagtttcctacgagatttcctttgacgctattttcgtaggaatttagtaggaaatttgcttcgaaattatgaacatcaattttcgtcacaatttcgtaagatttttgtaggtaattttttctaccataaatttggtaggaaaaccctatgttttcttgtagtatatcaatgttaagttgatctagaatacctctgaaactacagtatacattgtttacttccattgaacaatgcataagtatccaatcaaaagacaagcatgctacatagtaaaactagtttagaattttttgaaagataatttacatagaacctaatggattttgatttcatgatataggtgactaaaaatttaataagacatatactaatcataatgcaaacaaagagagacagagtaaaagattcaccgtttccaccacatctctcacaaggaactggatctccctgaaacaaatcaataagacattaaaaagatcaaaaactcaccaaaatgacttattgaacgattaagtagagaagaataattgatacaaaaccttgaagccgaggaatagtgagagagcaatggctacaacgagactaatggtgacaataaaagtctgtgtatcgatgaatcctccaccgccatcgaaggcgctacttaggaaaagaacagaagggtgaatgatgagattagctgagtgttgatgagcacttgtccgtgacaacttgttacggtttctatggtggtggctaattagttcaggtttatgagagaagagaagttttgttgttgtttttaacgaggaagatgaagaagaagaagaagaggaaagaagttgcagagagatgagaggtcgagtggccatggattcactcaaaaaaaaaaaaaaaaaaaaaatctatccctcaggatcattcaaagcaaagaacatgtggatggagaagagaaagagaaagagaaaaaaaaaaaagaatccgccaattaatgggcctaatgggcctgtagaaataaggcccatttagataaaaattgcaccagttataaaatctcagcagcttcgtcatcgagactaaatttctagggttttgaagagtctctctcgtcgccgtttgttattcctctgtgagcaaatcgacgaaaatgggtcactctaatgtctggaactctcatccgaagaagtacggncctggatctcgtttatgggataatcatc

SEQ ID NO: 61691 - DNA, 1271 bp, Arabidopsis thaliana landsberg
tttcatcttcctttactttattttcatttaataaagttccaatgagctactggattttcacctgtatatatcgctttcaataagctcttagtgaacatgaatctaccttgttttgtccatgattcactaatatgtatattgagtatataacatggaccggttatcttccgttatgagtgaaccatatcttagtttacatttagtgttaagtatataagcttaagtatgtggtttaattcatttgagctttgtaacaacattttgaggtttaagaaaagtttgttatctttccgtttaaaaactttctcttctccgatctactattaatgtatgagatattagaaccaattaagacatggatgagatattccatgcatggtctatataatatgtatatccatgattcactaattcttgaccgtacctgaataaggtacaaacaaactagttcaatgggaaatttaaactagtttttgtatacaataggtatcaagtctttaaatataaacttgtttttgccaacggttaaacagatttatagatcggcagcatggtacatataacatcacctttatatgcatagccatagcagatctatgacttcaccaaaagaaataaaaatatgtatagtgggacataacaaaatcccgctttaaattacagttgatgtcatttgagaggaagagaaagaagtatctatccatgttgacagagattggcttttggacataagtcgtttcatgtacgaatgaatgacaaaacgacataatgttcttctcactcaattccccatgacgaatcttatcgaatgaatggttccacaaaatatttggtaactttctatttgtcctttgtaccaatatgaatctttctctcgcagctacatttcatccacgtgaattttggttcatctgagaatgaggaacacattaattcacacatctcagctagggggattattaaccggaattcgaaatctattttaatcccttgtgtaaatttggatatacaagaaatctggattgtgaagcttgatccataattaaatcttatatccgtataatattcttctaatatattaaaaacattattttatcatatctttttaacagactaagttatactttcatatataaactagatgagttcaggttgggaaagttgaggaggcgtaagttcttaagttgttcaaacaaataaaatagtatcaacatgaagcagaagtagattatgttttagtagcaaatggaaaaatgttaagttgatatagc

SEQ ID NO: 61692 - DNA, 529 bp, Arabidopsis thaliana landsberg
  unsure (1)..(529): unsure at all n locations
aagaaacaaagttgtcagctacatcaaaaagaatcctcctttgttgctgctactaaaacttctgaagcgtgttgggtcaaataaggagaaaaaagaatctatctgnnnnnnnnnnnnnnnnnnnnnnnnnnnnnnnntcttagtcaacacaaaaaccaataactttcatgaaaacagaagaaaatagtaagtatatatctttcatatttctcaatgcttgtgaggtataaaatgatcacatgaagttgagaagacagagatccaacatagcaacccaatctcggaactttcagtctttgaagaaagtttcagaaggcattgtaccaatcccaaactttttccagtgaccggaatttccgaggatgagttactgtactagatctctttcttcccgacttccgtgattattttgaaagactttcttctatccatgaaagttgattcttttgtgtagatcaagaacaacatagaaatgagacaaacattgactaattactccgaaaactgacagattctttgtcatattttc

SEQ ID NO: 61693 - DNA, 1288 bp, Arabidopsis thaliana landsberg
ctcttctttggaaagaggctctctcttcctcacgctttttacaatttcgtccgttgatttatctgaagcgtgtagctcacacaagtatccacgagaatgggataataaagcatcttgtcgttgctggagctacgtggacatgggccttgatggcttagattccttgtcctttctgtttaaaagtattttagttcatttggatttttaatttgtacgttagatgcgtccttatgctgaaaaatgtttgcgaaaagctaatcaaaagtattagacaaattaatccctataagcaaaccatatatgtaacccatcctctagcttgcgagagccatgaagatggacaaaagatatcttgttgtggaccaaaaggtcgataagtttgataagttgatccgatggacttggaagctctccgtgtctacgactagtacgctccatccaaatagagtggaaacttaatttgtaacttcaatagaaacatgttttggaaaaataatatagggttattacgactcattagcaagtgtttacattttttcgcattgaataacattaccctcaattattttgttacaatatatatgtgaaggtttacttattctaagcagatttttaccacataaacatgtaaatgacatagtagagttaggtttgcgttgattgaggaaatgattattcgttatgggaaatgatgacgttcagaaaaattatctgcaataattgcaaatcatggaaggattaggtattgtccacgtaggataattaggtaacctgaagtgcatgatgatcctcattcgtgataacattgtgtcttccattacaattctagaaaatttaaccatttgagtatgtgtggataatgatgtaaagctaaccattattcgtggtcgggtttttcaaataaatatgttcggatattgaatagtcgtatgatgacgagcgattcttacctgattggtattctatacaataatgtaagcatgcaagatttaatatgtattttattttcaggtagacgcaaaacacatacttcttttattttcctaacaaaatttcgtaacacactgtgttataccccttttgtttcattagcgttcatcctcgaacacgatttagaaaaccctatttcatctacggagataaaaaccaactaataacttttgggtaaagtttgtttgtagttccaattatccttttgtgtttgcaatgtataagataggttggtttagaactgacccagccagaacctctggatttcataggtgacagtatatattcaaagtttagg

SEQ ID NO: 61694 - DNA, 749 bp, Arabidopsis thaliana landsberg
  unsure (1)..(749): unsure at all n locations
acatattactaaccggaaacgttattgagattggctgcgtttatagcctgttgtctccgaacacacgcgagacatatcataatgggggcaccaacaataaagaaaagaatgaagaagccgagaatcatatcaccaacagagttcgtgttgcctgaaccacctgtgtacccttggggttcacactccaaaccattcctccccatttgacgtgctgattcctcggacctttccatctgctttttgtacatatcctctgaagcctctgaagtgggcgtcgatgatccacatgatcgtcctgaaaattttcttgttatatcaaaaatgtagatatcttggcatttatattatgtatatgaattgctgagattggaatgaactggtttgatataataagattgttaccattgattgatccaaccaaaaccgataaagaaaagatgaagagaaagaggaggacacgagacatggctttttgtaatgttttgtcttgatgttgataaattagtgtatgtttacaagttaatggtatttatagaattatactaccaagtattttttgctcgcaacaatgtatttaaatgttttaatacatatgaggtcatggcctaatgggtgcatactaaaatggccaggaaagaaagattcccatataccgattcttattntgggaaataaacatatttttgttcatttgattaacaaaattataattagttacatgttggttccaaactatatattcatctagc

SEQ ID NO: 61695 - DNA, 410 bp, Arabidopsis thaliana landsberg
tggatgacggctccctggcgcccctttccctgatggtgttgcgcgcggtcaggccttgacgccgccggcgctcagcccgccctgccagaagcgctgcatgatgaggaaggcgatgatcaccggcaggatggagaccaaagccccggccatcaccacggtgaagagcagcgccccgccggaccccgagaccgccgaggcgtaccattgcgccaggcccaccgtgaccgggaaatgctcgctcgaattgagcaccaccagcggcaggaagtaattgttccagctcgcgacgaaagcgaggatgaagaccgtggtgacgcccggcatcagcaggcggaagccgagccgcgaaaagatgtggaactcgccggcgccgtcgacccggccggcatcgatgatctcgtcagagatcg

SEQ ID NO: 61696 - DNA, 1485 bp, Arabidopsis thaliana landsberg
atcattccaaattcaacaatgtgaacataacaacaacttatgagaagacaaaatagaatgaaattaatcaaatccagaagcagaagagagacagattaagcgcaaaatcgatggagcttgttaaaatgattcatcttcctcttaaattcaatagctttcccaaaatgacctacttctgatatctacgtattccaacaatttcaatgacacacaacaagaacatgaagaattcagatccaaacataaacgagaaaagacatctaaatgcaatgttcccaatcagctttccatcttcttcatgttcttgtttcacacatactactagttttgttgttttctctgaagctaactctaaatgaaaaattcaacaatttggacataacaacattgtatgaagatagtattgaactgatcaaatccagaagcagaggaaaggttaaatgcaaaatcgaagatcaaatccagaagcagatgattcactttccacttaattccgataacttttaggaaatcagattattccaacaaattactcaaaaacaaatcaggaatcgagaacacaagaacgtgaagaatccagatctaagatccaacatcgacgattaaaggatcgaaaaggcttaccaggtttctggggctttcatcagcccatttggagagagagaagtgaccttctcgcgagtaagagcttcagctttgtgtggctccttgagacagttcctcacgatattcgcacagatgtttgaatacgatatatatgtcatccccgccgctctccagaacggaaccgccgcattcgatgccatctccgatcttcttccttgtcttccttcttcgtccgttccgattctaaggagaaagttcgcgaaatgggacagagaccgattctgtgccctagaaatcctaacacagtttagacccaatgggccttattaaatattttaacggcccattaagtagctaactacacgaatcttctatccaactttcatctactgaaatctctcaactttttttttttttttggtttcttgtcttttttatttgtttttatgattgtttcttggagtttacgcgaagactgagccaaaccaagctttgctattttaataccttgattaggcaattagaaatttaagtgaagttacataaaaataggaaaacaaacaaacttatttccaggagtctccacgaaatttactcaaaacttattctcattttcaggtagattgaatttcgtgtatatgtctgcataatttcgtgtaaatgtctgcttttctttgttttgtttcgttttgtagtttttcaaaagtttatattaaatgtgcaacagagagaagacaccaatctcattgacttatcagaaacaaagaagagagaaacagtttagtttcagataaagatggttgagctgactaacaaataaaacaagactttgggttttgctttaaagtaatgattatatgtgatcttgttttggtttat

SEQ ID NO: 61697 - DNA, 495 bp, Arabidopsis thaliana landsberg
  unsure (1)..(495): unsure at all n locations
gggggggggggggggggggggaggggggggaggggggggggggggggggggggggggggaggggggggggggggagggggggattanntggccggngggtgggcggtgggaancnnnnnnngtnnngggnnggggggggggggggggnggggnggggggggggggngngggggggggggggggggggggggggggnggggggggnngggggggggggagggggggngggggggggggggggggggnggggggggnggngggggggggagggggggggggggggggggnggggggggggggggggnnggggggggggggggggggggggggggggggngaggggggggggggggggggggggggggangggngggggggngggggggggggaggaggggggggggganggggggangggagggggggggagaggggggagggggggggagggggggaganggggaggggggggggggggggagggagggagggggg

SEQ ID NO: 61698 - DNA, 589 bp, Arabidopsis thaliana landsberg
caaaataataataaaaaatctttgtattctgctgtgttttgtaaaaaatataccaaatcgattaatatatgcaacataataatgatttcgtaccataatatagcttgaaatgaaataaaaaatcaactatacatccactttatatattttaaattaaattgtatggaaaagtatcttaaataattaatttcctttagtaataaaccaaaattaaaagtctaattgacagtttagtaatgaaattaataaaaggtgaaagtaaaggaacacaataatgtgtataggttaagcaaagacagctatatatatagaaaacagagagagaagaagaagaagaagaagaagaagaagaagaagaaagatggggctacaaggtcagctaagtgacgtctcttccgattcaatccctcttatgctcctctctctcctcgccgtcttcatcaaccatctccgatctttcctcctccgtctcacctctaaatcaaatcctaatctccccgtagacgatgtctctattgcatcgggactagccaacataatcgttctcgccgatcagcttagtttgaatcggttattctccgaccggtgc

SEQ ID NO: 61699 - DNA, 277 bp, Arabidopsis thaliana landsberg
agggaaaaaggatacagttatagagtaaccagggacccaacaatcatagtacagccgattgaaacttgagaccctaggccagagaaaatctacaccctaacacagaaaacatcaacttgagcaacaagaaacagttgtaggctaaaggtgcatattggatattagacggttgcacaaaataaaacttacatggattccacaatcaaaagccctgttcaaaatttaacatggaggaaaaaaaaattgcaaaagatggagcccaagaatctgatgaaga

SEQ ID NO: 61700 - DNA, 561 bp, Arabidopsis thaliana landsberg
  unsure (1)..(561): unsure at all n locations
gtacggcggngacaataagttttgcatttngtttggatagtttttaattatactcgccacccagaggtatataaatatgcatgccactgtcaccacttgttttaggatagtcttcaacacccatacttttaagtacttcatgggttacctgggctgctatgatgacttcttcaaaggccttttgtccttttttgtttttatcaggatctaaatcaataatgcaccaggtgggattttctggctttttaatggtgctgctccagggattcatttttatacagcccagtgatgccatgtataacaaagctgccatgccatttgctaccaaaaagtgtttatccgatttattaccttcactgtgatattaaaaaagacttgcccagtccggcacctttccggtaacatccttttgataaaaaatttgtcccgtgaccccattcgttaaaccggttacggattggcggccttcttttaaatagggtaaaataaagggagccatctggcaatagtaattgataagcgttcggttatctatctgctctttttccagattatttatcc

SEQ ID NO: 61701 - DNA, 742 bp, Arabidopsis thaliana landsberg
  unsure (1)..(742): unsure at all n locations
gggggggggggggagggggggaggggggggaagggggggggggggagggggggggggggaggaggggggagaggggggggggggggggggggggggggggggggggggggggggggggggggggggggggggaggggggggggggggggagggggggggggggagggggggggaggggggggggagggggggggggggggggggggggggggggggaggggggggggaggggggggggggggggaggggggggggggggggggggggggggggaaggggggggggggggggggggggaggggggggggggggaggaggaggggaaggagggagggggggggggggggggagagggggggggggagagaggggaggaggggggggggaggggggaganggngggaggaggggaggggaggagggggggggggggggaggagggggtggagggggagaggaggggggggagaggggggagaggagatgggggggaggaaggggggggaggggggggggaagggagggggggagggggggggggggagggaggggagaggggggggggaggagggggaggggggtgggtgggggggggagggaagggagggggggagaggaagagggggggggggagggggaggggggggggaggggggagtggggtggtgggaggagatggatggggaggaggggggggggggtgggggggagtgggggggggggggtagggggagggaggggg

SEQ ID NO: 61702 - DNA, 249 bp, Arabidopsis thaliana landsberg
tcctccagtttttggccgccttccaagagtacatggaaggaatggccgaatggtggccttagggctcgtcgccatccataatcgaggccactattaatagcttgacagtggtaaacgatctctggacgtttcaagccttgcattccatttcgtattttcagctccgttgtgacgaaatgtgacctcccggcgtaggagaccacggtgacgtgaactacaagcaaccacacaagggttcttatcaattta

SEQ ID NO: 61703 - DNA, 885 bp, Arabidopsis thaliana landsberg
tgtaattttagaaaggcatgtgcggttcatgaggttacaccggaagggataatgtttgatggtaaagaatggaattttgaggagcggtatccaaggctgataccaaagaaatacctcgaagctaagtggaagccttggccacgacgcaccagtcgtaacagtgggggccaggccagcggacgtcgatcctcaggttcacaatgatttagtgcccataagggtaaaccatccatatggcattgtagtttcaaagggaggactttgttaaaaaaatctgatgaacattacaattgagttatatatatgtttaaaggaattttgtttatatttcgttagtgtgcattttttttttggaaatatttgatccccattatattattacactttacaagtttacattttagtttgtataattgcaagaatgttagaaatttcagttaatttccaaatttttgatcttctgttttttttctgaaatatttttctttaaataaacaaactatattgatccttaaaatagataaattaaaataaacatgccaaaaaatttattattgatgaaaaagatatttagataattttgaataggttttatcatttaagttttattatttagcgaaaatactcatatgatgacatacttttgagtgtagaccgtcgtctaaggattcaccggtaaagtgatgcttataaaccatcgatcgttatctaaagattcaccgttggtaaaccgtgttgttaattatttttagattatttattttaaatttggcatccgttgcaaaattgaaaatttaaatcatttaaatagaatatattcatttttaaatttgtaagtatattttacaatgaatgaatttttttgatgaaaaaacatgtcatgac

SEQ ID NO: 61704 - DNA, 489 bp, Arabidopsis thaliana landsberg
tgcgggtttcttttgttatacatgatgagaaatcatcgaaaggattttaacatgaaactgacctcactgcatccgctacctagcttttttctttcgtttaagcagcgcttgcgatacttcaagtacctataggtagatttaaaaggaataagaacagagaccttcaaaatacgatcttatccttcaaaaaatattgctccatacaataaccatagactcactttttttgtttaaacccattcttttccaacaatttggtggcttggatgttgataaaggcggtaatgattttggcaaagagcccacaggtggactgcttccgaaagtgtacattgcggagatgaactcaatttcgaaagcctagggctgttaaaagacaataaaaacagaatatttaaggacaagtgataaacaaaaaaataagaaaaagttgggaatataaagggattgttaagatactgacccatgactgtctggtggtgtagaacc

SEQ ID NO: 61705 - DNA, 1058 bp, Arabidopsis thaliana landsberg
  unsure (1)..(1058): unsure at all n locations
ccggtggagtagcttatcagattcaagatgtaactgctcagaagatgtcaaaagtaaaacaacattcactcatatactctagccactatccaaaggaacatcaaagtgaagataactccccagaatctagtatttgactgagaattctatatatctaacgccaataccattctgatccccgagaagctcacaactacgtattccagcataacagagatagaatagaactctaagataccaaagaaatgaaatgttgcctcaaggcagagaggttctagaagcttaatccaacactaacaacgattactaggaaccaaagttagaaaatgatcagcttaagctacttaatggcgtgcctacgaactcttgaatcaagtattgagcatttccaagctaaacgagtagaaacaaagaactacagagacacaatttcagcaaacaattcacattcctgataaaagaagcactgggttcaaaatcacagaagctccagcaaagctggactctagggtttgaatagaagagtgaaggagaagagagttaaacctggaaattgaacgtagaacagaacagaacgaaggcaaaaagctagggcacaaaactcgggcaaaatcaccaaattctaaaattagtttctctctcctagggcttccaaattcttataagcttttctttcaaatcgaaagacgagaatcaatttctcagagagtagaagagaagaagctcctcccaaaacaaggaaaccatggaaattgcttgcttgttgcgagattgattcctaattcagctatttttcgttttcaattttggtttccctctccggagataaaaaaaaaaattgagttctcgttgatgtttttttttcgttctttctctctctctctctcctcgacgcagtatgagactctctctctctctctccgaattctgggcctgagattttgaccaaacaaggcctttctttttgtttgcttggtcttgtggcgggccggtttggagtaataaattaacccacccctcatgttgtgtgncatggatctctaaaaaaatcaggcatg

SEQ ID NO: 61706 - DNA, 1120 bp, Arabidopsis thaliana landsberg
cgatcattttttgtacctgagggaataaaagatgtttgttattggttctcgaccaacccatcatcaatgcagtcgtgaagcattattgttgacctgtaatattttttccagtaagcacttgcacatcagctcgcagcgcctgcgtactgatgcaagagcaactgggttaataccagcagctttagctgcttgaggaaaaaaatccagggccagggcacgcttaataattgttacaagcagctgttgatttggggtcctgcttaacaaccctaccatttgcttggttttcttctccagttccagtggaatggagctagcatcactagcaaactgagtatgatgccctggaggttcctcaaaccaaaattcatagaaagttttgcacacaagatcctgtagatgaagaaatctctattatagatcttgtgcgtaagcataatatcacactaaaaatgaagacaatgcatactggatacaacattacctgaacactagactcatcatcactgatacgagataatatctcagcgcacgcacttgtaaattcagagaagttgggatttgaagtacacatgtcacgtattatcttgatggctcgttttcgaacactcactccagtatccttaatcctctcagcgaccttctcaaagtactgcacaaaaatgccatgggtcagcaaagaaacagcaatagtgggtaatgtgttataacaatattgatacaggtcaattacctttataccaacatcaggatgtgatgcaatatgcctaccaacaagttccagtgctgcttctctaacagatattgcagaatcacaaaaccttccctcaacagccaactgaacacgcttatcacacagtacctctgcatcagcttcaacaattatactaacctgtcatggccaatgatagaatgtattatcatcgctagaatagcacaactatattctgactttgcgcacaaacagaattaactatgtgtttatacacattgctcacttactgctcgcaaagctttagccctaatgttgggagcgttctctcttaaacgaaactgataaaaataactcagttagaaagataataactcagaaaaaagagatgcacacaaaacctttcac

SEQ ID NO: 61707 - DNA, 512 bp, Arabidopsis thaliana landsberg
actgcattcagcctttaaccactattgggttgtaggccacctcaaataatctggctaattctaggcgttcaagctgtgggccgcaaccctgcaaccagcttttcagggctccggcaaatgagccgggggcggagtgtaacggcaacgcctatcgcgacgcaacaaaaatataacttattgttttaaaacaataattataaaatttaccggtcgaaaccgaggccacattcagcaaatgacagaaatttgagccgcaccgcggcaaagagttcactgccgcgggcaaagacacttaccagtaccagtgtcacaaaaaatatatgtgtaaatacaattacttatatctactccgaggcatcaggcggcgcctgcacctggcgtaattcccaggcttggagggcagcctcatagttagtgagcgctttccaataacgatcataaacacaaggctcacaaacgctctgacagcattcccagggttcgggggctggcggtttttcaggtttgggatc

SEQ ID NO: 61708 - DNA, 227 bp, Arabidopsis thaliana landsberg
  unsure (1)..(227): unsure at all n locations
ggccgaaaaagaaggcacggaagagcgcccccccaccaaccacccccgccgcagcaccaccgccgccggaccccgccccccccaaccgcaacaaccngccgcagcgccccaacctncccacctcacgacccccaaggcccaagccacaaacagaaagaacccccccccaaagagccccgggagaaggacgncaacaaagaacccacccaaggcgaccacaccaaccg

SEQ ID NO: 61709 - DNA, 1494 bp, Arabidopsis thaliana landsberg
tgctaatcacacaaagtcttaacacattcttcgtagtgaacccagaggatggttattaatcgatcatagacgatactagggaacctcttccggtaattcaacaaggccaatcatcagtaagcagaaacacaacaacagtctacatctatgagcttagatcgtcgtcactcacacaaggcaagatttagtaaaaatgatatttattgattaaagttgggttttttctttactgcctaactgaaaaatcaaaaagagtatgttccaatgaagaagttccaatgaaacagaactacttttgtcccatatctttgtacaggttattctcagccaatgaacattcgaactaacaaagaagcaaaactgagcaattcacaaacttcaagactataatttgatctcacattctaactccaatccatcattatcatcatcaactctgcagaatcagtaaccaaaatttagcaaccacacatgaattcacttaacaatataaaaccaagatcatacctttctcttctcagcttggtcaggaacattataaagatcttcagtgatttcagttatataagaagcaaaattcaacaactgtaaacaaaccaaaatcagaacactttaaccaaacaaaatctcaacaacaacaaaaaaaaagctgcgaagttttcgacttacatcgatctgtttttgaacagttcttgatcgtttcttaggcctacgcggtggttttaaccctatcatcatcatataatcttcttcaatctccttcttcgacaacgtatacaacaatctcgacctatctttccccaattcgtttcctaacatcgacggattcatcactgattccttacactgatttttcgaatcaattcctaaagaaatcgaagctttacaagcagctcttctctttctcaaattccacggccgtacctccaccgtcgccgctcccgtcgcttccggcggagaatcatccctctcaatctcaatctccttatcttcttcttcttcgccgagaagtacttgttgcctaaatatagattccttcatcttatcagcaacgtttctaagatctaacataatcttctctctaaactcttcgattccttctttctccgatgattcagcctttaatcgtcgattctgatgatcggattcgaaattcgaagaacggcgacggattcgttgatcaccgccggagctagaaccttcaccaccgtcaccgtcagaatcatcacccttcccacaccgcagaagtcgttgagtcccccacaacttcggtaacgagaaattgataagagtctttgatctctcgtgtcccgtcgtcgtcgccattgaaaaatcaaaaacctaaaattttctctctttcgtcttcttcgtttaacttttttcttttcgcttgtgagaaacggagcagaaagagtttttgtttatatacgaagtgccgtttttaacatagaagggtattttggggatattattagtgatgcgagatggccccaa

SEQ ID NO: 61710 - DNA, 1456 bp, Arabidopsis thaliana landsberg
aaatagagatgaactatataataatcataatatattttttaagggaggagggtaaatatcatgtcagcatcttttctattaagacaatcaaatacgttacgaccactaatacaataatgtctccattactgatacaaagccaaaataagtttttgttttattacaacatcccatctctgcttgcccattatgcattcaaatacaattgcgtgtactaggacttctctcataatcgattattatctggagagatgaatatttgttacaagaacataaaaacctatctattacacttcatgataaattagggttttcaacttctcatggttcatttttgataaatttacttacattttcacatctcctgtctaagagagtgaaatctataaaagtccctagcaatgacccacacaaacccaccaggcccacagaagcagcttaaaaagtcaaagtctttagaagtacctttgattcttctctttcacccttcatctttatgtgactttgatttctcgattgattccattgcttcttcgaatgatttctgataatatgcaaaagtcgtatcagttattagctgtggtgtaaatacagatgaaggaaacccaatcaggaagaggcgaatatccatgtagcatgtaaacaaacagagatgcacatgcttttgtttttcctattaacggaaattggaaaccaaccattaataatttaatatcctcagcaataagtatgctcattttactctacggttatagaatcctacacatgtgaggttttctaacaagatactttttctctatcctactgatgtggaaacaaagatcattgcttcaaaatacacattttgcatctataacttcttgcaaaccctaccatgagtcaaaaatgttctcatagacggttctatattttacaaagagcatataggttactgatcattctcagtagtcaatgacctgcaacaccaatcttatacactagtcattagtcaatgttttgaagtttgaacatattctcctttgtcacacttctaaagctatctagtgtgcatatatgtggacaccattagctgctacaatttttggaattcattctagctacacctatggcgacacgaataagaggtgcagagatataatcatcaagcgcatttagttcacaagaagttcaatttgataaatttgagaactcatacactaaaatgcatccatcaacaggaaaaaaaccccagttaaaaacaccaatgtatgtatatcacaggataaaaaaaggcaagaatgcaagattatcaacacagccaatagcttaacacgatcattgatggaaaatatgatactcacccctgagttacgcattttccatagtgtttctccgcttgtatcaatcgcagtaaacgcaaagtacagaccactggaatatcaaagataagaagaccactttagtaaggatacaacac

SEQ ID NO: 61711 - DNA, 188 bp, Arabidopsis thaliana landsberg
cttatgacactgacagttgtaatacaaagatccacgtttaaggaaacattttctttgtacattaaatctatgattcccaacattatcatctttagcgacagaaaagataattcattaataatttcattttttcttatcgaatcaaacatcggttagaaataaatggactctgccttaaccattttttt

SEQ ID NO: 61712 - DNA, 964 bp, Arabidopsis thaliana landsberg
gaaatgctcctttttggataaatgcttacccttactttgcctacaaagataacccacaagaaatcccagtcgattacgttctattcaaccgtaacatcggcatgaccgatcccaacacaagactacactacgacaacatgatgtatgctcaagttgacgcagttgctttcgcggctgcgaaactagggtaccgtaacatagaagttagggttgcggaaacagggtggccttcaaaaggagatgtcggagagattggagcgtctcctgtgaatgctgccacgtataaccggaatcttatgatgaggcaattcgccggagaaggaactccagcgagacggaatgcaagactcgatgtttatatatttgcgttgttcaatgaagatatgaaaccaggtcctacttcggagaaaaactacggtatattccaaccagatggatcattagcttacaatttgggattctctacaatgtcgacaacgacggcaaattcagaatctgtcacttattcatcctctgccactaaggtacgattagtattatgtggtgaattttgttagaatttggaattattggggccacgacgagaataagtttgtgaaaggactagatgtgcaaaatgaattaattctctgttttcttcttctttcaggcaaagaggagcttggagtattggacaattttgatattggcgatggttcaagttgtaatgttgagactattttagaggaaaagttattgacaatataataacgcgattggttaggatatttatgtaaacaatttaattataagcttgataaatataatttatattcaattcaacattcaaatgaagtcggtcaatagtgaaaattctaaatttatttgtgtcggtaacaagtaattgacatatataataaagaaacaaagtttactttttaagaataacttatattggcgtcttgtcgtatatgaaaaggtttga

SEQ ID NO: 61713 - DNA, 577 bp, Arabidopsis thaliana landsberg
  unsure (1)..(577): unsure at all n locations
agtgcacgtatttgtgcctctctggccacttccatttgttggaaaaaggtatctcttttacgtgcagacataaaagtgacgtgcatatgtgttgtgtattaaaaagctagattaagaaataaatttggaaatcattatcgctatattataccccgaaagttgcaattttcaactcttgtttgggaaaccataaaaaaaaacaagtcatgaatcttgtgatagtaatttacaacgacgaattctccaactatataggataattaaccaatcggaaaccgagacatgtaaatcacgtcgaccacacgatcttccactggctcaacaccgttgccctagtcgatggcaactttttctaaaaacgagtgtttgttatcattaaatgcacgaaagtgtttttatggatatgttttatgttttaggttttgtttttccgtaaatttatatattatattaatattaatcatatcatatgaaggccatttcattttcagtgactcgagtcattatgattcataaaagacangtcggtgaggctaaataatatcccangtcggtgattgtgacatgacatgagcct

SEQ ID NO: 61714 - DNA, 1251 bp, Arabidopsis thaliana landsberg
ctacactattagaatatgttgaacagaaaaaacaaagactattagaatattatccaaaattagtctcttttatataaatatcaatcgggtttccgaaataaattttgaaaataccattttaacctcaagcagataatagttttgagaatattttacattggaaaatcacatttttaatctttaaaatgtcattagacagcattttaaacctcgaagaatttcattaaaactttaaaccaccaaaataattttactaacactttaaacctttaaactatcttttctgtttgcaccgtcataaaaatgacggaatcattaatttttgtttgtttaatataaattcatttaattaagttaataagttattttatttgtttatagtgcaaacagagatatatcggtcaaaattatgtcattcgccaaaagtattcttcaaaattacatatctttttcccatgtagcatctcatccaatttccgttctagaaaattgttaaccaaagagcaaagatctcatttaagtgtcgtccaaaactgttattacaacgaagctatcatacgatgtgtgcattcacttcttatgagaaaattggctgattatcgtccaaaatttctttacatccatcagattttgatgacaaacataaattctgaaaacaccttatagcaacaaccttgattccttttatctgtatatatctttctatttttcctctaaaccataaattccgaaaacataaatatgtatatatctttcatatttcctctaaaccataaattcatattcttttgtcttgagtaaaatttttcatcctgatatacttctttctatttttgatttattgttgatatcttgtcatgatttattgttgatatcttgtcatgagtcgcgttacatattctataaaagatcacccccaacaatcatgactaccggttatcataatcattggtaagttcaagaaaatacaatggaagcattatatttgcaaagacacaaaaatctatagtagactttacatttctcatcaaaaattacataatgcttcgcaaatttatattaatcaatgagataaaactaccatagcccgacctaaatccatatctattaatagcaattaatatttgattgattaagaagcgatacaactcgtatatatatcactaccaaatgcttactagaaagtttcaaaccatttcaaatattatattgaaagcacaaaataaaaatgagtctcttgctttcttcttt

SEQ ID NO: 61715 - DNA, 1282 bp, Arabidopsis thaliana landsberg
cttgtagtgatatgcatttcccaatcactttcaggtgcaactcaatcaactttgagtacagatctatgtttaatgtagggttagataagcagaattggctccctagttcttctacaactttaactgcaccatccaaccaaataaatgagaattcaagtggtgcctcgctcatgtcagcgaatacagacagtaaatcattcgaaatgttcgtgagaacagagacaaatgtaggtgagaatgtaatgccatcaatttgcaggtttaaccttaaaatagcagcagaagcaattaacagatgcttgagtgccaatactacttctgaagaatcaccctttatcaagctctcagtaattttctttttcacatcactagtctctactacgtcaccacacacaagaccatttgaaccctcggtcccatcaagcaatctggtccagttgatattggtttggatttctcgctgcacatcaccactaagaaacagacactgtgcaaaaacctcgaaaaaattgctaagcacatggataatgcgggaaagctttgagaactgttctgatttccatctcagttttgcgttctgatgattcttctgcatatctctgttactcactgcagatgctaatccccacaacaacccactaaaacaagaaaatataggtgttaacttgttcagtatcagactctcacatttaaaggctgttttctcatctctgaaggtagccctcaaagcatttagtagagtttctgcctgttctgtcaagttctcaattataaggttcgcttgtccagttccctcagaaatttctgatgaaatgagtttttcatcagaaaatggtagtgccttgctaaattgatatttacttacggttagaaacatatacgatgtgtgatccatcaaagaaaagagggcgtcccttgcttttcctgtaacatcattcctaaatctcacttgacaagtcgcagcttgtgctgatttaaaaagccaagaagccaacaacgaactatcagataaaggcaacttggtagctcctagtaccttgtcgcaagaaatcatagcaatacttttcaaagtttttctgcaagtactgaaaaggctgaaaaggttttgcatatcaccacaggacagcttgttcaaacatctcaacatgctaaaaactataaacctacaagagatgatgacaaaagtaatatttgttaaaatgttttgccaatgaaatttttaaggattattgacatgctttactgcagcaaacatacaagaaagggatatgctatatactat

SEQ ID NO: 61716 - DNA, 1098 bp, Arabidopsis thaliana landsberg
atagtctagcgataccaatattcttttttatcaagtttgatgaggaagaacagttgtatgatgattgtggttattagttttgttctacaatgtccataatcttaggttctaaaaatgaatttgtatatatgtattattctattcaaattaaggttgcattgtcgagaattcggaattgagtcttacactcttaaattttgaccaaatctagctaatatatcaaactttatttctgactcaatcctatatggtttgccgtttacgttttctcccttggtctacggagtaagtgacgctcacataggcaacttcgatcatcagaataatttctttactcatgatcgtaatatatatataatactaatcactaggttctttccacctagattttattggcttatgagataacattctttattttgctatggacacacaaaataattagcatgtattttagaacgtttattttaagctaaaaattatcatgcatatattataatatttatcttaaaattatgattatagtaaaaagatatcggtgtatagtcaactacaccttctgcttcacaccaaagttccaataacaaattatagaattcctgtttcacattaaacaagatcgactcgtaaatataaaagataacaccaaattattgtttggagatttaaaccaaatgtctgaagaattacagataaagtttagctcacaacaaggaattttacaaattctgatgccctcaaaactattgatatattttgatatttaaaacccttgcttattgggtctaccccatggtcggccatgtccaaactaatctctcaattaaataatgtagttgtgtaaatgcaccaatcaataaaactctcaacaaaaaaataaaacaatatgtcttccttaagtacgaatcattattcttttttttttgggcaaagaatacgaatcattattcatttttagcttttcagtgaatacttcgtcaataacgtagagaatagcaaaggcaaataccgatgatttcttaaaacaattcaattggttgtatatatatatgtaaggaagtggacattcttatataagacaatactcaaagatttccg

SEQ ID NO: 61717 - DNA, 770 bp, Arabidopsis thaliana landsberg
gcacataccacaagattccatcaggacaagtgttcagtctatggtaagaacagattacactatgctgtgaccttagctatcaatatgaggagaacattaacattcggcgtagacaagagatacctgtaagaagtcataacttcaggatctcttaggagtctctgcctacgcaggacattgacgattagaaaatagaggacttgccaaagagtataaacgactaaggggacgagaaacagccatgtgaataggtaagctttgtcttcaacataaggccatgaaaccctacgatcagtgcctacagggtgcatagctgcaaaagtcgctggattccaccacctaatcgtgaaaaacacgagccctgtaaccaaaagtcattgcaagactaaataaccaaggagagagagcacaagctccaataaattaatcatctgcattatccatggcttttactgcataatcaaatcatatccagggtatgcaagagagaaccatgtgattacatctattctaggtacaggatactaaatcctaaacaagattgagaggggaataaaaaaatctcttcaacatttcattgtcaacaccgagagtaacaaaaagattatagaactcaccaggtaagagatggataagaacactaacaatcttatccggcgaactaaaaaccaagctgcaacgccagacaataattgcccatgccaatggtccctgcaaataaaaccacagtacaagacacaaccaacttggtaaaccaacttacacagacc

SEQ ID NO: 61718 - DNA, 787 bp, Arabidopsis thaliana landsberg
ctgccctttcctgttcacggtaagcaagacattgcctattttattttgtttcagatattttcttctttactaacatttctagccttactcatcccgactttttcgcacttcaataagcctacaaatcattaacaatttaaactaagaaaatttcatataattacacagtttattaccaatttttataaaatacataaattataagattttcaaaccagacaaattacttttcttttgtgggtaaggatatcatcaatagtaaaatatgcaagtatgaccaaataagttttatttttgacatcctgttaaatattacatttttttaacgactttccttaagtacgcattgaaaatttacaattttattatactttacgttttttttaaaagtataataaagccttgtacttataaaatggaaaataaataaaaacatcataagagatttggattcaatccttgcaaaaaaaaaaggaaaaaattatcagctcatctagtaacatcacaaattcacaatttacgagtttcaactttgaccatacatagtatattaccggaatctctttggttctaaataattcttaaaaacatatatatacccgaattattcatattgtaccccgaatacccgaccgttggtcgggttcttttgaaccccataccccgggttaatttttttaaaattaaaaatattttttaaatttaaatattctctcccccaaaatgggggctttttcgggctttttttccgtgggtttttgggggcccctcaacccgggaaaaaacc

SEQ ID NO: 61719 - DNA, 557 bp, Arabidopsis thaliana landsberg
agagggaggtttatcacagcatctgggacatttacgccgaggtcatcgttgaggaagaggagaggtaaagctttggtctcttacaataaaactaataatatgtaatacgataatatacttatttgagtttcgttattggcgatgggacaaaactaaatctgctatgtcttaagaaagaataaccattagaaaatatgaatctagggttcatcaatcggtggaaagtatttggaaaactacattctcttgtcttgtgttagggcatagggaaattaatctaaggaaaagacataacatgacaatttagttttttgaattaaacatgtaagaattatatttgttataaaacaaactacgagaattcagatgggtttgagtgtgtttttaatttgattgaaggtgacatgtctatgaggcttggaggaggggacttcacgccgcatagcttcacagttaataaaggagaggtaaatatataacttatgcatacttatctatttcatttgttgttgtagaagagaaaaacctttttgtttttaaaattatattttgatttt

SEQ ID NO: 61720 - DNA, 377 bp, Arabidopsis thaliana landsberg
gaaggtgagtagtatggtggcggcggggagctgataatgtttgggggaggaggagactagaaggacaccttaggagaaggtgaatagaagggtggaggacgaaaactgaaaacgtcaggcgggggcggggacaggtactacaccttatgacaaggtgactatgatgggtgggggtaggagaactgcatacgaaaggcggtggagggcactcgcactacaacccaacgggaaggtgagaagcctagtgggtgggggtagcggtaaacatatcccattgaaaccggcatttaatatgcgtaaactgtgaaactgatttaaccactgactgaaaatattacacaattcatagttttaatcccaacaggtaccacataaaa

SEQ ID NO: 61721 - DNA, 144 bp, Arabidopsis thaliana landsberg
caggaacattggggagtctcctaaaccaattttctttagtttctacaaagcgacaatgacaaggtagacttggcattattaaacagatcatcaaatgggaggcctactgacaacttctatgaggcgtttaccactaaatggatt

SEQ ID NO: 61722 - DNA, 464 bp, Arabidopsis thaliana landsberg
gctccataatggaggtttggggctaattcatattacctgaacaaattttcatattttgtttcggatattcctttcacaattgggcaacttggttaattatgtacttttaaaaacatgggattataagtaataacctttcataacttcattggagaataaaaagcagagttcgaaaagaagaaaacacacgggatgatgggatgggagaaggacaaagaatgactctctttttcagaagttgtgagttagcgactgagtcccaacaactaacaaagaccccccttgatatttgatgcctctttggcccccaccttctttattggttagcttacatttttgatgcaacatactccttctgaaactagcttaatattctcactttttttacttagtaccttgggattaaaaaatatataatctttggtttattgctggagggtttggcacccaatacatgtccggaa

SEQ ID NO: 61723 - DNA, 403 bp, Arabidopsis thaliana landsberg
  unsure (1)..(403): unsure at all n locations
nnnnnnnnnnnnnnnnnnnncactctgctttgcttggcttagaccaaaatcgatcccagttcatcttcattcaaacatgagagagcggatccggctagagccggcctataaggccacttccacttaaagatacgaaaactatgtcccggacaggaaggccaaggccaaaagcatacggagtgatatttcaagacgcgaacggagagttacacaaggcagagccagagaagaatccaatgaacgaggtgattttgcccgcgggggcgactgggagcccgcaatcgtcgatgctgagcggcataagtcccgcagctcatctcgcggctcacgggattaaaccgctggtctcagatcatccgatggtagggcaaggtatgggagataaccccatgaatgccatatt

SEQ ID NO: 61724 - DNA, 664 bp, Arabidopsis thaliana landsberg
catttgcagggcaaggcataatgaagaaaaatgaagtggcaagcagggtaaaattatatactattagaaaaaatataacaaattttagcgaatacgattataaaattatatacccaacatattctttgtatgtatattttttaacataagtagtgagcattaatgttggcgacgaaaattacattgttaggtaggggccataatgatatggaagtgatcttctgcttaataaattgtagatataaagtccatgaccagggcttttcattgcgaaataaattcctctccaatataaatctagttttagatttttgtttaccatttttttatttgaatttccatcaaccgaaagagcttttctttgggttagatttatttcttttttcatgctctttcaaccggcaaagtaacgtctctagtgtctttgtctacttcagttaacagtcttctactctctctctttcttttatcttttctattggagttagaacctcttgccttgaggaacaaagtgttgagacataaattaagagatgcaatttgtaagaagttatacacacaaaagataatagtcggaacattggattatgtttttcaatctaagggaacggaacataagggtcatgatactgaaattggttaatggaatttttaaaaaaaaaat

SEQ ID NO: 61725 - DNA, 462 bp, Arabidopsis thaliana landsberg
ccttacgccatagccgtggaaaatctaactatgcttagaaagttgtgatgattattttaaatatctagatatataaaaggtgaaaagaggttacgtggactatataatactaatgttatgatatcatttttaattgaaatgtgttcgtagatgggcagtaagatgcttttttgaaaagcgaaaaacatattcaccataagataccatgattgctaattaaagaagttactcttagttaacaaaaaaaaaaaagaacttactctttgctcctttatttttttgctagcgtacgtgtgtcatggtgatcaataacttcttctagctttttttggtagggattacacctcttctagctagtggtgattgatgtatatatcaaacctatattttactaatctatatatataaatcatacgtaaattgatgaattaatcctatggtaaaaatgtcaggagaagtggc

SEQ ID NO: 61726 - DNA, 1881 bp, Arabidopsis thaliana landsberg
ctttgcacgtgcatggagacgagttcacttgtcacatgcaaaccattttatttctcaggatattctgaatttcttttttgtagttatttaacaaatcataacactggatgaaatcattttcatacgattctgaatttaacatataatttgttattaggtcatcaggttaacatatgttttgatttatatttttgaatctaacataagtttccaattattgttcgctaaattgccaaaatttctttcatcccattcccttttaaacataaaagttatattttacaatttcatcaaattagaagaaaaaagagtcctggaaaaacgtataacttgtatgtatttacttaattttggaccataattttttttctgtattttgctcgactttataaaaagttttcgcagtctgtttttttttcttttgctcgactttaactgatatactttggaattttctttaactgatactttgccctgttcaaaaacattgctttgtgcaaaagacacaaagtaaatctatacacacgtctgagaaaataataagaatgtattttaacaagaagaagtcgtgcaccatctctttatttaaccttcagagaaataaacatctcctatttcccatataaacaaattttataaaaacttttctgaaaaaagataaaatgacaaaggaaaaaaaatatgacactaaaggtcccagagacaatgtacaaaaaatttaaataacagactgcgaaaatcaaatatttcgctataactcaagtaagaaaatctagtggatgtatatgtatatatatgtacaaaagatctaaacaaggaaattttagaaaattacataagaattgtgttttgaattactacattagaacaagtatcaagagataacgtacgaatgaaacagaggttttggaattcacgtgagtttctcgtgaccggcgtacaagacacatacgcacgttaagaaacgatctttacacaatacacacaatttagcacaaaacacaaaatacaagatcatttagaaaaggatttaaaccaaacgacaaacgtatttataacaagaaccgttgatggattttcttctttgctttcttctctctgataggatccaagcttggtttccaccctcttcccgacaattgccggctcaaaaactccggcctatcttcctcctccatctctgcctccaatcttccaaccgacgtagcagcaacgaccgtatcagtcgccggattgttgttcttataacttctagtagtaaaccaaggaagaatcccttcatagtagctaaacgatgaccttaccattgccgtggcgcttatcagcattttccgcatgtcctctgacgtcagcaccgccgatgatgatgatgattttgcggccctgccaccgcttcttttggcgggaagcactaaatagattttccctggctcgagtgttttgtccgcgggcaaaggagccagctttctcttcaccgattttgcgtcattgttgaatgatatcgatgacggatcaaattcgacaaccacatgttgcggattttctagcataatctcagccaccgttgtctcttcctctaagttttgtacccttccgtcggataatacaacttttccggcagccatcccggccgcatccaactttcgggaaccagcaacgttacccattctcagatcacagtgatcctataagtgtctttgtgtaaattgtaaatatatataaacacacacatacacacaacacatgaaatggtttggtttgtattgagttcgttaaacggttccatcttttgactttaatgataaattattcatatacaaaacatgtatattgtattggtgggatcatggggagaaaaatttgatgggtttggtgggtaat

SEQ ID NO: 61727 - DNA, 493 bp, Arabidopsis thaliana landsberg
ctttagagaatagtgaattagtgatttgttgattttgagtatttaatttacgttaagtcgttcttcaaagttcaaacaactgaacttgttaagcaaaatctaatactggaaaataatatataaattagttacctatttttttcttagaaatatggaaatgattgttttgtatacatgatacacctatatagcaataaaaacaaacaaactaaatgttttgtcttattaatagttaggagaaattagtttgttgacttaatctcagtgaggatgctcggactcaaaaaagttgctaggtttggcaagatatgatcgatcaattaccgacacataaaattgggaccatatatatagattttgtactttcataatttatgttctgtgacaatttcatgaaaatccctaacagcaaccttataagttaaagaatcaactagaaaatcattttcataacttgaataattcgacaattactattcatcgaaattagaga

SEQ ID NO: 61728 - DNA, 630 bp, Arabidopsis thaliana landsberg
  unsure (1)..(630): unsure at all n locations
atgggcccagaaaaacaatgcataattgacaagctcataaatcaatagaatatgatcaaaacaagagacatagcatgtgactgtccattatttgtgagaacttccacatgtcggaattgggtcaagcccatgttgactcttttatattactcgttcagtctaaactgtgatcattaagagtctagaaagaatacttaatcaaaattagtggttcatattttaattaattaatacaatgatgattaatcaactactcctcacatgcttcatcttttgttctagtatataaaatcatgccggatacatcattgtgttgcttatgtatgaatgcatgtatgtattcgatttcttctaccgtcgtttttcggttcactcgtttgtcgtttctcatgtattatgatatgcatgcatggatggatggacctttgatatgatcggtgagttcattcatcatactaattaaatatgtaattaataatataattgaaaacattttaataggtggaccataatattacaccgactaatttcacaacacgagtttcttttgtcaacttttgcaacttacaatntaaaacattagaattcatccaaacaaaacanataaaataaaaattttctttttctatc

SEQ ID NO: 61729 - DNA, 144 bp, Arabidopsis thaliana landsberg
cactgattttttattcccgccatccgggggacccactggggggggagtgttcgccaccggggaggccctccaattcaccctatagtgagacgaattacaatgcactggccgctgctatacaacgtcacaactgaaaaaaccctg

SEQ ID NO: 61730 - DNA, 104 bp, Arabidopsis thaliana landsberg
  unsure (1)..(104): unsure at all n locations
tgcaccaggtattccgtagagaaggtataaatctatactattattcaaacaaatcttaagaaggnccccctagacacttggtacctgcctgagccagacccaca

SEQ ID NO: 61731 - DNA, 108 bp, Arabidopsis thaliana landsberg
caagaacatcctctttcagtcatacaagacattcagattctttcttctttacttctgatttcactggtaacttcattgctgcgtgcactacattagtagagagcataa

SEQ ID NO: 61732 - DNA, 175 bp, Arabidopsis thaliana landsberg
  unsure (1)..(175): unsure at all n locations
agaaatcaggcgagagatacttgctcttcttcctctctttctttgatgctngngtagcggcctcgccaggttgagttcttctttcaacgactgaatcatcaaaccttacctttttccgcagcgaagctaatgaagttgaatcgatatctatttccagatctgaaatctctttttc

SEQ ID NO: 61733 - DNA, 1184 bp, Arabidopsis thaliana landsberg
cttatcaatctgtttctatacgacaatgacttgtccggcacgcttccaaaagaactaggaaagcttcaaaacctagagaagatgcttctatggcagaataatctccacggacctatccctgaggagattggattcatgaaaagcttaaacgccattgatctctctatgaactatttctcaggaaccatccctaaatcgttcggtaacttgtcgaatctccaagagcttatgcttagcagcaacaacatcaccgggtcaataccttcgattctaagtaactgcacaaagcttgttcagttccagattgacgccaatcagatttcaggtttgattccaccagagattggattgcttaaggagctcaacatcttcttgggatggcagaataagctagaagggaatattccggacgagttagctggttgtcagaatcttcaagctcttgacttgtcacagaattatctcaccggatcattacctgcaggtttgtttcagcttcgtaatctgactaagctcttgcttatatctaatgccatctccggtgttatcccactggagatcgggaactgcacttcgcttgtcagattaaggcttgtcaataacagaatcaccggagaaatccctaaaggtattggatttcttcagaaccttagcttcctcgacttgtctgagaacaatctctccggtccagttcctttggagataagtaattgtagacaactccagatgcttaacttgagcaacaacactcttcaaggttatcttcctctgtctttatcatcgttaacaaagcttcaagtacttgatgtctcttccaatgacttgactggcaagatacctgatagtctaggtcatctcatttcactcaaccggctcattctaagtaagaattctttcaatggagaaatcccttcgtctctcggtcactgcacgaatcttcagcttcttgatctcagcagtaataacatctctggaactataccggaggagctttttgacatccaagatctagacattgcgttaaacttgagctggaattcattagatggctttatcccggaaaggatttccgcgcttaaccgattatccgtgctcgatatttcgcataacatgctttcaggcgacctttctgcgctgtccggtctagaaaacttggtttctctgaacatctctcataacagatt

SEQ ID NO: 61734 - DNA, 192 bp, Arabidopsis thaliana landsberg
acaagacatcctgcgtgtatgatagtcttgatgtatgagcttaccttggcagtgtttttggctacattcttgcagtctggcaggacgcttacagattttggagacaaacgatatgaagaattacgaaactgtacagtagactcgcatttgtcttgattcaccagaaaggcagcgcataggttcgccttcttc

SEQ ID NO: 61735 - DNA, 585 bp, Arabidopsis thaliana landsberg
  unsure (1)..(585): unsure at all n locations
nnnnnnnnnnnnnnnnnnnnnnnnnnnnnnnnnnnnnnnnnnnnnnnnnnnnnnnnnnnnnnnnnnnnnnnnnnnnnnnnnnnnnnnnnnnnnnnnnnnnnnnnnnnnnnnnnnnnnnnnnnnnnnnnnnnnnnnnnnnnnnnnnnnnnnnnnnnnnnnnnnnnnnnnnnnnnnnnnnnnnnnnnnnnnnnnnnnnnnnnnnnnnnnnnnnnnnnnnnnnnnnnnnnnnnnnnnnnnnnnnnnnnnnnnnnnnnnnnnnnnnnnnnnnnnnnnnnnnnnnnnnnnnnnnnnnnnnnnnnnnnnnnnnnnnnnnnnnnnnnnnnnnnnnnnnnnnnnnnnnnnnnnnnnnnnnnnnnnnnntaatttttttttttaaagacccttttcttcccaacaaaaagaggggagttaaatattccccccgtggggggggaaaaaaaaaatagggggggggggcccttcttttgagagaaaaacccccccccggggggggtgaaaaaaaaaaaaaaaaaatttttttttcacccccccttttgggggaaaaaacccccaccacatttttttttttttttttttggggggggg

SEQ ID NO: 61736 - DNA, 1438 bp, Arabidopsis thaliana landsberg
ggattttcatgtttcagtgtgtaatgttcactaacacaaagacgctcacataatttccaaacatcaaagtaaaactagaatctagcacaatctgaacagctcagtaacccagtttatacaactcaaaccatcatgctatatccagatcaatccgtactttttcgacaatgacctctgactgggataaacaaaataagaaattgaaaattatctgactccgaaatattgtaacatcaaaaaaaaacaatttccaattcctgagatgatcaagtccgaactgaagctacagaaccgatacaaaatcaatgagttccaacagttcctcagaccaaacgtcaagaactcaaagtctcagaccatacgaaacttaatcctaagaattgtgttagcttccaagaatccaaattcacaaatgctgatcatgtaacatcagaggaggtaagaaaaacaatcacaggaaccaaagcaatagcaaaaaaaatcccttacattcaggcaagaagcatttaaaaaacaagaattctaaagaacctgagctgcttaaacaggatttgaatcgaaagcatctgaatcgaaccgtgtaacaaaaaacaggattccaatttcatatcgctaccactgatgactgatcagtaaccatagaaacatttctagacgaaatttttatatggttccttaaaactacatagttctatcaccaaaaaccgaaaacagtagcacaaaagtttcctagaatcatctgaaagcttatactaaattagctaaatagtacaccagaacaaacacaaggtaaatcaccaaatcaagataaaaccatggcaaagaaatataaattcccaacaaaaccgatccgaaaggagatgttcctccaaaaaattatcgtaaatcgatacaacacacaaaataaagaggaggaatcgattatactcacagttaatcgatgagatcgtgatcgtctaagcgataaaatcagttatagaagattaatctgggtgtggaggtcacaagtactcgccgtcgacgacgatgaatcgacgatataacaaccggtgaatacggggaactcgtgaatatgcgaattcacttatacactaaaacgatgccgtatagtccccacttatgttcctccggtctaaatgtcattaatccacattttggttcacgctatatcggtttgatgcggtttcatatcggtttcattcggtttgatgcgatattccccttttgtcacttttaagttcggttttaaagtcacttttccatacagatgagagtattagcattttcataagctcaatacgtttttcaaatatatcaacttttacatttgattcggtttcaattcttgatcaaaagcaaggattgaagaattcggttctctattccaatccgactagtaaataaatcgtcgtactaaaccactctatatggacaactt

SEQ ID NO: 61737 - DNA, 160 bp, Arabidopsis thaliana landsberg
tgcattgttgatccccgatcatcataggacaagctttatttcacacgctttctgtgtggatgaatgaggtggttgtttttacagcgatccggtcatgcttatctgaacttccaagacctccctctttgttctgagaaacacaatgccttatctcaatcct

SEQ ID NO: 61738 - DNA, 150 bp, Arabidopsis thaliana landsberg
acatgcttgccatacgccgcaaagtcctgctgaccagcacgggacgcgatgtagcggcgatattccgccttctcttcctcagtcggtgccgccgcggcgttcacgccgatcagacgcacgaccatcaggcttgcataaggcaaggacacg

SEQ ID NO: 61739 - DNA, 1525 bp, Arabidopsis thaliana landsberg
  unsure (1)..(1525): unsure at all n locations
acatctgatgccaaactcaactcaaactaaatgtggttggtcgctcaaatgttaaataagccaaatggtgaatggtgatggagataaataaacaatcttcaacattcttgaatggagtttgagctggaggaatcctttgatgagctatgttgatgctgagactgtgagatgttttgaggaggacaaggcacgggagctggatgagcaatgaacgtagggatatcatctcctggcatcaatacagataccccgtttgagtaaacagtcatctgcaaaacaaagaaaaaaaaatcacataaataacaacacaacatatattcaacagatagaagaagcagagattctctcaaagaattttgattgatgaggtagccaacaaatcataagcaaatgagagttttgagtgggagaagacaatgacagatcaaaacatgtgtcattgttccccaacagcaactcaggttagaatgaagaaaagggcgaaacacacttggtcttaagtttaccatttatgggtcctcacatgtttttgaatggttctatctactctttcaacacatggtttgttccatatccatctcatatcaatctataattgtcaatcagtcttttaattaaatttactgtatctaacacaacataaggtgtaagtgtgtaacaagagcctctcatcaataatcaatatccggaaaaagaactaaatccaagtttaataccatttcttagaacacattcaagtttttatcttgagtgggattcaatagacatgagtaccaaagtcaagctaaaccttacaactaaggatataagaaacaaagaactctccaagaaactattaccctcaagattatgacaatgaataattcactctttaaaatgttaaacgaaaaagaaaacacaattctgttattaccttcaagttcacatatagattgaaatatcatcagtctcaacaaataaggctatcaactctgtcctacttctagtcttctatgaggttagagtcaagcaaacactacaactaacatgaaactatgtaacctttactcaagaagatgaaaaacaagaataaagactctaaaataggagcaatgttaggtttcaagaaaacttgtggggccatttgtgttcctaggaaatgtcaggcacacatggtttcagacattgacgtttagacctcatattccatctacaacacgcatagttagtattatacgcgtcgacatcaatacttacaaacgaatcaatcctcaacaaacgaaactttattacacctctttgttgtctccttcgtcattcattaataggaaggacaaaagaaaaacagagaaattctaaaatgacgaaagagatcaatgaatgcatcaccatttatacatacatacatatatatacacaatcaacagtgtctgcatgtgtgagtaaggaagcttatgagacatctttaattntgatgatgtataagcatgtgcaatgttgggtctctttcaatactcaaatagtacacagaatcaacactttttga

SEQ ID NO: 61740 - DNA, 369 bp, Arabidopsis thaliana landsberg
acatataagccacctgtgagagatccacgtagagctgacttgtggttcttgcagagtctcacttgaccattttcacctttatgtgtgtgcccatgtcggtctatggcacatgtatagagtaggtttcttataagatttggcacaaactagacattactcaaggtttgtactggatcccccatgagtgccatatttagatcgaggcttgacccttgtgactcaacagaatggtcactaaccaagtaaaagcttctgcagtatccttgtcttggaaagctgagaaccaatctcgctttgaagccatgtgagacgttgcattcagagtctaacaacccacaagtttttagctcgatgatcatttacactgag

SEQ ID NO: 61741 - DNA, 562 bp, Arabidopsis thaliana landsberg
acttctattgcgacataacttctgtgcaagatacacaggatttttttttttttgaaagcttgacaaaaaaatgggcattagctttaatcatattggctaacattgccattcatagacacaagattgtgattgttattaatcttataaaactattgaagataacaaaacatgttattcaaacgactagctttattactaacgcagaggaatcggaagattctttagcaactacctacttattatgctctgctgtaagtatccctaccgcgcacttgtaaatttctagaaactaacaaaaagatcgtcttctacggtgctaccaataaaagagaaacatctcaatagatgacttgcggctaaaacttataatctaaagagaaaaagaaaaaaaatcaaacttgttccaactcacaaacggtcttctttagactaccaccagaaccgcccttgatactatcttcatcatgacttatgggttggtaccactttgctaatatcaaataaaccacagaatcgattgctgctaacgcgggaatgacaaaatacaaccgatccatatgac

SEQ ID NO: 61742 - DNA, 327 bp, Arabidopsis thaliana landsberg
gatagaatatcagactaacctgcaatgcaccttggctgttctcagcatcacctagaaggaagctaagaccctgtcccttgttggatgtagcaacttcacggtactttgatttaagagactcagctccttctccagtgaagttaatgaacaacatcgcctgaaaatcaaaatattgcagagactgaggattcttgaagcttttactgagaatattcaaaaagttaattatacacactagagtccgactcatctaatatggctcacactcgcagctacttccatagccataacattaatttagctctaaaatatcaactttttaccaat

SEQ ID NO: 61743 - DNA, 1251 bp, Arabidopsis thaliana landsberg
aagccttcaagcattggtgtaaactaatgtttactttttatatatatattcactttcatcctcttatttgttttagctatgggtgagattatttaaataaaattttataaataataatatttatacttgaataaaataaactagtttcaaatttcagtcacagatatttattttatgttgtagctagaaattaataacaatgatcatttaacaatatttgtttttagtttaaagagggtataatatccttaaattaataatattagtaaaattgtgttatttagttgtcttgtgaatttcgatatataagggttggttcgttccattgtaacgtaaatgatgaataacaacaacgtacgtgagatttagaatactgaaaagtgaaaactacatagtgtttaaataattgtcgtcaatcgctggaatacataaattcaacaataataaaacgaagatagttttgatattgtcattgttgttcatcgataacgacagtaaaaacaaacgcatgcatactacatgcctttttctttataaagtagaaggcgaccattcttttttatttgtttgtaatctgtatattaacagacgatcaaaaacattaatctgtaatcccaaatttccaataagttgacaaacgatctaccatgtttaaatttcaattcgtacaaatttgttagttcttattttggtaatttggttacatgatgtataacccaaaaaaaataaaaaaaattggttatatatcatgtagctgatttgttgaactttaaaaattttaaacggatgtgtcatgtgtctctatttatttggatttcaggcagctcaatgtatgttagaacatcatgtaaatgttagacataaacgtaaaagaacaacatgttagctagtgactaattaccaaagccatattttgaagaacaaaatcaaaatgaaagtttattttgacaagaataataacaaaacattatttagctattttttaaaaaatggaaatctattatatcagtcatatttagctatgtttttcgaaaaaaaaaacattattgctatgtgagaaattcaaccgtgatcctataacattttttcccacaattaaacattgaattttcctattccagattttttatagctggacaaaagaattcatggtgagaggcccaaggtctatttcgacctaggcccagttcctcttgtcttgccgacacagacaaaaaattggattcaatgttttttttttctgactcgttt

SEQ ID NO: 61744 - DNA, 367 bp, Arabidopsis thaliana landsberg
caaccgtatcatagggacggcagccaacagtatattttaaattttaatttcctccagtgtcaataaaaggcctccagaaataaaagactacccggctacgagccaataatgggaagaagtcggtgctttttgtatacattactctaaagaaaggttcagagcaacataaaaaaaaaggagtggacaaatctagactttggcaaccaaacaaattatgaatatttcactagtagtatataatctattgaattgtgttagtgatgtcgatgtatattcatgccgattaaatttgtgtatttgacgcaactaaacttatgtaaatgtttcaatgtgcatgtattaattgcttcttagctagattttgtct

SEQ ID NO: 61745 - DNA, 1725 bp, Arabidopsis thaliana landsberg
cagaaaaaattccactcgttgatgataatggggcagcttgtcaagagttgagaaaccaaacctgacttgaggcaatgtgaataaggaaaatcccttgacatctgggtgcatgtcgatcacaatcatatctaaacgcgaaagccctaaagcttctatgtcgactagctttttgatcctgcatagaagagcaagaggacagtcaggatctagagcaagaaggatatggagatacaagtaaagggaaacaatgaaaggatgtgatgagatttactaacctgtttggtgtgccactcccaatattaacccgtttcttcaacagagatacctgcaacacaatgaactagagttaataattcgagtcatataacaatgagcttgagaaatttatataaagattttcggaaaccatttcttttttaaatgagagtttcatatttagaccaaagcagaagaatctaattctatagtcttcttatatgcaaattaagaaacaaaaacaagagctggaatcagactgacgtgcaaatagttcgttcagcattgcatacgcctctgaaatatcgatatacttatcatcatttcccagactcttaacatgaaagacagacagagagagggaagaataacatgagtatatgcataaatgcttaatgatggatatataaagggatcagactgacgtgcaaatatatattgttcagcattgcaagtgcctatgacatattgatatatcttatcatcacttcccaaatccttaacatgaactaaaaaagaaagaaatgaactacatgagtatgcaccaactcttaatgttatatatatataaagggatcagactgacgtgcaaatatatatcgttcagcattgcatgtgcctatgatatattgatatatcttatcatcacttcccaaatccttaacattaactaaaaatgaaagaaacgaactacatgagcatgcaccaactcctaatgttatatacataatgggatcagactgacgtgcaaatacatttcatccgcacagcaattagccttagagatatcgtatttttgtcatcatatcccaagttccagagaagcaagaacaatgcattccacacaagagaaccaaaacaagattcaataacgaaataactcaaaatgccagtttcaatttgttctctcttttctatgtgcttagaattaagttcagttctctatagacaaatcattataagaataaaacactacctgttcctcaaccttcaaatgctttgagaacaacttcactgctggacattgcttagtcaatgaatgcaaacccctacatacataagacaggactcagtctaagcaactttctattcaatcaagcattatatcaatcaataacaaagatacaagtacacatatttacaatgtaccttagaagttccaaagatctcagagcagaggaactaataacaagaacagatgggtttcccggttcaactttcctttcaagtgactctccttcacaaagagtctctctccatgaagacccacaagaaagctttatatgttctcccaagttgcttacatcttgatccaacccttgagataactcaactatacacgtatctgcaattaaaccagacaaatcttaacttcatcagaacttggaaaatctgtgcattgataagtcgaatgaacaatcaaagcttgtattttttatatctaaacccataagatttccttaacagagt

SEQ ID NO: 61746 - DNA, 1264 bp, Arabidopsis thaliana landsberg
gtgtttcttcttaagcttctgcttctgtgaagccaatctttccttgtctatcttctccttcagtaaatcgagagtcgtcaaagcagacttctctgggtccaacttatctctcttcgccttctttaggttgtcatttgtttttttcttggctctagctttttgagccttgctaagacctggataccatttcctttctgtctcatcaggtaagtagaatctagcaggcgtgagctctatcaacttatcgaaaaattcagtatgctgatgagtcttgaaatccatttcagaaacatgtttaccctttttctttgtcatctacaacaataaccaaaaccaatcacaatcagaaaaaagcccttttggagaaatgacaaataataaactaaggactcatagtccaagtttcataaaaactatagaatcaagacttacaatggcagattaacaaaatattagatgataaaaagttaacagtggaaatcaaaacttacatcagtcccacgagttttagtcattgctctccacagaggagattagtccaaaagtcgtaaacctcaagacaatctgcagcaataaaacaaggatatattagtaactgtgaaagactacagatatcataagacatgtatttcgatatacattatacatagctataactaagctggtacaaatacattcagaatttcctgcatcttgtcagaatcgagcaagtcactgaatcacatcaagtgacaccaagtttactcgtttgctagatagatacagaactaaagaagatgactttgtagacaccattaatccataaaaacaaaattccaagttgtgtaattgagcaaatatccttattcattatccagaagagaaacagaaaccttagtataatacaacaagtttccccagtataacaagctcaggatgaataaagaggataagaagcaaacataaacaagccaaagaaacaaatcttatcctacaaagaatagaagaaccctaaagcaaacaaggatgaatcgtagaaacaaataaaagttgaagtttctacatatcagttcaggaatcattataactcagaactcattatcttaagtgataaacaattctgactctataatcaatttttttaagctacaagcacaaacccagatggaaagagagcgaattgatggaataaaagaaagacaatcgaaggaaaatctcaccggtagcgacgatggcgaatcaacggcgttgagagaagaaaaaagacagagagacgaagatgaag

SEQ ID NO: 61747 - DNA, 421 bp, Arabidopsis thaliana landsberg
  unsure (1)..(421): unsure at all n locations
gcacatccggatactggggggaaaggggggatctatctatttgggtgcggttattttacttaagaggcaggtgctgggcactacacaatcactgtgccaacaatagatagaaaaattattaggaggtgggtacctacatagtgnnnnnnnnnnnnnnnnnnnnnnnnnnnnnnnnnnnnnnnnnatccccgaacgagctcaagctcgacgagatggccatccatcacctagcggcgcccagcccatacaaccttcagcgcaggctcaaccaccagcatccatacgattaggcggtgctattacaaatacgatagatgccacaccacaggggaggcaccatgtgatgcaacgcatacagggttcactacagcctatgaatgtcgatcaaggcacacgtaaaataaagtcaatagatctgaca

SEQ ID NO: 61748 - DNA, 1685 bp, Arabidopsis thaliana landsberg
  unsure (1)..(1685): unsure at all n locations
agtatcatccaatcagtttatgagatttattatgagatctattggttagtaaaacttttcatttagtgagaacccaaatacgaatcatgtgttatgagttattcgtttaatgagtttttattggatttaaaataaagattcgaattcacataaaatttctacgagatataaaaacaacacaacaagtttgatacacatctctataaacatgctacagatttctacactaacaagctctgctcttgacaaacacacagaaaaaaggtaacatttaagaatcttctgtgtcgcttgtgctaccatgagtatcgatataaacctcagttgataaatcgatttcatccacgatccttcctctgtaaaaaaaaggattnnnnnnnnnnnnnnnnnnnnnnnnnnaccggaccagtgaactttagaagagaagatgttattacctttccagaacaaatttgccttctttatacttctgagctttctcgtgcgctgattcctacaaacaagaaagcaacaaaggtgacatcagaaactgctctaatgaatcgtgcaagtgagaccatagagagaggtgagatttacgtatttccagccaacattctgtccacaacagcagcagaaaatgtcagctacggtgtgcataccggaaagcatcagtctttcctctagaggacccatacttatgttcaccctaaaattcaaatttaacattggaatcagctatactacatatccaacctgattgcaaaaacctcgcattagagaaacaagaacactgtatcgatgcagagaaactgaagcaaaggcagagaaaacactagtttggagtaatcagcaagattcagaagatgataaaagctaaaagacagtttccatctacaagttatatatacagaaactgatagcaacagaatactagaatctagcattgtatactgcttgacattgaagaaacagaacaagtccataacaagtacatcgagtaagtttatacttacgaacggttgaagaggtaagcctttcctctacggcaatgaaacgactgaggaaaaaagataagtcagtaaggtttacactctatatataaagaaacactactgtcaacattaagcaaagcttaaaaaacattatactataatcttaatttgcctcaatttctcatatctcaattataaaactttcatctactaacacaagagttttaagtagaagtaactcttaagtacaagttcagcttaaatataagattcttctctcaagtcagaccctttattcaggtacattaattccccaatctctatccgttaaacccatatgaaaaacactaaacttgagaatttctatgtaatatacatcaattcccaaaaattcaacaagcagtttcaacatcagcagcattatcttcacaatcacaagttttctcaatggtttttatataattgggaagaaatgagaaccaacactagctaaaccaagcaaccttgtaaagggtcctacataaaattctacaattatgaatcgaactaacagcctcagagagagatgtgaaaaaatatgagaacttgggaatagctattaagttaaaggaggaaactttaagatacccgagagacaagatcatcgggaagagcgagatgggttctgcagaacctgcatctgtaagatcttccttcaagctccaccgtgaa

SEQ ID NO: 61749 - DNA, 275 bp, Arabidopsis thaliana landsberg
cactagagactaagttccacctggattaaaaaactacgcttcatattatgcacacaaatgtcaatcatgccgataatattttgaactatgaaaatataatgtcctgggggggagagaacatgaccaaatgaaatatctcgacgctactaaaatcataaatctggttatacaaaacgttgcacattaaagggtccgaaaactactaatatttctatttaagggatgcggccagggagacaataccacgtcttgtttatgccctagttcgcaaagac

SEQ ID NO: 61750 - DNA, 1356 bp, Arabidopsis thaliana landsberg
gacctgtcatggcctaagcttctctagcagccttatgttaattttggcccccactatgtaaaaaggccctatgactttattatccagtcttatacaaagagaattgctatagtatcagtgccacgaaacatttttttttttttacgttacacccaacctattgtgtgaatgggccaatatttcccaactctataatttatcacttttaagtgaactataaaagtgcctcgaaaattttgtaggggatatttgaagtccatctataaagtataaactgaattttcaacaagaagtttatttgcctctcatctaatcttcatttgagacaagcaaactgagtaatctcgcttatattcgagaatttggttttctggtttcagttgggtctacaggattattgtttctcaagtcacctgctacatttctctgatcgtcttgttgaaatgtttgattctgtccttgtccagaaaacccttgtctaaatcctggatttcctgctaatccatgtggaggaccatagtttccaccgttctgcatattgtaatttgcggggttcactggaaatctttggttgaagtttgcagatgttccttgaccgtaaccgcctggtgttgcttgattgtagtttccatggtatggaggcgcctgtgctccatgggcttgattgtaactagcctgatatgaaagcactgcataatcttgaccttcccattgttcagggatatgagttccttggccttgattgttatacccctggtatgaagtcattccacaatttggacatcgacattgtccagaaaatggagttccttggccttgattgtaactaagctgatattggggccattgaattccttgaccttgagggggtccaggataccactgtccaaactgtgcaggaccatagtgtccaccgttctgtggactgtaattccattgacctccttggttgtgattttgttgtggtccttggagaaagttaccttgtggtggtccttggttgtagttcacaaatgcccattgaccataattgcctggtattacttggttcggaggcaccggagctcctaagccttggctgaaacccatctgatatgaaggttgaccttcttggccttgtcctggcagcggagttccctggccttggttgtaattccctcgatatggagacaataactgacctccttgaccttgcccatatccaaatcttggacttcctgctccttgtgcaggactatagtttccaccactctgtggagtgtaattcccttggcccatttggttgtatttctcttgtgtcgtttggacaacgttttcttgtggtggcccttgtttgattgcacaaatgctccttga

SEQ ID NO: 61751 - DNA, 1740 bp, Arabidopsis thaliana landsberg
tgcgtgggatcaacaaaatccatgtgttttacctgccgatttttgaaatgtatattcttggcaggtttacgtgggacgtgctatgaatgaaaaaactgacaaggcaaaaccggaatcattgggagataaagccattcctagagttagaaagagcaaactactaattgttgatcttgctggttccgaaagaattaataaatctggtttgaactccttacctgttcatataataaccattcatgttatatcaagctagtttcattttgagttatatgctgttttcctgaaggaactgacggccacatgattgaagaagcaaaattcattaatctttcactgacatccctgggaaaatgcataaatgcgttagctgaaggcagttctcatataccaacaagagattctaagctaacaaggcttctgcgtgattcttttgggggttagttgaccaaaacatttcctagcctctctagatatagaactcataagcgtggcttacttcagtgtctatacattttgtcatatcttcctagttaaataaactctgaaataggcttttgtctctcaacaaataggttctgcgaggacttcacttataataacaattgggccatctgcacgttatcatgcagaaaccactagcacaataatgtttggacaaagggtgagttttcatgtttctcttatctcgttctctgcagaatctctagtatctgacatctaaagaaactcataaataagaaagactatattttaatattgaacaatcttatatctttcaaaaacaaaatatagcaatgtcttcttggtcatgtcttcctttataggcaatgaaaatagtaaacatggtaaagcttaaggaagaatttgattatgagagtttgtgtcggaagcttgagactcaggtggaccatcttactgcagaagtcgaaagacaaaacaaactaagaaatagtgagaaacatgagttggaaaaaagattgagagaatgtgaaaactccttcgctgaagcagaaaagaacgcggttactaggtcaaaggtatttttgtctcttctaaagatcagctactctgcgtttactcacagttattgatattcaactagtttcttgatatgttgcgtatatttctatgatatgacttacagtttctggagaaggaaaacacccgcttggagctcagcatgaaagaacttttgaaggatctgcaactgcagaaagatcagtgtgatctaatgcatgacaaagccatacagttagagatgaaactgaaaaataccaaggtacactttctctcatgtattgttagtagttttctcggtaactacttcagtatattgttggatcaatacttctctgttattgtctttattaactacttacagaagttcttgaatgttttcttaaaggccaggcatcaaatacatatacataaatatgtttgagctgtgtataatagatggctctgacagtgtccttttaattgttagtagcagcaacagctggaaaattcagcatatgaggcaaaacttgcagataccagtcaagtatatgagaaaaaaattgcggagttggtccagcgggttgaggatgaacaagcacggtctacaaacgccgagcatcaattgactgaaatgaaaaatattttgagtaaacagcagaagtctattcatgttagttactatgataccattcatcataaattgttatagcttatgattcctttttctaccttttaaac

SEQ ID NO: 61752 - DNA, 569 bp, Arabidopsis thaliana landsberg
  unsure (1)..(569): unsure at all n locations
agtgaatgtggggagtttattgatccaaaatgttccctttttttatgttgttccactcaataaactcttgcaacatgacgtaaatttgaagtctgtttcttgagaggtcagatggtgaagcttttatgaggagagaattttgtaatgtatatatatttgcataacttataagtcaaatttactatccttagttacaagtttcttcatcatatatccctaactataaatatatttatatgctcatgtgagtggattcatttgtactgtaaaacccttagaaagacgtcaaattagtatttgatggtttagtgttgtcttgttaccactatagtataaaatttcaagttccttaattttcttttatgttgcccatacaataaaaatggtggtcgaataaaggtaaaagataataaaaaataattgagccggttattatacaaacggtgttgtttggataaagctaattggctaagggttgtgtacgtgttggaatcaaaccttgattaatttggaagaagaatctaggaatgagaaaagaaagtgaagaggatccncctaaaaactacttt

SEQ ID NO: 61753 - DNA, 1140 bp, Arabidopsis thaliana landsberg
tcaccacaagctcattatttccggtttaaaggatcttttcactgatacagctctaatcgacatgtatgccaaatgtggagatctcaacgcagctgaaacagtcttcagggccatgtcgagtagaagcattgtgtcatggagtagtatgatcaatgcctatggaatgcacggacggataggatccgccatatctacattcaatcaaatggtggaatccggaacgaaacctaacgaagttgtcttcatgaacgttctctctgcttgtggtcactctggttccgttgaagaaggtaagtactactttaacttgatgaaaagttttggcgtatcaccaaactcagagcatttcgcctgtttcatcgaccttttgagccgttctggtgatctcaaagaagcatatagaaccatcaaggagatgccttttctagctgatgcttcagtttggggttctctggtcaatggatgcagaatccatcagaaaatggatatcatcaaagccattaaaaacgatctttcggatattgttacagatgatacgggatactacactctcttgtccaatatatatgctgaagaaggggaatgggaagaattcaggagactgagatcagctatgaagagttcgaatcttaagaaagttcctgggtacagcgcgattgagattgatcaaaaagttttcagatttggagctggtgaagaaaatcgtatccaaacagatgaaatctataggtttcttggaaatttgcagaatctaacgaatgaagaacatgtcgtagattcttagagccaatgtaggaagatatatattctttttgacccaatagaaaacagagatgcagattttgtaatgataaccaatcatgtgttttcttttctttggcccttataagagaggacaagatatacaaagagcaaccaacacccacaaacatggggttgattgacaataataaaacatcgatcgctgaaaatcagtttttgtccattgttacttgctctggttcttttccctctataatgttcctcaaattgtgaaatcggatttatttcgaaaagctttatgttaatagcactgttggaggagtacctgcagggcacctatgtcgccttggtcttctggttggatttccccacccagta

SEQ ID NO: 61754 - DNA, 656 bp, Arabidopsis thaliana landsberg
tttacagaaacataccaggcggattgttttcatgcgaatctcttccttttgattatacagcactctttcacaagaaaaaaaaaggaaatttagtgagtgccccataaacaaaaaaaataaatattacagccttgacaatatgaaactgtcaaatgctgataagagaaaatgaaaaaaaaggccagaaaaggaaggagaaagaaccacaagcacaatgctgggaaaaaaaaaaaaatcctgaaatgttaatatgatgaaactaaagctgcaccaaagaaaagggaatcaggaaaggggtgagatagaaggaacctgcaaagcgatattcaggcagtcattccggattccaggtctcattaaaatcaggctccaaacagcactgagaccttgagtaacacggtctccatgttgtaaatccttttcaacttcaccacttccaggacagcaaaacgattccaacaacttcagaactgatttcggcagatgtggagaatctccaagcaatttacttaaagatttgtcagacggtggaaaagaatctcttagtgcttcagcctgaaagataataatgttttctgagattccctcgtgaaaaattgactcagatgcaaacaaaattgaatgcttaccacagttagcaagaaactttcatatgc

SEQ ID NO: 61755 - DNA, 1101 bp, Arabidopsis thaliana landsberg
agtataatgccataatggtgtatacagtaaagtagacagcggtcgagtaaaaccgtgatccaaagagaggacataacggtcacaaagtttgcgagtttccaagaatgctagttgatatgattggaaatgggttgggttaaggaattgtttgattaaatatgtcatcaagacaattatttcatatttccacatgacttggtttgtttatgaacacaaataatgaatagagagatatataactattacataaatagttatttaaattttttgcatgtaatttattaaaacttcagttatgtattgtggtggttctcattcacacaatatcatgaaaatgaatagatttcagactagggacaaatctttttactttacattcaatatcctaagaacattcccaaatcgttttaagaaagggaacaaaacaattgcagaggatttgagaaagatgaagtagaatgtggatgtgagaacccttacatctccaagaaacactaaacaatactaataatctactcattcataggtttacattattttcttttctgcacataagtttacatgattacatccatttgatctcactcccgttaggtgccgactgccgacccaataacttctcataatcttatacatatattattgagaggttcatattatttttactagtatatataatcgaatgaccctgtatattttcatttgtgcacccactttttttttgtttccacctaatcaatttttgattaaaaaccattaaataccaaagagttgtccattatgtttttttttggtgttttaaatgtccatccataattattaattcataaagcatatcactaaataaaattgatgatataaaaacaactatagtatgatcatgaccaatagttttatgtgacttttgtcattatgtagatcaacacaactgaatctgttaaaacgtgttcaaatttttttttttttgtagaatctgtttgaacaaacaataatgaaaaaaacattgaaccggatcgataaaccaatccacgattcgatcctatatcctaaattgacgtaaaccaatccggtccataacaataagtaacatgtatccgccga

SEQ ID NO: 61756 - DNA, 433 bp, Arabidopsis thaliana landsberg
aagaggaggtgcacctaataaaaaatcttatggttaattagaagcattcaaattttggtttcactttttgaaatgagattgcaaaaaaaaatatgaaactcatttgtacgattaatatggttagttgttggctcaaactttcacgccatggaaataaaaaattgtttagattactatagatccaccaacacaagcgattatggtgtacgtagataggacaatgcactggattatggctattaaaccctttcatacaattcgtatatatgaggacaagataaaatcttgtgattatagatattaagaatatatgagtaggaactaagaatgaactgaaaaactctatcttggaataatgtgatatatatatatatatatatatatatatatatagtctattgagcaagaaaaatattgacagatttattattac

SEQ ID NO: 61757 - DNA, 859 bp, Arabidopsis thaliana landsberg
  unsure (1)..(859): unsure at all n locations
aagatataaatccaagtcatgcacacattcattaacctacactttacataattactcccaagcatatcactgggaagcgtttcaattgattctgatatgactgcctcatatcacttatcactctttaattattaaatcagagggtttataacatatatttataaatattgaagataacaatgatattattgacatattttactatgctgcaactttaattttaattcattttaaaacacaaatattggctgatcttttttattctattcatcggctcacttttttttttttttttttttttttgacaaacattcatcggctcactaatttacaaacaaacacattttttgaaacatactggcccccacacgcgtcctcttctggttatatcgctatcattacattttcacaaatttcaatatggatattgttcataaagaaaatagaaagaaaaaaactagaattgacccaattgaatacaaaatatagtacatccgtttcacgaaaacacactgtatataatatgcagattacatgtggcaaggagtaatattgttggctgattcactctaatgtcatttttgataaaggtgtctcgcagtaatgtcgcttagtaatgctagctattttgggataattatatgttatgaagaaagcatatactaatctcatcatcagnggccaaattttaatcttacgtctatataaacttatttataccactaagaacaccaagacgtaggtttcatgctcaagtggcaatatctgattatttaagtactttttttgtttaaaattaaaaactgatcggattttcgcagttttttagtcattgtttataagaatttcaagtccaact

SEQ ID NO: 61758 - DNA, 390 bp, Arabidopsis thaliana landsberg
  unsure (1)..(390): unsure at all n locations
catatttactagggttgtcttttctccancaaagtttattttaacggcctagaattaataatcctgntgacgggttcattgaactgtttttcgagtaccaaaacgcatataattgtggctttcctttcatggaatattttacattacattaggaaatttgcttgtttgcgtggaatactaaaaaccattataacagaaaataatgataaacagaagtatgcaactattgcggaatataatagttattgttttcttgtcagagataaatatcgactatttattagatacattttcgtattactagaaattccatattgttataagaatattcgtcaacatttcagtctagaatctccggtcgtaaaaacgtatatatgggttatatatatg

SEQ ID NO: 61759 - DNA, 1244 bp, Arabidopsis thaliana landsberg
tgaagctgatgtagacgaatgcatcaggaacaagtatttttatagtaatgcaagcaaccgtcttcgaatgtggtgtgataattaatccatagagaataagttaaagcaagtcagagagagacatgatattgtgtaagaaaactcgccttttcgtcaactctgcttcccattttctgtatttagctagagtttcacgattaccgacctgaaaattgtttttaactgtgctcagctatgtttgacgagatttcaaaagagctaataaggactatgtacctttttaattctcttcacgttctccatggacctaatcagactctagtatacaaaatgtagaattatgtaaaagttcaaaaagcaacaagatttaggaacaaaaggataaacctgcaaaagaaactaacttgtagctccagagctagattctgaacccgcatagagactggtgacatcagtacagtaacaagaaaagctgtaagaacaattgacatccacctataatacatacaagattagaaactaatcactgaacaaaaaccttaagaaaccaacaagcaataacaaacacaaagtccaaccaatataatcaatgttaccaattgaagccagtgagctcgtggattccattaatcacatactgcacgaatccctcaggggaaaaaacactctcagttgtagcagtacactcatctatagtggcgacattagtgacaattgcttccacagattcttcaacaacatttccaaaagcatcaatctttgaacacaattcttctggtttagaagacatctgtctacatagcgatactacagaaaaccccactaattgaacaaaagacattttccttgtatcttcaaagaaaacatgcctgtgaaagctacgaatcagaagacttgaatctgggaaagtgggttcagtaaaatctttgatatgatgatgaagaacaacaggtcttgaggtcatgtagcataacaaatttgggtaaagacttctccttgataagctacgaagacaggccatttctagaggtgagcaaagaagtaacgctgagctaaaaaagaagaaagattgcaacttgggatcgcgagtgggtgatttcttacacgaatctagacaaagagacacatcttaaccagagatttccccaaatttcaaaatgaaacagaaaccctaagtttcccaggataaagagatacacagtggttccccatttgaagcagaaaagccgcgaaagtaatgattt

SEQ ID NO: 61760 - DNA, 634 bp, Arabidopsis thaliana landsberg
cgggcaaggcggcctcgagggacccttgaatgaagcgcgcggcggcgatctgctgatcgtgccgttggccacaggcgccacaccatgagcaggaaacccgagctgtcgttctggcagatatggaacatgtgcttcggttttctcggcatccagttcggctttgcgctgcagaacgccaatgtcagccgcatcttccagacgctgggcgcagacgtcaccgacatacccgcgctgtggatcgccgcgccgctcaccggcttgctggtgcagccgatcgtgggttactggtccgaccgcacctggaaccggctgggccggcgccggccgtatttcctggctggcgcggtactggccacgctggccctgctggcaatgcccaactcgcccgccctgtggatggccgcgggtctgctatgggtgctggacgcctccatcaacatctcgatggagccgttccgtgcattcgtcggcgaccagttgccaccgcgccagcgtccgctgggctatgcaatgcagagcttcttcatcggccttggcgccatcgtggcctcggccctgccgtggctgctggcgcatgccggcgtggacaatgtgggcgccgccgacgtgatccccgatacggggaaatacgctt

SEQ ID NO: 61761 - DNA, 725 bp, Arabidopsis thaliana landsberg
ataaaaacaaaagaaaaaaaaaaaaaaataaaaaagaaaaaaaaaaaaaaagaataaaaatacaacaaaaagaacaaaaacagagaaggaataggaagcaaagcaaagagaagaagaaaaaagacaaaaaaaaaaaaaaagaaaagaaataaaaagaaaaaaaaaaaaaaaaaaatatttaaaaataagaaaaaaaaaaaaaaaaaagaaaaaaaaaggaaaaaaaaaaaaaaaaaaaaaaaagaaaaaaaaaaaaaaaaagaaaaaaaaaaaaaaaaaaaagaaaaaaaaaaaaaaaaagaaaaaaaaaaaaagagaaaaaaaaagagaaaaaaaaaaaggaaaaagaaaaaaaaaaaagaaaaagaaaaaggaaaaaaaaaaaaaagaaaaaacaaaaaaaaaagaaaataaaaaaaaaaaaaaaaaaaaagaaaaaaagaaagaaacaaaaaaaaaaaaaaaaaggagaaaaaaaaaacaaaaaaaaaagaaaaaaaaaaaaaaaaaaggacaaataaaaacagaaaagagacgaaaggaaaaaaacaaaacagaaaaaaacaaaaaaatagaaaaaagaaaaaaaacaaataaaaaaaaaaagaagaaaaaaaaaacacaaacaaaaaaaaaaaaaaaagaaggaaaaaaaaaaaaagaaaaaaaggagaaaagaaaagaaaacacaagaagaaaaaaaaaaaaaaaaaacaggagaaaaa

SEQ ID NO: 61762 - DNA, 426 bp, Arabidopsis thaliana landsberg
aaaagaactggcgaagaagggtcacgccttggcttaattccagggaccaattggccagcctttttttcctggtggaggccattttggcaggctgataatttggaggggatatggaaaatccttggttcttaataaaataagtttggttaaggtcattgcaaatcgttaaaccattaaccagacctttcatggaccagggtctaaaaaatctggggcagttcgagcaggaccttgtttttggggatgctggaaaaaaggacgttatcaaatttctgagcaccacccatgtaagatgctctgcttttagtttcatacatcaggagattttatactgaaaatgagcaacatgtccagattataagccacgaaagcaagctgaggttaattatgatggttgctgcaatatttccgaagaagttcgaaggt

SEQ ID NO: 61763 - DNA, 350 bp, Arabidopsis thaliana landsberg
gctgaaatgcgacatgtattcttccttagtcttgtttccattccccacttcaagcatgactggagcggggttaatataaccaatttttctttctcggccctcgatacaattttctcgaatctgtattgattactccaaattatttaccggtccacgatcctggtcttgcataagatgcccatcgatcattctgatccgctatcaatgtcatgctaacaagcaaaaaaggaagagaaaagcatcttcaagttcttgtttcactaagattgggaaaaaaccatcaaagaagagaaaccttttccaatcatcttggatatctcctgttgttctccaactgttgccaatatctc

SEQ ID NO: 61764 - DNA, 442 bp, Arabidopsis thaliana landsberg
ccctccttctttaaccacttcgccaccaaggaggcgatcctcgacgcggtcgccgacaccgtgatcgaacattttttttctgtcggtcttcgacggcagccccaactgggggcaggcactgctcgactggggccgctcctaccgcgcggccctgaccgagcatccgaacatcgtccccttcctcgccgccgggcccggcctgcgcccggtcgggctgcggatggccgacgccgtcttctgcggcatggtggaggcgggctggtcgccggcccaggccaccaggatcggcgccctgatgcggtacttcgtgaccgggttcgcactcggctccttcgcaggcggctttgtgggcgacgcggacgcctactaccccgtcgactacccgcacctcgggcaggcccatctggtggccggacaccggcagcgggtggacgagggcgct

SEQ ID NO: 61765 - DNA, 250 bp, Arabidopsis thaliana landsberg
taatcgctcacgtgtgtactacagtccgtattatgaatgtttggctgaacgagtactcggatggcttttgggcttaacatcctctaggatgctcccacctttttcattttaggaaacagatgcgggtacctcctgtggcttacagaaatcactaaactaacacatggagttgctactatgcgtgacgccctgccccttttgtggtcgcattgcctagatcttaccaaccctgtgtaactttacttatgga

SEQ ID NO: 61766 - DNA, 882 bp, Arabidopsis thaliana landsberg
ccgggcttatcttgcaacttggtaaaagactatatttcaccgacaaacacttgtccaggcaactatgctggcgtcatcctcggagaaccttcctccaaaccttaccttggttacgtcggtgatgtttctagattcctatggaactttctggcagataaaacatctgtccaaaagggaaatacaacctcagtttgttcaaaaggagtctgtagcaaaactgacgaagtgtgcatcaaagcagagagcaacaaggaaggaacatgtgttgtctccacaaccaggtaaactctgtgcttggaaattgcaatttggtttgcatgctcaagttctctcttatgtctcaaaatgaaccaaaatcttaagtctggtaggcattttataggaattattaattaggataggcttcagaagtggagtgtttttagacttgggagaaagtctatctttagtttgttgacctttgaattgaagctatcatcattttcttcttcccctgacctgatatgttgtatgtgacctaaccaatttgctgtctgagcataatacattaagttctggttttggcaggtatgttccagcttattcaactcgattgaagtataacgatggagcttggacaattctaccacagaactcatcagattctatggggatggttgatccagtgtggaccgaaagcaactgggacactttaagggtgcatgtgtacacagtccagcactcagcatacgacaatgcagtcctcgttgcaggtattacagtcacaacgttggcttacatcggaattttggctgctaagtcaatcatcacaaaagccttgaagcaggactgagacttgtatttaattccctctcctctcggctcaaaattacttgtcagttt

SEQ ID NO: 61767 - DNA, 634 bp, Arabidopsis thaliana landsberg
tctatttcacactcggctatgaaattgacatcttcttcctcttctttcacggcgaaacagagagtaagatctccggttgctgatccggtgttgtctagtagacgatgtcgacgtgttcggtgaagtagcgacagagatagttaggttttatgagtgcatgcattttttttttgtttttttttccctggaaaaggtgacatatagctgtgtgcttgtttgattttccatatattatttctattttatcaaaatcagattttgtggacattttcatttgtattcttctttaatagtcctctttagttttgatgataacaagtttgtttaatactttttttctttcaagtttgttctaattctatattgttcttagttcttatagaaggagtaggaatatttgaagaattgtaagggtccacatatctactttttgacaaagcattatttataaatggtgaatattttgaagaacaaatatatatatattttttttctaaaccaaaatggttaccacaaatatgttaggggtatttgtatgacaaagaattatttgttattttcctaatgtgtcataaatcctccccaatgagggacggaaatatcattgtcaccgagtttttagttgtttcatttt

SEQ ID NO: 61768 - DNA, 654 bp, Arabidopsis thaliana landsberg
actggaccgttgttttcacggaacgcccactatagttaaggatatcaatataattagtactttcacattgacgattacttagaagttatttgtaagtataaaaaattggatacgactctatttgaaaagaaattcatggtcaaatacacacatactacatatgagttatcaaacctaataggattgtaaatgtatcaatcgtaggttgaaagaaaaatatgtaatctatccacccatatgaaagataagaaacaattggtgatgtatcaaaaaaagagatttactttctagggtaaggacatgacaagctgaactgaatatttcatgatggggtgacacctatttccttgaaaacgagagatccaatcaattaaagactctctctgttttgttttgccctctcatggaggaaaataatattcaagacgcttaaatgtataatagagattcaacgtttgtattattgtttatggaaggagggatccttcgaatgagtaacgtttgccttgcttacacattcctttggtctcttaaaccacctatacccacttaaccttaataaaaccttacaagtaatcaatactaacctaatttgacattcatttactcatctaacacaaggaagctcatttccaacctattaaaaccaataac

SEQ ID NO: 61769 - DNA, 261 bp, Arabidopsis thaliana landsberg
  unsure (1)..(261): unsure at all n locations
gaccacccaccccaaggcccgggcgacacactctcagagccacccgatgaagtctgggccctagccgacgatcccaaccccaggactacagatcatactacnnnnnnnnnnnnnnnnnnnnnnnnnnnnnnnnnnnnnnnnnnnnnnnnnnnnnnnnnnnnnnnnnnnnnttctggtgaacacatccggcggcccagcgaactaatctataccacaaccagtgcggaacaaggagccctctgagcctagcgaaccacgact

SEQ ID NO: 61770 - DNA, 2448 bp, Arabidopsis thaliana landsberg
aaaagttttacatcttattaacaatcatgtacgatcacataagaacagacatctctaaatcatatatagcacaaatctttaacgttctcgactagaactgcatctgcaaaaaaattcacatttttacgtaatcaatacagactttatgtattgacaaaaacacatatcctaaaaaaaatcatatctttgacccccaaaaaaaaaaaactaacatatcaacagaacctctaaaaacatttaatcggaatatttgtatttccctctatactcaaatggacatatgatcacacaatctaaacataaaccacctttggtatgtgtacaatctatctggagcatagagaatttgacccaaacgggtgagttctgattctctacgacgaagtcacccgcatgatgataaacccacctccccgactcatccaaatgtcgttccgacatagcgcattggccatccgatgtagacaactgaaaccggaccggtttgatgtcccagccatgaacttggtccaaactacatgttttcctcccacactttctaataggtttgcctaattgtatcttgaaaagtaaactggattttccgggtgcaaattcgaatctgatttttccaactgcttctaaccaccatatttgccggagataagttattgatccaaatctgaatgaacaaaaagttcaataaaattacaagttaagaaccattgatcatatgaaattaatcataatgcgagtgttggtccaactccaagtggacaatgttgataagctctaactttagttaaactatagactatatgtcacttaattatgatatcacaagtggaggaaatattcgatctcatctaatagacttataaataagtacttaacacttttttttttgagtcttatgtatatgcagttcaaatgaaagaaattagtagtgttttgattggtagataaatgtcaaagtaacaacgaggcctgctaatgatagacttagcacaacttatctaccaatcaagtgttatatatatcaaatatatagataaatatattcatattgaagtcatacagtgggttaatgattatgcataaatatatttatattctacttgttcctaatttcggataatattcgaatcatatatgtggacagaatctggatagaatttccaactaaacattataattattaaagaaatatatgagatatatatataatacatgtggggaaatagaaggaaaaaccgattgttgaaagaaagccatccaattattgggtatgatcgagcaaatttgggataagagaaaatgacacattcatcgacgacccaaaactttccctattcactaaacaaaccagctttttgagcttatctaaaaattctatatgtacataaatacattacctgtaaatttacgtattcatatatctatatatacattgtgtacgtcattatacatttcgtatacgtgttgattaatatcttctatctaagattcttagagaaaaccaaaatctaacatcacctgaacattatttaattttcactttatagttccctcaattatttcagaaaaatatctactataagaagtttatgatacttgagcaataatacatgagttatgatatttttcttgtttctaagagacatgagtagtatctttcagtttatctctagatctggtttatggagaaaaaaaaaaaaacgtttgagtagtttctttttttacgtagttaataatactatgtttagaaattcttaccgaattgttgcatgaaaaagctattgttggttactttttttggttactatatacttttatgtctattcttagtaactcgtttaaattaatatgcaagtataaaaattgacttttatgttttcaggtttcttcgtgaagtgtgtaaatacgaaatgtgtaatcatcaactttgaccaaggttatggcatgattatatgatttgtagccaataataacattgttatttcttgtttacattatccaatgattacaattgaaagggaaagaaagaagtgttgaaaaagtctttccctttatactagaactaatgataggtttaaagcacaattaaattctcaaatcagcgagagtctaactttaaggtattactaaatcaaagtagatcatggatattcgatatatagtgtttggagcataatgtatcacaagattaaatatccgataaaaatatagcttatgtaccatgtcaaaaataatgaatttttcttacagaatatctaattcttgtccggcctaaaattttgagtacgatgaaaacaaaatgagaaataaaaataaaaataaaaattaagagagaaggtaaaaaggacctggattcatcggaagaaatatgtaaccaataccggcgatcatcaatgccggttataaaaaaaaacctttggtgatatcgccaaaaacactttcccacttctc

SEQ ID NO: 61771 - DNA, 547 bp, Arabidopsis thaliana landsberg
attcgcaagtcgttttcacagtgagagaactgaaggtgtgagtttcgctgttcaaacacaaccccgtcagtcaccatatgcggatcaccgaactcatacttgtacgttatgtggaaagcttggtcattttgatgagaattgtttcaagaagattggatatccatcatggtgggtagagaagccaagaaataaatcgaatcaaacctccaatggtggacgtgctacaacttcagctccggttcaacattcacgcggtcgtggagtttctgaaaattcacggggtgcacaagcaaatgcgatggtcgtctcacatccgtcaggttcagcgatgcatactacaacaatcactgattctgatagagtcggcttgagtggtcttaatgatcatcaatggaaatcactcgttcagatgctcgaagaaaggaaatcgtcctcgacggatcgtcttaacggtacgttgtttcttgactcttggattatttgataccggggcatctaatcacaatgacaggggtcttggatttttccgatgagatttatgacatgc

SEQ ID NO: 61772 - DNA, 767 bp, Arabidopsis thaliana landsberg
gtttaaccacgttcgttctcacaatgaaaacatttaagtttaacataagagcttactattcttgaaaatttcatttgggtttttgcaaatttcgtacacttatacactattcgacgaaaaaaatctaaaaatttggattatttgtttgattgattatttcatagcacaacatttttaagtattcttattcacctaacactctggtgatttaaaaactcaaaatttaggaaattgacgtttaagtgaattatttgttatgcgagaaaatatttttttctgaaccattagttgccaaatattattattttcccacatgacataagtggtttatcatatatggattagttcaaagtttagtcaataactttgaaatttgatagtggattagttcaaatttgttttcaattaatattttcatatttgttctactctaattggtatttataatcttttaaatgtttttttattaaaacatacttaatatataaaagtattatattatctacatatctatctatccctttctccttaaaaacaaatcttatacttactattttgcgacataaatattaaattatattgtttacaccatatcagtcagaaatctgatttgctaacttaaaactaataaccataaaatttctaacttaaaatgtaaaattcaagccaaattatgtactttgaacttcataaatcattttcaactatacttggaagaaaatcattatcatatgtattataaggatgcttaggtttaaagggttgct

SEQ ID NO: 61773 - DNA, 534 bp, Arabidopsis thaliana landsberg
tattttttcaaacggtttccattttctcaagaaaaaatgaactattatttttttgaaaaataaaaatcacttagagaaactgggttgccaaactggcccatagcgtctccgacggcccctgttttaatcaggaataatcaaaacaaaaaacgagtaaggcttgcattgctcatttagtcattgcaatagcctcggaaaacctccgctcactacgttgtttcgcgtcggacgatacaaacgcaaagaaaggtcgtggctacttggtccttgcgaggagaatccttgcctagtactaggaacgtgcaagaatccatccggcatccgccatccctgctgggtacgttgggacttgggacgagcccggaaccggtgtatatgaagcttccgtgagctccgtctagtgctgtggctgaagctgccgctgggtacgtcggtccctctgcgccatcgccgccgctgccgccgcctgctgctgctgctgctgctgctgctgcgctatgagggcctgctgcttctatctccggtgccttatgc

SEQ ID NO: 61774 - DNA, 737 bp, Arabidopsis thaliana landsberg
ctggaaaaccaagaaattctttttatttcttctgcaaaatctcttttctactctaaaaattctctctttttgactcacttaccagatctccactagattttactcaattctttaacaaaaggtttaaacttttatagattccttgaagtgggtctaagcaatgcttcagagaaattccgatgatttcttctctaaccaaaataaaaatgaagtatcatttgatagtgatttttgtgttcttcttttgattctcttatctcttccttcccatcaataaacccaaaaaaattaatatcatttttgggatcttattgatcccaaaattcgtaaatccgttgacctttgtcggcatgatttgttcttacttaccgtaaaaaaaacagagctaggttttagttttcggacatggaggttatgagaccgtcgacgtcacacgtgtcaggtgggaactggctcatggaggaaactaagagcggcgtcgcagcttctggtgaaggtgccacgtggacggcggcagagaacaaggcattcgagaatgctttggcggtttacgacgacaacactcctgatcggtggcagaaggtggctgcggtgattccggggaagacagtgagtgacgtcattagacagtataacgatttggaagctgatgtcagcagcatcgaggccggtttaatcccggtccccggttacatcacctcgccgcctttcactctagattgggccggcggcggtgg

SEQ ID NO: 61775 - DNA, 511 bp, Arabidopsis thaliana landsberg
  unsure (1)..(511): unsure at all n locations
gctgctggcttttgtgggtaccggtgaaacggtggcggccaacatcagattcgtttccgttcccttcctcatgaagtttatcggcgattcattgcacctgcttcctgcatcggcagtgctggtatnnnnnnnnnnnnnnnnnnnnnnnnnnnnnnnnngtcataacaaagaaaaattgtcgcatgtggtaagggcgcagaagaagaaggcaagatttgatctttcttttttccggaaagaaaagtttttcacggccatcatgctctttactttcttctcggtactggctatttacctggctgattacggatacctgatcgcagtaaaatatttctccgtacaaacagagatagaaaccgccagcatagtggcggtgatcttcagtgtgatcaagagcggagaactgctgttctcttttctttcacgcgccatacagagtaaatacggattgcgtgtatcgctggttgtgctgccctgcctgctgatattgttctcggcatttgctatcggc

SEQ ID NO: 61776 - DNA, 284 bp, Arabidopsis thaliana landsberg
cgggctgatactcgaccagccacacgatcccacccagtgtcgttgcaacccgcccgcgcacgacgagcgcggggccgcccctgaaagaacaaccgccttcttcacgcccacccaggaccgcaagaacacaccaaaacccggaaatgccaggcctgacacagagacccccgaacacacccagaacgagagcaacacacccaactggactgacaacctaaaaaactacaacgaaatgaccggggctcaaggataactgaccaaaaaacggatcaccaaccaggcgc

SEQ ID NO: 61777 - DNA, 475 bp, Arabidopsis thaliana landsberg
  unsure (1)..(475): unsure at all n locations
cggctacgttttagttgtctgttactccagaacaagtaataacgacctctatgatatggacgcgggttccttctactggtccgtgcctcacgtctttggtgacataccggtccctctaagagccatgacttgcactgtcgtagggaagaagcccattgcgtttggtggaggtgacggccctgaatactacaacgacgtctatgttctggatacaacaaacttccggtggagtaagccacggatcatcggtgataagatgccctcaaagcgtagggcgcacacggcatgcttgtacaagaatggcatctatgcattcggcggcggagatggcgtacgagccctgaatgatatctggcgactcgatgtcacagacgtcaacaaaatgtcatggcgactagtgtctagtcctgacatgaccacgnnnnnnnnnnnnnnnnnnnnnnncaaggcacggggctaccacacagtcaacatg

SEQ ID NO: 61778 - DNA, 1681 bp, Arabidopsis thaliana landsberg
tgcgatttgataatctccggatcgattttcgaaatcgcaccttgaatatctgcaggagttccatatgaataaattcgatttatcgcaagaaaaaaaaaagagagagactaaaaaccaaacgaacctcggaaactacgacggcgatcgagaaatttctggaacttaggcttaggagcgttgttggtttgtttcttctcaagtccgaggaaatcgagttctatggtagctttcgacatcttctttgatcttattagaaagtgagagagagatcaagacagagagatatgggttttgagatgaataaatggaggaataataacggattctgatttctcatgtgagagtttttaaaatgtagtatgtctctgatacttatttaacgcacgaggttcatgctttctctttcttttcggcacaattgggaacctatccactttttcttttttgttttgtttttattaggctcccaacctcttctcttacttatctaattaatttaatgatttaaaacacatgtttaaattcttaatatacctaatgtaatgtaattgcttgctacgcagaaagaagatattttatatccggaaataacggaagtccaatgaacattgtaatgttttataaaaaaatatcttcaaaaatttggtaacatgtttctgttactgttcgtcacattgggttcttctgacattatatttgttttctactctagtctctgatctgtatatttttctcgaaacatgtttttcttttccattttttcttaatatgaattttaatcttgctactactagctctactagtatagcaaatcacatttagtagatatcagtcttattgatttttcaatataaacaaaatttgacattactattcaagaataatatttagttgacctaataatacaactgaaatttcttacatttctaaactaaagtacaccaataaactttcatcatattcgggaaagtaaccaataaaacatacaaatagggccttttgaaagaagaagaaaaaataagattttcaaatccattcaaaaaagatttaaagaaaacaccactgcagatgcataaagaccaggtcaagttggaacttggaagtttgttttctgccaaaccagaaaagacgggtcgatcctttggacgatgtcgatggtttttcttttcttttcttagtttcacattttggctggtgtttttttttcacatgtggccgctctttttcttgttctcttgtttaaagcatatatggctgctcgtttcctaacagatttacatattattacattgttctcaagtaaagttatagagggattcaatgaactcacgtttttctttcttgtgaaaatataccttgaaccacttccgaattaaattgacctcaattttctatcttgtgatcaaatttaaacttcaccttattctatcgcgcgcatgttagcttaattagttacatttctcctttttactattttaaattaaaaatcatataactacaaaatgtagtgattacgaaaactaaatttttttattaatattctgaactaatcaaatattaaaaaagaattacgtataaaaaacttttttagtagtatatatttgatgccgaaagtgaaagttttttctttttttttttcttggcaaccgaaagtgaaagagttagatgcatgtctttcacg

SEQ ID NO: 61779 - DNA, 754 bp, Arabidopsis thaliana landsberg
tttgtttaatacgctaaggacagcttatgtctaacgtataaagttatttccgacattactcgaagaagattagctgttttttatgaaaaagggtttgtcttctataagttatgatttatgtgtagtcttagtcttcgtaatagtgtgagcatgttgaaaaataaatgctaattaatataattaatgtgtttcggttagagaaagtgaagtggtttaagttcacattgtggcatgagggaaatgtatctttacactaagaattctctgtaatgaaaccaaacacgcatgcatctttatggagattggatgtttgattcaaatcaaaccatgttgtcgaacatgttaggatcatgcatgccccctcttatttttctctttttattctcatcagattcgtatatatagtgtataaccaattattgataagtttgataaaatatttatatcatatttttgtggagaagtgttttatatcatatgctctcaaaaccgttttagtggaacaatgggggtttttttctttaaattatgggggaatgcaaaatttaaagtggttctttctttaaattatcaaaccaagatatcttaatttttcttataaggacttttgttttattttctggaattgcattgttctatttttgcaaattatatttatagcattgaggatatgattggtattctaaattgctactggcatggatacccatatgtaaaggcctatatactcttattcattacgtggaagtaccct

SEQ ID NO: 61780 - DNA, 581 bp, Arabidopsis thaliana landsberg
  unsure (1)..(581): unsure at all n locations
ttatattttgaccttacaaagtcataatctttgaattcttttggtcaaatgagttgaacaatattttcacacccataaaaaataagttaatgtaatggattcttaacaaaaaattgactatagttggccaaaaggaattcttttgttgaagaccaaaaggaatttagctaccaaaaaatatatatattttttaattaaaccaaaaatctctaaaaggtataacataatcaacagagtatccacaaagcaaatcacagaataaagatgtaacacaaattattaatctatgttgctcatttaaattgcttgagacatgttttttcaagaactcattatttctgaaacactacaaaaagatttttcatttttctgagacagtatatgttctgtctagtatctttaatgtctgaatctgaatcataaactgagataaaaaaaatggaagaagaaaacgaagaaacaaattattatctgaaaactatttacattgtatctcaaaagtatgaaaatcactccctacaaaatgtatcatagngnctctgatattgntcctctttcttctagacatcatcaagccaaga

SEQ ID NO: 61781 - DNA, 419 bp, Arabidopsis thaliana landsberg
  unsure (1)..(419): unsure at all n locations
ttcagcagtggttgaacnnnnnnnnnnnnnnnnnnnnnnnnnnnnnnnnnnnnnngaatgccgggatcaaaacccggtgccttggaccacttggcgacgcccctgcaggcggaacgcgtccagcgcggcatgcaacgcataccgtgccgcgcccccggcgatccagccgcccaggcccggtggcaaggactgcagggccgcctgcgccgaggcgcgatcctcgaattccacgaaacagccgctgcccgacccggtcaaccgtggctcgccgacccgcgccagcgcggtgaacgcggcctcgacggtcggttcgcggcggcgcagcaccggctcgaacgcgttgccgagcggtgcacctgaaacgaagtcggctattgtcgcgggcgcggcattccgcgtcaattcaagggcttggaaca

SEQ ID NO: 61782 - DNA, 1537 bp, Arabidopsis thaliana landsberg
tgccaaaaaactagattggatagggccagcgctgcttaagctatttggttatgcgccaagctgatttgttagtagtatatgaatctaactcttacctgtgtttttttaaaatctgacaacgtcagagctttggcctcaaatacaaggaccacacagtaccgaccatgggtcaggacctacagacatgatgagttatcaaaaatgatccgtttaagtttagtttcaccagtcaatatccatgtcatatgcaagtaaaaattgagttatatattttgatgattcatgtaaataatatgatgtaaagtcatgcgcgtgaagaaatgtacctcttcccttatcagctgtaagataggtgcactacgtctcgggattcctcctcccttatgaccaaaacagtcgaaagaaagagaggttaaagcggaagtacaagaagcgtgtgttgtgcttcattttgttttcgtgcttcattttgttttcgtgcttcattttgtttcaacaaaatagcttaccagcccatattgaaagattcgttttagtgcttcttccaaatgttgttcatctccataacggtatctcgtgacatcatttctaacctaataaaagaaagaagaaggcacattaacaattcacgagaagtaaatttaaaatcctatgtgcactgacaaaactacgatgtgatgtcatatagggaaactaaactgagcaagactttctgcaaaagaacctatgatactgaaatcaagctagtgtttagattgaatttcgaaatactaatgacgaaaactactaacaccccttcctcttatcagaaacataaatatgttttaggaaattaatgtaacaaagacgagctgaagaacaactaaaatcagattgaaggtactccggtcagtcgagagtaaccagaaccactacgtacctgcgttaaaataggagtagcacagctttctctaagcttcaccgcatccgaatagctcaagcaaggaactggtttgagttctgcgtactgcaaaggaagcaaaacccatcctcagggactaaaaaaattaaccattccgaaaactcaaagaaagaaatgagtaactctaatacaaaagtcaattttctcagtaattttacagttatccgaaacattccactttctcaaggacatgatagtgagaaagataactaaagagcataaagagcataccttaagagccattccgataatagaaaggggaaatccatatgttagcattatagcagaccactcagttccaggaaggatagtaaaataggccccaaaaccatacctgttaaacagatccataatgctaaacctcacatatacccatagcaacaaagaaggcaagagaaaactcacgagagtagcgaaaccccgagacctagcccaataacaccaaatgaaatctgcaatgcaaaacatatggaaaaaatttcagtgtccaaaattattccaacgcacattcaataccacctataaactatgagttgcatacatcaaatcctttctaattctcaatttcagaccact

SEQ ID NO: 61783 - DNA, 1210 bp, Arabidopsis thaliana landsberg
tttagataatacgaataatttgtaacctgaaaaagattaccatcaatcggatctccttccttcacacctagttaataagagatgtggttagtgatagtcaaaagaagtcacaaatgaataagctcaatctcagaaaaaatataagaagttatagaatcttagtttttttcgaaccaggattcagctaaagcttaccggttacatgaacaagctgacaaggattcttgatcctcacaaaagtccccaccactttgctctcaaaagtttcaggagtctttgctagttcctggactaaactctttctcaaatacagaagcttaacattatcacgcactattgcagcaaaagtccctctaggctttgacacaacctgtttcgtctgtttagccaccttatctgatagagacaatctctgttgtttatcatcctctgaagcgtagagatcatcatagaataagtcttcctcctgatttctacataatgcttctctaccaaatcagggactttgattacatttatcttcccagcaccgaaaagcaaacgcaacttctcatcacaagctactgtctttctcctcttcttgctcttcaaaggagtttcacggctcttctcgcggatatagttcattataatcgctgtaacatcattctctgatatcttgttggtggtatctctaccaagtgattcaagaaactcaatgagatttctcgaaccccatccaacaaattccaagcttttaggttttctcaacctctttttactcgaacctttcactttctcattatcatcctccattttaagtgaaaccctgtgatagatatttcaaccaaaacaaacaagtaaaggtcaaagctttcgatcgccatttatagataactacaagtttctaaaacaaagacagaaggagagaaaacacattacattgatgaaatgcaaaaccttgacgggtatatgaaacggcacgaactaaagacggaaacttttttcttttttttgggtatgaaaaagacggaaactttgtgaagtaaaagtgagaatcgtcgaaataggtgacgagagagagagaagatataccctggagagcgactgcttgagacgaaggacacacactgttttattcgatttattgttctttaatccgatttgttgtgtactgtactgtgtaccgttgcgttggtctctgcgtgcatttattgtcgggtcacccagc

SEQ ID NO: 61784 - DNA, 1113 bp, Arabidopsis thaliana landsberg
ttacagtccgataattggaaaacctatttttcttttcaaacaactaaaacatcatcagttcaatttagggccaaatgaatctttctaaaggcaccacttagaacttgctcttccacaattaatactgattaatgcataagattacatatgtcatcaatcctatcggggaagcatatgagaatttttgataatacaaaggttattttaatatatcacccaaaaaagtgaaacacaaaaatttgtacttggcgacaatcttattagtatattgcactttgttggccgttatgattatcaattagcaatatcgcgtattggtccaacaaaaacttcttttattgagaaaaaaaaacagcctcagtcctcaaggcttgaggagactgatcccaagcttctctagagcgaccttaatggcgtcacgaccacattctttagcctcggtgatgttgggactgttcagtggagtcacatcctccattgggtagcttctgttgccgggttgctcacgcaagtcactggctaagcctttaagtatcactgttttgtgaattcctccaagcaagccttcgtaatccgtgtcacctgaatctcccacgaacaccaccatgttcgataagtcaatgccccatcgcactagcaaatacctgaaaacagaggaatacaaatgcactacgatcagtgagagctcaaatccaagaaagtgaaaacttgatgatgcgtagatataatggtttatgatggaaaatttacctaagggcctgagatcgtgatgcaagaacagggattacattaagcctagctccattttggcagtaaactgcattgcaacgtaatgcttgatttctcatcaatttcctcagctctttcattggaggcaactgcagagattgaataaaataaaattgatatcagaaggtacaaacagaaaatcaatgttttaggacgaacaaaaactatataagacttgaggagggtgaatttaccaaagcgggatctttcactttgaaggataggcaatagttggtagaagaagactcgtcttcaactaaaatctctccttttttcgtctttttcttctcttcaacagaactaatccaacggatcaaagtcttc

SEQ ID NO: 61785 - DNA, 1344 bp, Arabidopsis thaliana landsberg
tttgaagctgtttgatttgttgtttgagatcacatatcatctgtgtttcctgtgttaaccataaactgttacttcattaacacgtaaccctattgacctaagaaaaaacatagcaaaacagagacaatctcatagagtaggtattctcatgagccttagggttaaaagaaattggctaaaaccatcacttacagtttctggttcaaggattaacttctttgtttcattttcttctacgttcccttggtacctttctgaacactcaaccaaagtctcctcgttaccttcttcttcttctacaagattgcttcctatttctgacctcttttgcacgcatgagatcatgattttatcaatcttttcccgaaaatcaccttcgaggaagctagaaacggtcctcctacacaagcaatcacgtccttaaaatatcgaaatgttataaagctaatcttaaaaaaataagaattgatcagataacataccacttgatcaagttccacatatcgcctttctcggaaatattgttcataacctcgagcacccgttgtttcttgagatcttcccaataacttcttggccgcgagatatcactaatccaatcataatacataatctctctattgcaatcttcattttcttcattttctgtttcattttcatcccaagcatttagaaatattggtgattcaagaattagaaacaatgtttccgctgcttgttgcttctcggcttttgatgtttcttcatcgttttgtgaagatttttcctctttaccactctctctaaatacttgtcttgcagtttcttcatccttttctctatccaaacaaaccactgatgtcacttcttgagggttgcttctatattcctcaatctccatggatttaccttcttctttctttcgcctttcttcgtttctcccttcagtcttcacatcaatgactcttcttgcatcttttccctcgtctttagctttccccatagttcttctcctattagctctctccttagaatcccaaagatacaccttctctacaaaactcgatgagaacttgttcgtttcttctccttccttcacagtaactttcctcaatccttctccttcttctgtagctttccgctcaatttcaggtttctttgaaccgttctcattgcttgcagcatcattaaagacgggtttattggcaatttccggcttatcagccccggcctgaatctccctttgttacttttcttcattgtttcttgcaaaacactcttcaccctaaaatttactactccagacaaattttttgtttctactgcgctattcaaattgcaccgaaatccctttttagtattagc

SEQ ID NO: 61786 - DNA, 342 bp, Arabidopsis thaliana landsberg
  unsure (1)..(342): unsure at all n locations
aaaaaaaaaaaaaacaaaaacaccacagagcaaaaacattaaattggggccgaggaaaggacaaacaggacgggggagcgaggagaaaagacaaccgggcccgaaaacaagacgaccaggaggggaaaccgacgagaaaaaccaaccgggaccgaggaaccgacgaccagaacaaggaagcgccgaccggacacgaggacacgacgaccaggggcagaaaaaaccgaccaggcccgagaccncaaacaccgggaccgaagaaaacgccaccaggacgacgaacggacgacgaaaaacaacagggaacgaggaaagaccgaccaggggaagaaaacgacacca

SEQ ID NO: 61787 - DNA, 479 bp, Arabidopsis thaliana landsberg
gggcggtggccgtacccctgctctatctcctctacctctattttgttgtggtctacgaggacgatccggaggtgggggggggtctgactcatgctcggcggggccattctcggcggcctctgggcccacttcttcggaagcatcgtcaccagccaggtccttctcaccgcgaccaccggcctccacgccggcggcctgatcgtgggcggtgcgctggtgccgctcctcagccaggcgctgatgctgatcccggcgctggtgctgctcgtggtccggctgcacagcttcgacgaggcgctcgacggcttcaccttcggcgccgcctcggcgctcggcttcaccctggccgcgaccctggtcgacctcttcccgcagctccaggccgggctgcacacgagcacggtcccgctcgacaacatgatcgacgtggccatcccagggctgctggggcccatcatctgcgccagcgcgaccgggct

SEQ ID NO: 61788 - DNA, 467 bp, Arabidopsis thaliana landsberg
gcgttgggtccagatggcggatgtcgcgcagcaggtcttttttttcgacgtgcatgacgtgcagataggccagatcccgttcggccagtccggccaccaggtgacgatacagttcgggcaactccgggccttcgtcgacgccacccagaccattccccggcgacaggcggatgccggtgcgctccggcccgatgcgttcggtcacggtcgcggccactttcagtgcgaagcgcgcgcgcttgtcgatggtgccgccgtaagcgtcggtgcgcgtgttggaattggcgcccagaaactggtggatcaggtagccgttggcgccatggattttcacgccgtcggcgccggcttcgatggcgcgttcggcggcgtggacgaaatactgcgtggtggcctggatttcgtcaatcgacaaggtgcgcggtacccgcgtgtcctgcaatgccgtggcggtgaagatcttttcg

SEQ ID NO: 61789 - DNA, 503 bp, Arabidopsis thaliana landsberg
aaaaaaaaaaaaaaaaaaaaaaaaaaaaaaaaaaaaaaaaaagaggaaaaaaatgaaggtaggcagtgaaaagtctttcttcacaggggttttattgtccactttcgaaatctcatcagccaaaaccgaaacaaacaaaaactataagtcccacactcaagtcaattaaagcactccaatggtccaacaagtttcgtcgtcaaccttgaaactcaacctttggatgattgatatacaaaaatacaggatctaaaaacacctaccgaacttgaatagtaggtgtgttgtgtttgagtgtccccctaggtaaacatggtagcagaagaagcaagaaaagaagccatggctaaatcagtatctggggggaagattacttattttgtgggggcacaaggggtcatggcccgccatggggtcgctcatcttcggttaggaaattggggtttcaggtcccaaaaatattctggctaattaggatatacatttacctactttttttgggg

SEQ ID NO: 61790 - DNA, 1632 bp, Arabidopsis thaliana landsberg
ttgggagggaaaagtaaagaatctagtcatgtgcatgacttggttgagctgaaacagttgatagtatcagagaccaaaattgtccaagaaatatctgtaaaactacggtttcagagccataatactgcactatattttggtgtcgtaaacggcttagaactgaaatttcctgcgagagtcaatcattgaaagagaagcagaaaggttagaaaattcaaaaacaaaagcaccaaagagcagcttccgttgttctgaacagatgatgatgtgtaacttacttgccccaattgttgtgcactctcccttgacttaggatcatctgagcatagagtaacctctttcatggcacacatctccccactttcactgaggaagaaaacataaccgatcaaaccaggggtgacatagaaatataacatttgagttctcctattcaatattttgtgaagagaacaaatcagtttattgtaatttgtaaccatgaaaactgagatttgcccctgagaaacttaaccaacatatggaacaataatttctaccagtatgggatggattcagcagtgatattcttcccataggccatagccagtataaaatgcgatacaatgagcaatcagaacatctttgaaactaaaaccagacttgtttagttacgaacctgttaaagccaagatacacatgtccaaaacttcccatccccagcaatctcccttttttccatcgcgatccagggctaaccgtagcctctgcccttgccggacttcgggggacagacggagatgtcgctgctgaatatgtgggtgaaaacggacaagtattagagattaataacggcgggagaggcagacgatggctttgctgtctgttatcatcaagtcttctagtaggagacccagtagttgaccctccagctcgaggatgaagaggtgtaacagcaccactctgtattctagagctaggaccagggcttgtcattcttggactaggcacaggggaacattcagggctacacctgctttgaggccaaaacagctgagtagccatatctccaccaatggaattgttacctgagttgtaacctgaaccggggcttgagcactgtccagatccaagcaaggaaacatctgaatatggtttactaatcaacaacccatggtttgagacttgatctggaataaaggatctcattggactcctggaaggactagacaacaaactatctggagcactgcatagcactaaatctcgttgggggatttgtagattcttcacatgagttcccagaggtctccgcctaggagatgcagacagaatcctatttttattagggactggcttaaacatctcagctgagtttttgttactatgcattgactgatccctatacataaagagtaggatataacatgtttagaaatagagagcaatagagagagagagcacaatacacaatagtaacaatcacaattcaaactcacctcgaagatatgtttactggtgttcggttcccattttcacaatcagacgccaatggactgagaagagaatcagatggaatgtcacccacagaacttccactagacacagatgcagtggcaaaatcaggctcagcacccgtattatcaggtatgc

SEQ ID NO: 61791 - DNA, 624 bp, Arabidopsis thaliana landsberg
ccctaaacatgagttcgaccctgccttattacacttttgagtaatttttattcttttatttatatctatgtacccccctaaaaataaatcctcggtccgccactgaacatgatgaatgataagtgttaacaaatgaatattataatataactatgttagtaaaaggattctagagatcataatagatacatatatttacggtttctgagttgatgttagtgaatcagataaagtgattgttccattggagatgagagtttgtataaatttcttaactgaaaatggcaatgcgtgaacgtgttgtatcattatgactcacacattgttattttgttcataatgagtctgttcaagtaaagtggatgtctacgtggaagaaaataacaaattgtgcaaagatgattcatttcatctgcttaatttaacaagtaaatgtgaaaaaaggatttgacgaaaacaaaaattgcaggaacaattacttctttttttttttggtcaagagaacaattacttttttttaaaattaatttatttactaactaaaattgagcttgaaagacagcttcgcggacgattttaccctttatcggcttttttaataaaagttgggtttcaggcggtgag

SEQ ID NO: 61792 - DNA, 1035 bp, Arabidopsis thaliana landsberg
aaaaaaatcaacaagcatttatgaagtgtttggtgaagcgaaagcgacataaggataaaatggctcgagtgctttgggattgatcctaaatcatcctagttttagtttttggatataaattctagatcgaattcaaaaaaagagaaaatgagatggaagtagcaatgtgaacccaaatggaaatggtctacataacgttggtagggtcactcacatgtgcaacaccctgtcatatctcagacccctcaactgcaatattttttgttaggtttagatttattgtatgcaattttttcctacaacattccagtaatgccatgccatatacaaaacgtttatatggtcggtcttatgtaggcagggtcggcccgaactttttttttctgtatgtaggggttggatacggaatagatatcttataaaaaccaatatttgtgatccgttttgtaattaaggaatgactaataattaggtaattgttactaatcttaagctggttctagatgaatgattgtgtagattgtatgatagtcgaaaaggttacacaagttattgagtttgcaaattcataaaaggcaaaagaatcaaataagaagggatgtaaaaaatgtttcacgagtggttacaaatgtgagtgtgaattagagctgacgatttgggtccctacctacccaataaaaacaagattttgaaaaagaaaaacttcttgaaattctcgtccttgtgccaattttccatgatttgtaatttataacttcgagttggttcagacctatcccagacccaaactatgtgtgaactggtttaaggatattgttggcaaagtgggctatgattgggccggctgaatggatcatcaatggtttgtagaaggaatgtgaaactagttaaatggaaaaattgacgtgagaagctatgttaggaaagaaggtatgcaattgcgtgcaaacttttctaagtgtttgaactattgctatcatgccatatttgccttaacatcgtctaagcttcaaagccgtttcatctttctgtatt

SEQ ID NO: 61793 - DNA, 577 bp, Arabidopsis thaliana landsberg
ttcgtaatttgcgcgtatggaacggctttccgagccctcagcgttgattcttaggtaaatcgatctgtggtggatcctccgtgataatagcctttgcattggcgccaatacgggtaagaaacatttttaactgcagatcattggcattttgggattcatccagaataataaaggcattatccagggttctggccctcatataagccaaaggtgcaatttcaatggttcggttactcatataataacccagcttatcggccggaatcatgttatccagggcatcataaaggggctcttaggtatggatcgatcttttcttttaaatcccccggtaaaaatcctaggctttcccccgctttcactgcgggacgggtcagtatgatttttttgacaattttgttttttaaggcacgaacagcaatagctacagctgtataggtcttacccgtaccagcgggtccgatggcaaaaacaatatcattgttatctgcagcctggaccatcattttctgattggctgttcgggccccgatcgtttttcattggggccgaatccagtcatcgttggatgtttttc

SEQ ID NO: 61794 - DNA, 199 bp, Arabidopsis thaliana landsberg
  unsure (1)..(199): unsure at all n locations
actacgccgagaaaacaacaacattattacccccccaaaaacgagccccacacacacgccgggacgaagggagagggaccaaccaaaacggccggaacaanaaacaaccaccccgcacgcaagacggaaacccgaacaaccaangaagaccgccgaagagaccaaaccccggaaacaaaggggcgcngagaacaaaaaa

SEQ ID NO: 61795 - DNA, 867 bp, Arabidopsis thaliana landsberg
atcttagaccatccactgcagcagagaaaaagaccttcaacaaatttgtatgacaaatctccattgattttacaatgcttctctaatggcaaagaggattaatgtagctagcttccaaccttagagcctgtgaaatcttctttgcttaattcatctgcctgaaagatgaaatagtttttatcatcctttctcactgacaaacctattcaatataactatatatcccattttaattagtaacacaaacctgaatcttcacatgcactcgagagacatggtcgctttgttcgattaccttagtcatcaaccaagcaaacactctaaatgtatcaacaccaatctaaactaactcttcccaataaggaagaagcaaaatttaacagtttgacaaaacagacctgagcagtggaacctttcttcttcctgagccttgagatactcacaccactaaaacccatattgctaacaaacaattggccttgttcatcgtctccataagcaccaataatcccagtggctacaccgaacccaacactcaagcctcgaactgtattggtcacacttcctccagccatcttctttaatggagccacactgatatgtgcatcaagctcttttagcatgtgctctaactcatccttttgcacctagaatcacaaaagatccgtcaagtacaataacaattcaaatccagattccgataccaaaggaagattcaaacttttacttaaacccacatcaaaaaacgagataattcactgaaaacactcaaataacgctaaaaacagagaagaatggcttacggcaatggagccaccgcgatcaccgggaatttgatcgagtaaagaccaatcaacaagagcgacg

SEQ ID NO: 61796 - DNA, 534 bp, Arabidopsis thaliana landsberg
  unsure (1)..(534): unsure at all n locations
atccaagtattttctcaattaaaaatgcaacattgttgcatttttatcaatttggtttttatttgcaacgttattgcacaaacaccattattccatccgccatttctttggaaaggtgggtgataaccaattcaggtcaatgcatttctcttttattaaaattattgcccgccaggaatggcattccgtttttcggagcaggacaccccttgcgctctttgcggtgttgctggtggtttcgttgctggccgttttcacgggctggcagtacgttcacaatttcaacgggcagcagcatgcggcgcaccaggaagtacatgatcaatggatgaaccagcccaaccggcacccacaccgggtggcgcactannnnnnnnnnnnnnnnnnnnnnnaatcgccgcttagctttttcgatttcgggctcgacagctatgtccgcaattccgttttcctcgaaagcccaccgcagaataccgtcaatatgagtgaggcccgattctcgaatggatgttgcgcttcggcgagctgaatatg

SEQ ID NO: 61797 - DNA, 227 bp, Arabidopsis thaliana landsberg
tatataagtatgcgaataatatctcattgactggaccgggtgcttatttaattcttgatggagaacgcaacatgtaagcaagactcacaacatccctacctttagggtgaatatacaggctcatcaatgacaacaatttcttgatctgaccgcatagatgaatcacacaacattggcattcactcatctactttaaggaggaccctgtttgatgtgtaaacgatcct

SEQ ID NO: 61798 - DNA, 118 bp, Arabidopsis thaliana landsberg
  unsure (1)..(118): unsure at all n locations
ccgaccaacgaaaaaagggggacggtgagcttgagaancaacaggcacagacaacccagcaaagaagaanacacaaaccnnnnncagaaccaagccaaaacnaagagacacggacaga

SEQ ID NO: 61799 - DNA, 321 bp, Arabidopsis thaliana landsberg
gaaatggaaagtcatgaggagaagttgcataaactggttatgcagagcaagatcaatgacactaatgacgtgatgaagcgtaaggctaatgagattgacaaaagcaaggtacatgacaggagcgcaccctgctgttttattctatttttctgtaactcctattaatatttcttatgtaattcctagattgaaaagaataagccaggaggattttcgtccatgggttcaatgggatctggaagacttgaaagtggtttcaatgaattgagcatatccagtggtggcggcggtggttatggaagtggttctgggtttggcatg

SEQ ID NO: 61800 - DNA, 397 bp, Arabidopsis thaliana landsberg
  unsure (1)..(397): unsure at all n locations
tttgcaaaactcattacttcaaaccccttattgctacgcccaacccggcatgagataccttttttttattttcaaagacagcctctcttctaaagaagcacgacaatggaagctcaccattgcctttctgtcgacnnnnnnnnnnnnnnnnnnnnnnnnnnnnnnnnnnnnnnnnnnnnnnnnnnnnnnnnnnnnnnnnnnnnnnnnnnnnnnnnnnnnnnnnnnnnnnnnnnnnnnnnnnnnnnnnnnnnnnnnnnnnnnnnnnnnnnnnnnnnnnnnnnnnnnnnnnnnnnnnnnnnnnnnnnnnnnnnnnnnnnnnnnnnnnnnnnnnnnnnnnnnnnnnnnnnnnnnnnnnnnnnnnnnnnnnnnnnnnnnnnnnnnnnnnnnnnnnnnnnnn

SEQ ID NO: 61801 - DNA, 486 bp, Arabidopsis thaliana landsberg
agcgtgacatttcagcagactgctacccaatctacatcattgttacgattaccggatgtttagccacaatttagggggctacttgaaataaaaaagaattagggacaaattttctcatttaattctttttttatgagagaataatggaatattcatgctctaataacaaactctttacaacatgacttatagttatagaatgtaattaaaaattattcaaatgattttttcatcggtggatgtagcttaaccgtctatattaatgaaaaaggggattaaagaacaaaattaaaaaggtttggtaccaatattaaagttgtggtataataaaggcgaattggacaatttaggaaaatacagcaaacgaaaggagggaatgcaaaaatgggaaaaatgtaaattgtgcttgcttgtttgtctccacttaaaaaccagagacatacacagaaaggaccagaagacgactgcttcctccaatggttaggt

SEQ ID NO: 61802 - DNA, 632 bp, Arabidopsis thaliana landsberg
attaatgtcgaactcttcctaaaccctctttgttcacatttccttctctttctcttcctccgtctctctctgaaaaaccctaattgactcgttgcgattgaaatggatccttgtccattcatccgtcttacaatcgggaacctagctttgaaagttccgttagcggcgaagacaacgagctccgtcgtgcatccgtcgtcttctccttgtttttgtaaaatcaaactcaaaaacttcccgccgcaaaccgccgcaatcccgtacattcctttggagacgactcagtttccggagatccaaaccctagccgccacgtttcatctcagcagctccgatattcaacgcttagcttccagatctatatttacttctaagccttgtcttaaaattttgatctacactggaagagccggcgctgcttgcggcgtacactccggtcgtcttctggcgaaagtctccgtaccgttggatctatctggtacgcaatcgaaaccgtgcgtcttccacaacggatggatatcagtcggaaaaggagctggaaaatcgtcgtcgtctgctcagtttcacctgaatgtgaaggcggactgactccatagattcgtttttcagtttgacggcgagcgtgaatgtag

SEQ ID NO: 61803 - DNA, 549 bp, Arabidopsis thaliana landsberg
  unsure (1)..(549): unsure at all n locations
cgagcacggcccaggccggcgcgatgccggtcgccgcgtcttgtcgtgagctcgccttgtcccacgcgagcgcgggcacgcccttgaagcccaccagcagtcccagcacgcgcgagccgctcgggcggtccttcagccagacccaggccaccagcgcgccgaacagcggcaccgtggcattgaggatcgcggacaggccggtcgtgatcgacagcagcgcgaacgcgaacagcatgaagggcagggcggagttgaggatgcccaccaggcacaccttccaccaatggcggcggaacacggcgccgtggcccttggccagcatgatcggcgccagcagcgcggtggcgatcgccacccgcacggcggcggtgccgacgacgccgaagtcgcccacggccagccgcatgaacaggaaggaggcaccccagatcgccgcgagggcgacgaagtcgacgatggaagcgaagggcatgggatgcctagtgtccggccgcgccggcgcagtttgtcgcgcnnnnnnnnnnnnnnnnnnnncgcgatcgatgcgcg

SEQ ID NO: 61804 - DNA, 463 bp, Arabidopsis thaliana landsberg
  unsure (1)..(463): unsure at all n locations
tataaatccgaatccggtttacatgaaccacccggncctcatattttgctgnnnnnnnnnnnnnnnnnnnnnactttcttaacaggctggttcttcttcgtggtctggttctttaaagctggtccaaaaaataataaaataattaaaagatgaaattcctttcttgccccttttgttcttctcctttctccgtctctctctctctctctcttcgacttcttcgtcttcgtttcttcatttcgaagctctctctgtgtgtgatggcgtgccctagaaactccataacatacaacgccacgcgctgcgcgtgcggtatcggtcagctactaaaccggagctccgggagctgcgagatcttcggttggccgtcaacaatctccacagacanagatgtaaactacagcgtaatatcattcgccggactttattcgctttcgataggatccgtaagttcacgcaatct

SEQ ID NO: 61805 - DNA, 582 bp, Arabidopsis thaliana landsberg
  unsure (1)..(582): unsure at all n locations
ggtatgagtatctccttcattggaatatggaccccatagtttccacctgataccggactgctgcctgttagggaagggcaggtactgaaagaataaccgatgctgctccatcagccggttttcaaattccgtgaagccttccacatcgccctggctgatagtagctatccatccttcccggcctcctccgcgccagcttctctcggcaaatgcgagcatggcaggatataccgggttcatccgtaaaaggtcttcttctttcgccacattcctgtcgtgccataaacagagtgtggcgccgatcatggaagaatcgccctgctccctgtcgccgatacgcctgttataaatggttacaacagattccaacgggtccatatgattcatatacaggtgccttgaatcaataaatctcgctttaccggcagatgccatgtgcgatctgtcatccatccatagctggcgaatggtttgctcagggaaattgccgcccggctgccagcctattacctgcttgcccatcttttctacatgagcagctactggccgaacanaatctttatggatgatttttacctcatc

SEQ ID NO: 61806 - DNA, 322 bp, Arabidopsis thaliana landsberg
tatagagtttttgcatgggattttttttataagtcgtgaattaatttttcgttgcgaattattttgatcctattattttaaatagcgaaaacgtccacaaaacgctaatttcagatctaggattctagattaattttttttatcgtctttttgttcaaacaagtttggtagtctcaaattctcaatttagttctcacatggaagttcgaatctaacgactcttggtaacatatgataggtccgtaatttcaaaaatttccgttgaagcaaaatatatatttttaattatgtagctctgtcccagtaatgttttcaaatatac

SEQ ID NO: 61807 - DNA, 319 bp, Arabidopsis thaliana landsberg
ttgtactttacaaaatgttccctaattaatagtatatatatatatagacagaaaatgagatttgattctcgtttgaaatactatgagatatccgtgatagacttttaagaaacttgttttgttttgatcgattcaattttcttttctttataatcaaactattatttaattttatttttattttttgtttgtgaacctcattagcattataaggactaatagctgttttcagttataacaacaacaatgaataggatctttggcagtagttttgtttgcacaaactccatgccaaaatcccttttgagtacaatccacg

SEQ ID NO: 61808 - DNA, 582 bp, Arabidopsis thaliana landsberg
ttcattctcatgaagacttcctcccttgttttgaagacgtcgaatgccatttgcaatcaccgccaaatcttgcacgccactattgaatcccagtccagcgtttggagtcactttatgtgccgcgtctccgacgagaacaatgcgattccaccaccattggtcaagaagcccttcttcaagatcagtaacacccgagctacttcggcctttatacacgtctcgaaagaagagatctttcgtgacgcgatggtctgcatagcgggcagcgaattcatcagcatctttctgcgtgtatgacctgtgctcagacgtgggtttatccagctcttcataaagaaaaaaccacattttctcctcaccgacaaacacctgggtagaacttccaaatctatggcactcgtaaacggtggcaggcttagtatcgccaaaacgtggagcgctcccgaacaagagtcgatatgttgttctgaacgcctcgttatttccaaaagctttgctttcggaagaagttttacgagcaagttcttttgtgcattctcgcaccgcgctctgcgacccatctgcaccgacgatgattgatcc

SEQ ID NO: 61809 - DNA, 677 bp, Arabidopsis thaliana landsberg
acaaaaaccaaacctgttaaatcaattctaaacctaaattgcatcttaatcaacgcaaagtttcaatctttttgaaaaacctgatagccattctccgataagcacttttgatctcttgatcagtcgaattgctggggatgccaaggacttcataagggttccttcgtcggagctcatcttcttctccggcgtctttattctccgatctcgatgaatgagtggccattgttcaataacaggtttttgtttcccagtttgagtggaaatggttctccagttaaattcccaaagtcgatacagtaaaatctggggattctagccagagaataagcaaatggggagaataatgattcatgcctcgtgaattgaggattgttgttacaccaaaaccccaagaggagagacaatgagagaagaagctccattgggaaaaccccacaaacactgatctggagaagacaagagagaagagacgagacacttcgttattttttgctaatttgttttttatttatctaatttctaacttatttaaaaaccctgaaaattcgaaaaggcccataaaaaaacagaaaagcccatcaagaatattaaatatgtcacgtgccacacaatgtgagaagatcttaacggatcccttataaaatataatcatgtggaaagtcctttaactttgc

SEQ ID NO: 61810 - DNA, 1635 bp, Arabidopsis thaliana landsberg
aaacttttttttggaatattttaggcaactatgaaagtgaaagaatgtatatggtagggtctcccatactttatttcattcttgttatgatactcatggttaaaattaacaattctaaggctttcaaagcatctagagacccatatcaaatataaaggaaggaatttcttatcttcatcaacagaaacatgttgttacatatagacaatgatgatgtctgattacaaaaataaaagaaagatataggcagtgatgatgtataatgtgattgtctgttcatctcagctttgaagcttacttcttgtcactctgtctctgcatcactttcatcaattgtccttcccagtcagatacaacctcttctccattcgtaacctgaccgaatcagaagcctcatcagtaacaaatgcttatatgtataggaagcagcatcaataaaatgttagaatcctacctcaaatatcaaccctgttggtgggatcacacttagtgcttcaacacatatacgagcagcatcttccttgcttatgcttcctttggctgcagcaccctgtttccattcataacaatattgtctaaagtttaaagccaagatacatgtttttccttatctattataagatgactttaccgcgctaaagttgaagccttgactccctccaggactgttctccagcttgcctgttcttatgattgtataagggacatttgaagatatagcggcgttttcatcttgctcggccagttttttggctttgctattcatcatagcttgaattccgccgctgctttcataaacagacaactgcagcttcattaaaccatgacctcacagacacaaaacaaaacaaaacaattccaacttccaagccttgcaagattgttgctaatgcatcaccattaactgtctaattctcataatatggaactgagcatgacaagggcaaagtcatggagattgtattcttacctgagacaagagaactgcgtgttttacacctctaaaactcttgacaatcgataagaaaccttcctgccaaggaaagaatgaaatgctccatgttttagatcaatgtacaacttgatacgaatggtgaacggtttggttaaacatactgtcggggatatgaccgcaccaacacccttaaaagctttctttaagaaacgctcgtcgcttgcatctccagtcgtcaacttcacaattataattccactcaatgtttgccaacgtaaagagaagcaacggatagaaccaagagtatatattcaatgaaccaacctcaacataagatccaaaagcttccaaagcctttcttttgtccttcacaagtgctttaacccgtgttcctttcacaatcagttgcagtataatcatctacatcagctaagaattaacagttctcagtttcacttttaaactttcatcttgttgcatccaatgtatgatgcttctgtgaaaagcaatcacacctgacccaattcactgtctccatcagttactaaaacatcgactttctctccatcatgatcatctcctttttcctgttcttgattgatatcaaatgagttaccattatgcatataataggtatgcgcaagatccgtgattccatgtaaccactataagtctcttgc

SEQ ID NO: 61811 - DNA, 787 bp, Arabidopsis thaliana landsberg
tcaataagtcgctttcagcactcggtgatgttatctctgcccttgcatccaaaacaagccacattccttacaggtttttcccttctttcttcccctttgttaagacattttgcatatgagattttctgattgatgttgatgacacttttttccttcctttttgtcaaactccagaaactcaaagctgacccatatgctgcaaaactctttgggtaaagtaacatttgtcctattttcttccgttgttatggccacatgattcataagacatcttatttttcatctccatggtgtttctatttcattgtgacttatacaggtggagattgcaagacattaatgtttgtccagattagtccgagttctgccgatctaggagagaccctttgctccttgaactttgcaagtagagtccgaggaatcgaaagtggacctgcccgaaaacaggctgatgtctctgaactccttaagtcaaaacaaatggtaacttgattcctcgaactccagttcatctaagctttaacatatcttaaggttatttcattttttgttgtatcctttgtaacaggccgagaagctgaaacacgaggaaaaggaaacaaagaagctgcaggacaatgtgcagtcactacagctacgcctcactgctagagaacacatatgccgaggacttcaagataaggttagtccgctttaactactggattcaatatgttgtcttcttctaacagttaaaaatcaaatcatgtttcaggttcgagatctggaatttcaactagcagaagaa

SEQ ID NO: 61812 - DNA, 434 bp, Arabidopsis thaliana landsberg
  unsure (1)..(434): unsure at all n locations
gaaaggcgtgccggtcttcttctcgccctacttctcccttctcgtcccgtcggtggaggagcaggccggcttcctgacgccgcgcttccagcagaccgagcgccggggcctgtcgtgggagcagccctatctgttcgtgctgtcgccctattcggatctggtggtcagcccgcagatcaacacccgggtcaatccgttcatcaacctggagcatcgccggcgcttctggtcgggcgaggtcagcggccgctacggctatacctacgaacaggacttcaacagcgacggccagaccttcgggcccgagcgcagcaagggctacgtcctggcggaaggcttcttccagccgacccaggaatgggcctggggcttcaccgtccaggccgcccgcgaccgccgggtannnnnnnnnnnnnnnnnnnncgacctctaca

SEQ ID NO: 61813 - DNA, 404 bp, Arabidopsis thaliana landsberg
  unsure (1)..(404): unsure at all n locations
cccacaacaaacgctctaccaagcagagcttcactcctaacaaaaggacaacagagccaccggagggaattcctgaggagaagggcacatccccccccccctnaaaagggaaagcaaagccgaccccccccgggcccacaccagaaaacaaagacagaaccaaaaagagcacgcgccgaggcataccctacaaaggacacaaaaacaggcccgcacgcacccaaacggaaacgagaagaacggcctagccgacaacaacaaaagcccaatcaggaaagcggggggacggaagtaacatacacaaacacaagaactccctaagaacagggacacgcgcaaccacacacactaccacatacaacggaacacaacaaagaagaaagaaggaggacccccaacgcgag

SEQ ID NO: 61814 - DNA, 1016 bp, Arabidopsis thaliana landsberg
atgaatgatagtccgatctaaacaaagacaatgtaccaaactacgtgtacgtttctgacattttagattagatgatttgacaattgacacctttaaaatgtgaccatatgattaccatatatgtaataaacagtaccagtacagacaccttttttaaacttaaaagtatacacatggacgtcaaaaacaaacagcagaaacagaattaacgtgcacatagttgtgacaacgtaatacacatttaaactcatatccatgcaaagacaattaagtctgagcaaagtaggaaactacaaatcatagacaccaagaaaaggcacgagaacagaaccaatccaaagcttgccgtctttctcttccacttcacttataaacctcaatgtctttccttccttatcctcaagtacctccaaaaccttacctgattcactcagctttatggctgtagcatgaggtattcctccagtgaacagcgagtgcaggcgttggggactgatcggaagtctaagcaccaaatccctgaaccaagtttgagtaagtgatagtttcgcgaaaagacctttctttgagtgtaaagcgacccagaattctccattcgagtttcttctgatgttgtcagggaaacccggaagctcagcaaacacttggtgtgttcctgcgtttggaccagagagccaaagtcttagaatcttgcaagtagttgtttcgactaccaatacaaaagaccggtctttgcttagtgcaacgccgtttgcaaatgcaaggccttgtaataagactgtcgctttcttgcttgatctatcatacttgataaaccttccagtcttatcgacgttcaaaacagcagctaagaattgcctgaaacatgccaacactttggagttaaatcatcatcaccaagataaagccaagactcaaacatcaaagtaagaaagttcttagtttcatcaccatggatactgatccaacatagttttttaaaagaacgatgagagtttagggtgtttaaattcatg

SEQ ID NO: 61815 - DNA, 572 bp, Arabidopsis thaliana landsberg
cgaacgatcactcctctgccttttgatctcttttactttaaaattatcacttttacatggtcatttcaaaaacttctgtgtaaatggttgaacaatttttttcttttcaaataataaatatctggacagtcagtgaatatggaactttctttatcaagtatgatatatgaatatgagaatgatgcattgatgctttgtatggttggttattgataggaataccccaaatacgaagtggtattttgatagataagactaaagagatcctaaagaaagaaaagagattggaaaagaaaaaagaaaaagaaaagaggtattattagttgagtttaggaccaaaagtgcaacacaccaatacgaacctgtatacactactacgcgtacggctctttcttcactccttgtatgggtccctcgctgagcttctatagtggaagctccccaaacccaaccatgaaattggctcctcatcacattcacacctttaaaattccaatgtaatatattttctttttctggagacaaaacttgttttcaatctagtctattagtttgagttattatttggagtt

SEQ ID NO: 61816 - DNA, 1301 bp, Arabidopsis thaliana landsberg
aacaacgatgttgtgacgtaagatatatacactggggagaagcttttttcctttagaggcgatcatctcgaggctatatgttatttaacgtgggctcctaatggcatgtatatagctacatctggtcttgataaacaagtgcttctacgggatgttgataagaaacaagacatagataggcataaatttgaggagaggatatgttgtatgtcgtggaaaccgaatggtaatgcattgtcggttatcgatgccaagggaagatatggagtttgggaatctttggttccatcatctatgctatctcctacagttggtgttccagatatagtaccaaagaagaggaatgagattcttgattttgatgatgaagttgaggaagaaatttatcgtgcatctgaaagtttagatgatgctatgggagatagtgatgatggagaatctcatcatactagtaggaaaagattgaggaagaaaactttgattgatgaagatgttgatgatgcatatgaggaacttaatgatgggagtagcttaccttcggcatctgagtacaggaaaaagtcacatagaggacatagagagaagcagggtgcaagaagtggggcttttaaaggcatttcagcctcaaccaagtacaaaatgcaaagttcctttcaacctggtgcaacaccaccggaaccaggaaaacggacattcttgtgttacaatatgctgggatgtataactactattgaacatgaggggaactcacgtattgaggtacttgaggcttacatttgttatgcttctaacttgatgttttccttttattggtttttcagaaagaaagggccacacttgttcttttgtgtgattttgttttttcttttcttttgcaagcattctaaatgcagacagattttcatgatactggaagaggtccacgagtttcatcaatgatagacatttacggcttcactatggcatcaataaatgaaactgggtgtgtctttgcaaatccctgtaagggagaaaagaacatgagtgttctgatgtatcgaccatttagaagctgggccagtaatagtgaggtaagaggatcattacttacacagcattcatcagaaattccggtccaggataggaaaatgaatgacttggttcttttttgattgatacatccagtggacaatgaggtttgaaggtgaagaggtgaaagatgttgctaacggttctggttgggttgctgcagtagcaggcctagaagtgcttcgtgtatttagtgagggcggattacaggtttgttctttagcttaattctt

SEQ ID NO: 61817 - DNA, 325 bp, Arabidopsis thaliana landsberg
gatataatctgatcaaatcatcgccgacgatcaccgattcagcgatgcaacagggagattacaattcgtactatcaccaccaatactctcaatttcaaaatcctactccgaatcctaatcctaatcccaatccttctccgccggcgccggcaaccgtagctggtccgaccgatcttactcgaaacacgtacgcatcagcgccaccgttcaccggcggttacggttccgccgattacactaactattcacagaattacactccttacgggcaaaactctgagcatgtccctccttcagctccttccttcacttcaccatcacaacc

SEQ ID NO: 61818 - DNA, 701 bp, Arabidopsis thaliana landsberg
agctagctaccttcgctatgccgatactagtctgatccttaacaactccgatcgcttttcgcatgcttagcgccatgattccactactacttaaggattcgaattcttcaaaaaccacaaacaaaagaaaaagtagcaatttggttgagaaattaatggagaatccaacgagaaattgtgattgaatttttctttggagataaataccgattctctagatctgcggggggagagagaatgattaacaggtggtcggtagaagagaaaaatgaataactctccggcggaagataaggagacgggatcgggatctgagatcaatgaagaaggtgaagaagatctatcttttctcaaaagagaagatgactaaaggagcagattctccgaaccagtcaaaatgaagtgtctaaagacagagagacaccaatttaataagagagttatgagtccaagctgacgtggagtgattagagccgtcgatctgaagagacagatagagatgccaaggtttggtttgtgaccgggattaacgggagccgtgtgtccgagagagactcaagtctgaacaccgaacgtatcggtgaagatgtcttttctttttgttttggttggtaattaaataattttcaatttttgtagggatctttttacaagtgtttgattgttttattcataactttagtagatctaaagatgtgttt

SEQ ID NO: 61819 - DNA, 473 bp, Arabidopsis thaliana landsberg
aaaccgggaacgcacccgcgggcggagagtggtcgacacgccgaggggacaaaccaaaacccccgagaaagacaacagcgagagaaccacaaagcgcaacaaagagagtaaaaacaacgagagactaagcaaccaaacccgacgagaaacaggaagaggagacgccagcaacagccacgagaccaccacccaaaccaaacgctgcggacacggaaacagcaagcggcaaacaccggaaccgctaaaaaactgccgcggaaacgcaacagcaaaatgagcaccagcgccactacccaccgcaagcacccaacagccacacggatcgacagaggagccaacactccacaaaaaccaaaacgcccaactactacaaacgaaaccggaccgccgaacgcaaacaagcaaccgacaagcctcaacaccgcaaagtgctacaaacccaacgcccaacgacgagcacccgcccaaaaacc

SEQ ID NO: 61820 - DNA, 1375 bp, Arabidopsis thaliana landsberg
  unsure (1)..(1375): unsure at all n locations
atgttaggcttttgctttttgacatcgacttgcggagatatgttcaacctcacttactctgtgtgtagggagttccgattgacgtaaatcatggattcagtgttgattttgtttggaaaagtacaagctttgatcgaatgcagggagcaatgaagaattttgctgtagatgaaacaagtgtgagtgggtaagtcagtcatcggaaagcctagctccttcttggtacgtgtccatttgttactgcatgctaatcaaccactgaatcactatgtttctattctttgaagttatatctaccatcagttattgggacatgaagttgaggcccagatggttcgtaacacactacctcgacgttttggggtacctggtcttccagaactgaatgcatctcaggtaatcattggctttcagcttatccagttcatgaataatgttcgtcgtaaatgtcttcacggaattttcagagtcgttttgatcccgtgttccttgttaacacgatgaataatatatgttatctatataacggatttataacaggctctattgtatccttgagcaggttaatgcggtgaaaagtgtccttcagaagcccatcagcttgatccaaggtccacctggcacaggcaaaactgtgacttctgcagcaattgtgtatcacatggcaaaacagggccagggacaggtaaagctgattgttattgattccctcaagattgctttttgtgagttgactatcagatatttattattattacctgacaggttctcgtttgtgccccaagtaatgttgctgtggaccaactagctgaaaaaattagtgctactgggttaaaggtaaacttttaaacctcctagtttttctattaaaattttgcgtaagacatggatacttcaatttattgttcatttttggaagtttctaccatcaaaatttatttaaagagtatatgacttctcttcaaactttctcttactctaatgtcaggttgttcgcctttgcgcaaaatcaagggaagctgtaagttctcctgtagagtatttgacccttcactaccaggttagttgacatggtagcacgctttggttcatttaactctctggttcatttagtcccctatctttctttgtttgaagataattcatatgaatgnnnnnnnnnnnnnnnnnnatcttgacacatctgaaaagagcgaactgcataagttgcagcagttgaaagatgaacaaggtatcacatttcagtttgttatccattgttgacatttttgaattttcattttacatttctatgcctgtttcttgttgttgatctgctgaagtttcttattgtgcttgcaccctgtgacaantcaagtgaccatagcttttactc

SEQ ID NO: 61821 - DNA, 1915 bp, Arabidopsis thaliana landsberg
catgtatatgatgatacgatattgacattgatctaaatatcttcgaaattggttattaagtgtcgatttgtattctttttgcttgtgtattttgtacttttataaatatgtataaatgtagttacgcttgttaagcaacataaaatcttttatctgacccaaatggttgattaattacttttcttccacaccatcttgtgcttgtatgatctcacatactttatttttgatggtagacattttttgtcgctgcttagttggccattcaaattcagtacgagaaaatattggtaagctacgtttccattagcttagatctttcctatttttttacacaaaacttttgatccattcatcaatagagaacaacccaatatcattcatgcttgctcttctgttgtcttgtacataagtttattagtacttgagtcgttgcaagatatattgtcttgctttagttacatatgttgagacgtattttttgaaatatttggaatttgaccatttcagtgaaaatatgctgcaattgctcttctctcatatattaaaattttgaccaagaatggcgaagaagccgctcaagaacttgattattacaaatttgtaaaatgtgtaataaaatcatctattcagtgttatgatgtaatggaaattatagaatcaaattatttagtaataatatcgtcgttagtcgttaccattaagtaataagctacataattaattaaactatataagaaaaaaagattctatcttcacagttcgatgcgtactgtgaccattacatactacagttagctttcttctctagccgtcgaagtttcacgcgccgccgtgagaaaatgcagcacacaccggagcaaccgagagtcactctttacataatcctcaccaccgcgtttctctctctatgtttcctcctctctctctcttcctcttcccagtactcttcatcttcctacaccggacgacccgatgatctacgacccgacccgagactctttccttcttcctccaaaatcgccgccgatacagctcctccttcaatcgcttacctaatttccggatcttccggtgacacgcgacgaatccttcgacttctctacgctacttaccatcctcgaaatcgatatcttcttcatctcgatagcttagcgacacaatctgaacgagatcggctcgctgttgatgtacaagatgtaccgatttttagagctgcaaggaatgttgatgttattgggaagcctgatttcgcgtatcagagaggatcgtctccgatggcttctacgcttcatggtgcttcgattcttcttagattgtcaggaacttgggattggtttgttagtattagtgttgatgattatcctctcgttactcaagatggtttggattcttcttgcgaaattctctttgatttgtgatttttctgtgtttgtttttactgattctgagtttgattttgcgtagagcttcttcatattatgtcacatttgcctaaggacttgaattttgtgaaccacactagctacattggttggaaagagtaagattatgtttccctttagtttcacttagagagtctttgtgttgtaggctggatttgattccatagagctaagattcattgttttaggatcagtgtaacattttctcttggtttcttgtaggtccaggaagttgaagccagttattgttgatccagggctctatcttgtggagaaaaccgatatgtttttcgcttcgcagaaacgagagttgcctaaggctttcaagttattctcaggtatgcttagctacgttacattacgttttcattttcccttttctgttttctgcatttatctgtggatcattactaattgaccaccttgtttgctatttagcatattcagtgttgtgcaatcatttgattata

SEQ ID NO: 61822 - DNA, 490 bp, Arabidopsis thaliana landsberg
tgtttggtggtttaggaactaatgtcccatgtgccactttttatttgagattcatattcatcttgcattggggggttccaattaggatctttcaatgcttgaacatgagataatggaagaggggaaatgacatcagtatgtagagacaagatttgtttcggtttagagataccgcttttacttctagtttggatgttattaggaggagcagttgcggtggttgtggtattagaagaaagtgaagaggaaatgtttggagcaatgacggtggggagagaagaagttgttgcttcgggtggagcagcggaagaagatggtagagaggatgatgtcgttggtgaaacagaggagggaagagtagtgttaggtgttgtagtagaaatcggtgctggaagaggagattgagtgatggattggacattgctaggagcagcgttaatggtggataagaagaagtgagaggagtatccaaactagccgagtgggaatt

SEQ ID NO: 61823 - DNA, 220 bp, Arabidopsis thaliana landsberg
gaaaacccagggggacgccaagacaagtacgcgccggctagccaacccaccagctaccaagaatcgacccccccaaaagaagagaaccccgcccccaacgcccccccccaaaagcccagacgcgctgcaaccccaaaacacccgggacccccggcagcaacaaacaccgcaaagacccccaccccaccccctgcaaccaagaaacccgcacctccaagaa

SEQ ID NO: 61824 - DNA, 332 bp, Arabidopsis thaliana landsberg
caacaaaccaaaaggggacactctagacccgaaccgcgatgacaccaacgacaagaaagaacgatcgatcgggaaaccacaaacgggaagccggcaaaccacaaaggagaccaacgcccaagacgaaggcagactcaaaaggagaaacaacgcaccacacacgagcagagccctaccccaaacaaaaatgacacagaccaccgtgcgaagacacctgggcgagagcactgaggacacagacaagcacagaaacaaaaggaagaaacaaaccacaacagaagagagaagacaagggcgaagagaggcacggaccacaagcgaagaaagaaccc

SEQ ID NO: 61825 - DNA, 700 bp, Arabidopsis thaliana landsberg
  unsure (1)..(700): unsure at all n locations
gtgatattcttatgaagcatgtgatttattggacccacattgtggaacattgtattgaactcggccgtcaaaatcataaaagagttgactacaaaccaaatatttaaagaaattattttaattttccatggtttaacaaagtattgatcatctctatattcgtcaatttgtactaatatcaaaattaaattgtttacaatttttagtaaatcattcactgatgactagaaattcagtctcattattatttgtatttaggaccaaggagaaccaatatggaggttggaggattcttaggttgacagtgacaaatctgagggttagagcgcgttatttcgggttgctaggtcgggaactcggggttcaggtagtggttgtcttgtttcggtttattctggaagggaagttacaggttcaggcttagcggcggcttcttctgaaaggcggatctgattgctcctctttgagcctgtcgtcgtttgcgaagccgcaaagtagtctcccttgcaatcgccagagctagtagatgtgttttcttgttgcctccttccagaccgttcaaatctcagatttaggtttcgtcgccggtgttcttttcgttttgtatcccgttctccgccgttgtattctcgtttttcgtgtgcccccatttttggggattaaaaagccaaataaataatnnnttttttttttttttttt

SEQ ID NO: 61826 - DNA, 495 bp, Arabidopsis thaliana landsberg
  unsure (1)..(495): unsure at all n locations
cgcctgcatctacattattaacaggtgctttttactcagtctatatgccattcacctatctcattagttgcaacaatatactcgacaacatatcagatgtaaatacattcgattttaccttttggttgagaaaagaaaagtggccattaatgattgtgacatctcgagaagcaaattgctctctagtgtcaagatcaaacaaaagtgcaccccttctttgcatagagatagataacgcacgaaaaaaatatatctagcaaacttattctcttgtcgcttttgactgtgctaacgtaagacatccaaacacatgtatcacggtatactttagtgtttctccaaagaatatgaagttttctcctaatgtaagttatgtaatgtcactcacggtgtacgatttattaaataagtttcccttaagaatacattcgcccaatagttnnnnnnnnnnnnnnnnntttgaaacatcataacatgtgtcacattcaaaatatg

SEQ ID NO: 61827 - DNA, 400 bp, Arabidopsis thaliana landsberg
atctgatgcgttttttaggatatttggaaaatggtgtttaagttcttgttgcactcacacgcatggttgcgaaataaatcctgcaggctcctgaatctttattttgaggcattagctgggagaaaaagaccagaatgtcgtacattagtagcggattctctcctagagaagccaagtagtctgttcatggtggctgtttctctttgcttccagttaaaggagcaacccaccacgggcaacattgatgttgatctcctcacagcaaatattgtttttgcggtctctagtcttcattctctgattggacaatttgatcaagcaacccacaatcggttctggttcagtcttggggaggatgatcaaggggattcctcaaagccttggaagtggcttgatgtca

SEQ ID NO: 61828 - DNA, 502 bp, Arabidopsis thaliana landsberg
tacatacaaaagcaagtattgaaacacgtaacaaaatgttatacgtatctcagaaaataaaggtatacgcatatacatttttagttttagatagagaaacgtaactactaaacggagagttaaaaattcaaagtgatgtagaagtatgcatggtagcgatctaaaaattcacaacattttatattttattattttagtaactgatatttcattaatatagacataatatcatcaaaatacaaaactgaagatatatggttcatgctagagggagcatgtgatctacatattggtgaaagccattaattgatttgaatttcttatatggtgagagtaaaattaaaatctatatattactagtttactagtttcaagaaacaagaagaaactgagttgtgaagtaacatacttaaaatgtgatgtggatgtggtaatttagtccatacgattataataatttggtttggtaataaaaggaaaaaggaaagtgaaagtggggact

SEQ ID NO: 61829 - DNA, 512 bp, Arabidopsis thaliana landsberg
atgccggttttttataaacaaaacgcgagacagtgcaaatctcaaatcccgaaacttgacgcgcgcctctctgtctctctcaatcaaattcaaatcaaaatttcaaaaaagcggaatcggaaaaaaaaatctcaaaatggaggaaagttcaggactatcatcgatgaagttcttctccgatcaacacctctcttacgctgacattcttcttcctcacgaagtatgtttcgcttccaattttgaatttatcgaatcactagtcttcttcactgtcgaatctcgtagttctgactgaaatcgaagctcgttgttacaggctcgtgctagaatcgaagtttctgttctcaatctcctccgaattttgaactccccagatccagctatctccgatctctctctggtactacttaatctcgtgcttaagtccgtttcttagatcgcgttatagctttctcgaattcgtgattttctggggttttgaaggcaattgaaatgtatcgtttgaacagatc

SEQ ID NO: 61830 - DNA, 1194 bp, Arabidopsis thaliana landsberg
aatctgttttttttttttttttttcgccatttttatcagcaatcgagcatagagtcggtaacctgattgatatagagatcatctgtttgaaattcggatttgattcatttgaatggtgaatattttcaggtgcttgcttggagctaagttttaacctcacggaaggaatctttattctgcaatcactgcaaagagaaggagtctatattttggtggagaatgttgttggacgataataaacatatgatttcagtgcaacgcggctttaagagtcgtggtcagatgaaatatctgaggtattgaaattgatgagcaccataggagatgatctaattctatctggagaagccagtttttgtgtatattttgtagataattaggctttttgctaatacagttaaagattgatcaaatggctattgctggtctgcaaaatattttggcgatcgattcatctttccgtcgggactctgaggttcaggcgactagacaaagggaaaatgagggaaggtcaagcgtccgggcatcctcactcctacagatgtggagggaacttgaggatgatcatgtgatgggtcatgctcgtgagagagatggtgagaggaggagtgtttcttcaccatctaatactatgaggggaaatggttgtgacagtaatattagtgcacatgatattgttagagatagtgttaatctgggtgagaatgaacttggtggatggtctcccacccagagtcatgttgggtcacataactcgagtgaggatctcggcccttttcagagcgagcatttttctgatctggggatgggtgaaagggaaagagttagacagatttttcgtgagtggacgagctctgggacaggtcagcatactgattctgcttcccaagcaaccaacagctcaagagcagaatggcttggtgaaactgaacaagaaagggtgaggatcataagggagatggttcagatgaatagccagcagaggcctgctcttggtgatctcagggaagaacaacctattgaaggtgctaatcagattgaaagagtacttgatggaatagttgttaatccaaacagcatccagaatgaacatgctagaagaggcatacgcaagttgtgtggtaggcaagtgtgggtggatatgttaaaaatggctgagatggaaaggcaaagagagctggagggattgatgca

SEQ ID NO: 61831 - DNA, 257 bp, Arabidopsis thaliana landsberg
aaacgctccctcacacttagatacacacaaatataattgattggcacaaaatctaaaagatagattatagaaatcgagacaaaatcaagatttcaaaagtgagaaagatattcttgtttctattttacagctttgttttttctttctttcacgtccatccaaccaaactgcactatgataagtgtcaatatggctttactctcacatgtgtatcatacagttgactaaagactctactgattgatgaactgtgggcc

SEQ ID NO: 61832 - DNA, 994 bp, Arabidopsis thaliana landsberg
  unsure (1)..(994): unsure at all n locations
gattatacattcctgacatcttagttacatatttagctctatttaaataacattttgtgcatgctatcgttggttcctttcaatagaagcatcatgtaatcaccatgttaccttcttagttgctcacgcatactgaaaaacttgtaattgtctatttgcgccttctacaggttttggagagctatgagcgtgcgtacagcaatatggttcgtgttcagcagctgtcagaactagaggaggttagatctcaattatccaagatcccttctcctggacaccctccctaacacccctccatatacatgattaatctttctatttttttcccctgttgtatcgatactaggtaattgaatattatacgctgcctgtgggaaatactattgccgaagaacggagagctctaattcgtaatatgtggactcagcggattcagggatctaagcgtaatgtggaggtatattatttttaatgttatcatgttagttgagccactagtgaatgacaaggcatttggtattttaagcatcaaatattgcagtatggtgactttattaaatgaatcttcgctaggatcaaattgattttttccatattaggtttgctttatttagtttccgtctgttgatttataaagtaaagtagcttcttaccaaactgttagtcagagcttgtatcctacgtagataaaaaaacaaatccaaataagaaaactcattaaaattttattgagtgatctcaggttttttgtataatagtgtgctttttaatactttgcattcccaatactactcaggtgtggcaagcacttttggctgtccgggcacttgtgctacctcctacagaagatgtggaaacttggctcaagtttgcctcgctttgtcgaaagagtgggaggatcagtcaggcgaaatctactctactcnagctcttaccggtcttgaacttttaccttttgggttgtgaattttctctgccaagagtgtatctttat

SEQ ID NO: 61833 - DNA, 1337 bp, Arabidopsis thaliana landsberg
  unsure (1)..(1337): unsure at all n locations
gaagcgaagagtttgggaaaattctaaccttaacttaaaactttgggatcttgaagtctgaagcagttctttcttttgtaccaaggaagaggtgttatcattagttgagaagaagtgagaaggtttagggtttttgcttggagattggaagcaaaaggtaggaggagaagagaagaagcatagtgaattcgccattttctgttttctgattcttcttacccactcgatagcaaagataagatggctcctctcacttctctttttctcaagtgcctattttaccaaaataccatcatattctttatccaatccaaaccaaaacctattaaccggttttgtcttttaaacccaatttcacattttagtttccattagaaagcttttttcttaaaaagaaatttgattttttttgttctgtttctgtgtttttagaatcttaagacaaaagaaaatgacaatggttagagctaatttacttatttatctcaaacgacccatcaaggccataacttcctgatcctatgaacaaccatcaaaaacaagaaatagccaaggccaaacccacaaggacatcagaacgatgtattaaaaaatacaaaaccagggtccttcataagttgccatgtcttataacttgcgttgctactccatgtggagccgttcaagacctcattcactggctttcagccgctctccaagtagccgagaagaccacgagtcagccgcgctagcataccttggacatggcttactcacatttgagctattaaacatcaaaggctgctgcgcttgagtcatttctgagatatcttgtgtctggggatcaggttgtattggaaggacaagaactgttgcaggaggatgaagagttgtagcagattgttgaaagccggggccttggaaaatgggaagtcctgggaactgagatacacgttcaggatgttgttgttgataatgatgatgatgatggtactcgggtgcaggagaggtgttcaagtcaggtttagactgattcgctcttgcttcaatctcgttttgtagtttcgaaatctcagtctcaagcactgatgtttcttccttgagctcattcttctctgtggttacctacacacaacaccagtttccatcaacaagaccatttagaaaaatacaacgactaagtaacttcttgaagcaacattcgtcttagcttcttgattcatgtcacagaatacatatacacaatcaatgtgcatatagaaattgacttacatagctagattcagagaggagagaagcatgctcctttctaagggactcaatttgaccaaacacgtncttcaagaatcgagtagctt

SEQ ID NO: 61834 - DNA, 218 bp, Arabidopsis thaliana landsberg
cagagagcaggggggcaatgctgaaaaccaccggccgaaaagcacacagcagcaaagcacaaacaccccaacaggcaaaaaaacccgaaaccccgaccccaaagccacggcagcgccgaaaaacaaagcagacacaccaaaccgaccaaaaaagggggagaggcaccgcccaaggggaacagcacaagcgccaagacgcgcccccggggaaacaacac

SEQ ID NO: 61835 - DNA, 515 bp, Arabidopsis thaliana landsberg
ggaaaatgcattactgatcaacgtgggcaaggtattgtgtttccgaaaaaaccttgaaaactatcccgagagattattataaattatatatcacgaacatctatcactaggccataataagatacgagagctgactctccagtctacgatggaaagaaggatcaacaactccataaccagatatgaattctgggggcgaggcctataaaacattgctaggccttcataaatacattcatatccaacgcaaatatatgcaattcatgtgcgcattatgtttaaaaaatcatttcaaaaggaacagagagaatacttattatattttactcactagcacttcctgtgatgaagaatggaaaatatacatgttgggaacaagagcagtgtcaccaatgtgcagagaacatttttgtcaatcataggtgcacttgtggttactctctaccactgtccaatgataatgccttcacatccggattggatcactcgtggtggccttgtagctctacaataca

SEQ ID NO: 61836 - DNA, 311 bp, Arabidopsis thaliana landsberg
tgctacgtcataggaacgtccacgcagtggttcatccaccctacgtgctttatgggcaaacggggatatatgttggccctaaggctgcgcttccatacatgagtcgttggggcatgagccatagcctaagggagtccgatgacgcagaagacactgataaacctatggcgcgagccatggcagagccgacgagagcgcttatcatggtgggcgtggcctatataaaaaatagaacgtgaaaagcctacgaagggaagggctacctgaagaccgaacttgcacacgggtaagtgtatcctaacagtatgagg

SEQ ID NO: 61837 - DNA, 1587 bp, Arabidopsis thaliana landsberg
aaaactcccccaagctgatccttgcgtttcagaatcacagcttgagtctcttcccatggatttactggtaagttggtcgatcacatataagttaataggttctatttggtagtcatatcaatgtatgaagttagttcttataaagatcacactttctgtaacttccaggttaaaatagtttgtcatctgcaccatgaccagctgaaggctgttttccatgtttctcaaagaataagaatggccgtatgttcttctttcccctgtttaagtttgcatccataaaagctcaattttttgcagttttacttgatgtgtattaatctgttttgacttttctttgaaacagaccatacttgcaagacaatatcatttcaattatacaacaccaggccgctcaagacaggaaatgttgagggtcatgaccccagttccaataaatcgttggccatttcgtaggtacatgttttacttcaacttttacccttttgaaaagagcatcaaacaactcgtttggctcataacaaaaccttctttgatctaaattagcagaggagatggaaacccaacaatggtgtcaagcccacatacccccaaagcaccaaaacatgctcctagaccaccctctcgaaccaaactcgcggagatgaagcaaatcactgctgttcttttccaagaccagacaccatttccttcaagatgcatcgttccttctgttctccagaggccgactttgttcaaaccaatggctccaaagcaccctcgagtgctcttctatgaggatgaactatgtcaagctgttgctcaaaacaacctcacctgattacacttagctgcagtcatatcggtttcctctctctgttgatagtaggttttgtcttcattgcattattgatcattgctcttgatgatcatcattacctatagtaagaagcatgcaagttttgtagcagtgctagttcagggttttaggtttacatgggaatctcctagtatcatttaaggggttttcaagtttttactctcttgagtttgtcataataagcgtctttgatttggtcagttgagtcttgtgtatattttctgcatatcttatctggatcagttgcttttttttttttaatataatttgattgcttatccttgctttcatcttattggttattgagttctccaatttatcgtaccgcgattcaaaccgtacttaaatgttaaaccggatattattaaatcgattgaactgaataagattcggttcaagtttggttatatttttcttaaggcctctgatttagttgggcctatttacgatcttacaagcccaaacttattgccgaagatccattattgaaaagtctcgacgcgtgtaagcttactatatccctgttgccaaacaaggcttttgtcccttgtagggccaatcctttatttggctataaataaaggatgtatgtcttctaaacaaacactttttctaatcggagagcttcgaagggttctgagatctcgcggatgcttcgaacttctccgttcaactattaccttcgatcgttggcttatgtctactgtgacctcttagatttgattttg

SEQ ID NO: 61838 - DNA, 569 bp, Arabidopsis thaliana landsberg
  unsure (1)..(569): unsure at all n locations
ccgggccccatactgttgncaggcttgttctgaagccatgtcggccgccagctgccggggcagttcctgcaagctgtgaacctcgccggaaccgnnnnnnnnnnnnnnnnnnnnnnnnnnnnnnnnnnnnnnnnnnnnnnnnnnnnnnnnnnnnnnnnnnnnnnnnnnnnnnnnnnnnnnnnnnnnnnnnnnnnnnnnnnnnnnnnnnnnnnnnnnnnnnnnnnnnnnnnnnnnnnnnnnnnnnnnnnnnnnnnnnnnnnnnnnnnnnnnnnnnnnnnnnnnnnnnnnnnnnnnnnnnnnnnnnnnnnnnnnnnnnnnnnnnnnnnnnnnnnnnnnnnnnnnnnnnnnnnnnnnnnnnnnnnnnnnnnnnnnnnnnnnnnnnnnnnnnnnnnnnnnnnnnnnnnnnnnnnnnnnnnnnnnnnnnnnnnnnnnnnnnnnnnnnnnnnnnnnnnnnnnnnnnnnnnnnnnnnnnnnnnnnnnnnnnnnnnnnnnnnnnnnnnnnnnnnnnnnnnnnnnnnnnnnnnnnnnnnnnnnnnnnnnnnnnnnnnnnnnnnnnnnnnnnnnnnnnn

SEQ ID NO: 61839 - DNA, 600 bp, Arabidopsis thaliana landsberg
aaccagttttactccacaagactttcgttaacatctgaattatatttagatttatagtattatttttattactatctgtcaatgtcttctgttttcatatttatggcaatgtttttcttgcagtgtataattacagtagttcatagtcactttgcatgtctatattttactcatcacaataatatattatatttatatatataatgatttgggcttgtgttgcaaatgcaatttagtggattaatgaaaatatttggtcttatttccatgcaaaatgaaaatgattagtgtttttcaaatgtgaaaaacatactactatagaagaaaagttagaaaccgtgcaattaatgcctttgagctaataacaattcaataagtggggacaaattactacataagagttgacatggggtcataaaataccaataaatatgttgtaatcactcccatacgagaaatcaaaccttttttatgtagcccgaaataacaatcgacctgaactttgtagtaataattaaacacctatttttgtcaacaagttgaaaatacttttataatgattttatagaaaaatgaatcagaataatgacaacccatcac

SEQ ID NO: 61840 - DNA, 526 bp, Arabidopsis thaliana landsberg
ctgatgatatttccatcctgctaatcgaccatgacactgcatcaatcgcgtctctcacatcaatgcttcaacaattttcaaaaagaggtaaagaatcgaccaacccgcataattgtttttttttttttcgtcgtttatactagcattgattatttattttttcattcacatatcaaattgttaaaaaatttcttaatttttgcacttgttctgttaaattttatcatttgttaaaacatattatgatgagtaattctaaatctcttgatcctgtggtttatgcattgtattgatacgatctaagaattaatcacgatctacgaaattaatttgaagaaatctcaaataagatataaatgtataaatcacagtgtttttcacataaaaaagatttgaagctatttggtcttagatctcaatgatttaaccacatatccttttttaaatcaaaattagtattcgcgaaggtttacgacgaataataaagtgatttacatatcctttgtatctgagaaaccgatgtttt

SEQ ID NO: 61841 - DNA, 1164 bp, Arabidopsis thaliana landsberg
ggaatgactgtatgcctaatctatgtagggtaggtgctctattctttatttggattggatcttattgggttcatcctcctttatgaattttttcttttaactaagcttttggtattttgttttgattatcaggaagcgaaaggctaactttgacgctgcaatggtgaagctgaaggaagggaatgtcgcagcagctactgagctttttcaggtgcttacttcttatttcagtggcttcggtctataaaatgtataatagtaactatcactgttaattagcagctacagagcattttcaggtgcttagttcttttcatttcaatggcttagatctttaagttgtgtaagtatttgcctattgagtttctatagctccaggactagtctgtgtttagaaagacattattacacgctgcttttttctgtatgtctttcgtgtcaattttaaaccagttcccaagatccttcagagataatatgttcctcttgaatcttatgtctagtttggcagtcctggtgtgttggtttgtgagtttcgttagtaatttttatcatgtactctgctttattagattttggtcgagactatgatattgtgtgagctcatgcctattttcatcacgattgcagagagcagttagtgtaacatcatccatggctcatcaattgattcaggtataaaattgtttattaaatgagtaccttttcttagggaaatatgaatcatctctagggccctaacaacttctcaggttctgaaatcagaaaacgtcgaatttattgtagctccctatgaggctgatgctcagctagcatacctatccagcctcgaactggaacaaggcgggattgctgctgttataaccgaagacagcgatttacttgcatatggctgcaaagctgtaagatattgttttctcacacaaataaaaaccaagttcatgattagtgttttaagagcattgtatgatatgtttccccaacttctgtatggaaaaaggttatctttaagatggaccgctatggtaaaggagaggaactagttctagataatgtttttcaagctgttgatcaaaagccttccttccagaattttgatcaagagctattcactggttagtatcatagtattgttgaattctcccaaattacagtgatacattt

SEQ ID NO: 61842 - DNA, 508 bp, Arabidopsis thaliana landsberg
gcttctcttcctcctcctgcttggactttttcttctccctgtcctgattctgatttttcttctcccctcgaactttcgtgtttgcaaaaggggagagtctggactgcaaacaaagatagatgtgtcactttaccatattttttcacctacacaacacagagaaatgtacttgaagcagcttttacaacctttgtaaccattagttgccagaaatgagcagatctggtgccaggattcaaccatggccggttatccaccaatatgtaaatctttttacttttatttcccaggaaaatactgagatcagaaagatatgattgcaagtctctgtaaccaaccaaaaaaaaacccaaaggttaaccagaaaagcagagaacatcaagcaaataaagtgtgacaatgtagttaactcttaaaaaacacacgaaagtatcatcagattaagatctttgctaagaaaagtagccaacacgagtgagactttaaaatatcacatacgtagaagaaa

SEQ ID NO: 61843 - DNA, 725 bp, Arabidopsis thaliana landsberg
acaatgtcatagaatatagtcacttaattatgactatttctctttcaaggcactaatcatccttgtaaatcattttactttccaacaagtattagtaaacaaaacctactaaactaaaatagaaccttaattttaattatcattgtttagacatttttacatacatgttttgaggaaaagtctcctaactatcataatgatcaagtctagtctactattaatagcaaagaaattaaagaaactatcaaaaatatttggacctagacatcaacatctaacagtataacctaatcaatcaaagtaacaatcttggttcgaaatgaggatatgcattatgtgaaaagggtcattgtagaactatgaaaaatggttatgcatatggggaagcttaaaaatgttgattgcatgtatctttcttaaagctcataccgaaagagctccacatctaataatggtcgtaaccacacagtattttatttattctccatctatcgcctttcgaacatgtctaaaacacaagtatataataaaaatgcgtattacaacacaaaaatatataatactaatatcgctaataagaatatagaatgatattattatatattcttggtgggttattttgacgacagttcttaagtcaacttaattatttttgcaaaggacatttttgcacgttagttgtaatttttttttcgcaactaaaaatatatgcaaatattttacat

SEQ ID NO: 61844 - DNA, 454 bp, Arabidopsis thaliana landsberg
  unsure (1)..(454): unsure at all n locations
nnnnnnnnnnnnnnnnnnnnnnnnnnnnnnnnnnnnnnnnnnnnnnnnnnnnnnnnnnnnnnnnnnnnnnnnnnnnnnnnnnnnnnnnnnnnnnnnnnnnnnnnnnnnnnnnnnnnnnnnnnnnnnnnnnnnnnnnnnnnnnnnnnnnnnnnnnnnnnnnnnnnnnnnnnnnnnnnnnnnnnnnncctgtactcactggcacgaccttgatccccagaatatttttgagggtcatatactagtaactcagaagttagcgctcgatattggaaaccgcgtctcggcgagcccgccacccgaaacagctgctttaacccactagatgttccagtcaaactgcctgcgccctcaaccgcatttttcgggggagaaccaagctagcctctgggcctccgagtgggcctttacaccccctaacccacaacctcaatccggctgatttttttcaacaatc

SEQ ID NO: 61845 - DNA, 1327 bp, Arabidopsis thaliana landsberg
catccatattgtaagctagtgcagcttctttcaattttccatcaacaccatcagatgaaggatcgattgtctcgtctttgctcattgaaccaccaccggagtatctcgaccctcctgatctattatagccattgaaatcgcgcttatctttctccgctttactaagatgctggaagaaatcattgcttttctcatcgttgccagtgtaatcgccaaacaacgaatccaaattgtccgatgagtcaaaagaagatcgattctggtttggatctgctcagttcgattcgattccgtttacagttatgatacaatctgagaaaatggatgaacaaaatcgtggaaatgtgaaatggtgtttaccttcgttggcgttggtggcgaggcttctagagacgatgggacgaaatggtcgaaggaaagttacgttgttgagtgaccgagtagcgaaacgagcgatgctcatcttctgaaacttagggtttttcgaatttcggattttccgatctgaggttttggcagagagacagagacggagagtcgctgacacgaaggtgacggatgagagatgattacagtttcagtaaaataaataatgggctcatataaggcctttaatttatttatttttattgtacaggcccatttagttctttgaaggttgctttaagaaaataacttgtaaggcctcgattggcttaataatgggctgatagaaggtttcgatgccaaaaaaggcatgacagaggtgacttgccacttgtaacttgcccatgctgctctacgcaagtcttcacaataatgtatactatttgggaaataatagttgccataaagtttggtttgcttcatcgttaggcacatgtcgaccaaatcttggattcggggcaccaaacaaacaaaaacaatttcactttaattttctttttctcttttttattttctaaataatttttcaatttatacataaatatacattattttcttgaatatacctttaatatgatttacagttacttttgtagattttaaaataaagtgaataaaaaaaagaagtacaaaacacattcactcaaaaagctatgatatgacacaagtgtcacatcaaatatgcatgtgattatctaaatgttcgacaggtgccactgaaccatgagaattagataacaattaatcaaatataatcattcagggcttacgtattagaaaaggattacgtataagaagataataattgggttgatttttatctctgggaattattcaattcaaaaagcttgatcaacatcactggatttgtatgaaaggtttgtactctccttgaaaacca

SEQ ID NO: 61846 - DNA, 670 bp, Arabidopsis thaliana landsberg
tcggctaataatggaggatgagtggagaggagcacagaacatttgtctatgttcctttttcactcttttttttgtttcttttcttaatgtacagatgcgtttttggattacatattacataatacacaaatcattgaactcttttcacatggcagatatgtgagtttttgctaacctcaaataatttagacaatacacacatctaccatgtgattagcccatatgggcttccattttagtgtgtgttgaaacccattgggtatatacagaatccactaactagaagatagagccacaaatgtttcatttttgttagatcatcattgagagtgactgaaatatcgccgtttaccaatgtaacatgaccaccaccactactttttgaccttttcaagaaaatgaaagcatttaacatatacatacaaaaatgtaacgaaatgtcggatctacccctgatcttaggaagtgaagccggggtagtttggtaaatatatacaaaatatttcacccagaatctatcggtgatcatggtccagctagaaagacaccagtcttaccctaacttttttcaaagtctctgtctttctgtggaaatctggggaataaacatatgaatctaaagagaaaaagaagaaagttaaaaagcaaaatccaagtttttggtcaattt

SEQ ID NO: 61847 - DNA, 1327 bp, Arabidopsis thaliana landsberg
tttctgaataacaatgaacacatgacaccctaaaaaggtatgtaggtgacaccatcatgggcaaggatacattccatggtgatgactagaaatgttggatcttaaaaatattattcctttgatcattcaaggcaaaatattaagaaattacaggtcgattttcatgcccacaaatctaatgtcaaccatcaatttaaggaaaatagaaaaagaacaatggagacactccaagtcccaaccaaaaagaatatcaaaatatttcatgagacaaaaataaaaacagagaaattttgtttttataataaaatccgttcaggcagttaagtctgaaatatctctggaagactgatcgtactctgcatcttcctcaacgagcggtcgtgtatctgctgctggatcatatccctgaacgacgagcaccgacgcggtggtggaaaactctgatgacgacaacaagcgtccaactggtcctaactctggacagtctgtactcttaaccaacgatgcaacagctgcatttcttccaacgacgaagagattgcatttactcatcgatttaagtgtcgcgatgatatcgtctttgctctcaacgactctttcctcgtaagccaatgactcatttcctcttggatcattcatcaactccctcacaaactcttcgtcagtctctttctcttttttctccttttcgtcgtgttcactcttctcgaatctcttcaatgttcctctcgcagctacaaatttgtaaacagttagtgtgattcctggatgttccaccattttcatcccgtatgcgagagcttctcggtcgtcgaggcctccaaagaatggaatcacgactttgtaagccacttcgctggctacaacctgtgaggttcctccgagtcctctgtccacaagaatcccgactgagcaaggagctcgttgcaagacccgttggttcacttcatggaacccatgtcctattgactccatcgctccgtccattctctgatgcttgtgaaacggaagcagtatcatcgctactcgtttctgatgcgcgcttgtgcatatgtcctcgtggatgctgctgaggccagagattgcagtcatgggtctaaccgctactgctcgtagatgctggtaagcctcgaaggcaatcaccatctggtccgttgatctctcgatcttattccagattgggagaccattgtttcgagctttgtgaaccatcgcgatcgctgatgaccgttcagaaagctccatcagatgcatcgcgtaaacgcagaggcgtccctttttgcctgttcctcttgatgattcgatcagattgatcaatgtggggatg

SEQ ID NO: 61848 - DNA, 323 bp, Arabidopsis thaliana landsberg
aacaaatgaacatcttgtggtgttcctaattaaataatgtaaggtgtgttatttttgcaaacgaaatatatatattccttgggggcatatgtatcccaaatcttcatgatcctacctggaacatgatgataccttagccaaatttgagaactctaatgggctttctagtttaccatcttagagatggctctccacatccagtgaccagtggcatgaatttgcttgcctctgtaatctaattctttaacattactgaaatttggggagttttgggccattctctttaccatataaccatgccatgcctttccacatactgatca

SEQ ID NO: 61849 - DNA, 562 bp, Arabidopsis thaliana landsberg
gatatacaatacacccttctccctttacacattatccattcgttaagcttagactcacacatatagcatttagctctccttgtcctctatagctaactcacactagctttggtcttggtcacagcaagagctttcgttttttattcttaaacataagcatacgtatgcttacggctcctcatgcttagaagaggacagcacggctctggaccctgaccttcactgcatggctgcgaagcgataaatgacctgaactcaaccggtccgttacattacagcacaccaaacctaatcctatccttaatatcataacactattcacttaattcaatactataatttaaaaaaacaattcgtcgacgagacgccaaacaacatgtcttgtatattaccctcccaacctatcgcataacaccacacaacacattatattataacaaaacaatccttatcttttacattacactccccacgccttgtcctatactattcaactgaacttgtacagtactaaagtggagaggcgatgctttgattgaaccgatcctggccttagcttatc

SEQ ID NO: 61850 - DNA, 579 bp, Arabidopsis thaliana landsberg
tccttcacagcgcaaagcgaacgacatgaattgcagagccgacaagatcgaactggtggctaggagtcaggctcgagtctctctcacctgactctgcactcacttccatgattaccttccttctgctcctgtgtcactttcctgactccatcctataccttctgtaaagccacacactctctattgctcatctaacctcactacctgatcggcttgaactgcatttgacatttcaacacaatctgtatgctcatttagaaagaaaaggtaatcaaaaaaaggaaggataaagcatatggaacttgctattgcaaactaacttacctaaatttgcgtaggcaaactcctgaaatccaataaaactgccatacatgaataaggaaacactgtatccctcattatttgcggatagaaaacatgaaacctaaagtggacatttcattgactttatttaaatgagagaatctcgtatctgggattgcaaagatatatagtatatctacatgtaatgctagggaaattgataagcacataatagtatacttatacttgcgaaaaacgagagaacccgaagcacat

SEQ ID NO: 61851 - DNA, 1096 bp, Arabidopsis thaliana landsberg
tacttgcaggatgtttgcaacgaggccagactcttctgaatatctttgggtgaagaagtattgccatgagcacacatgttacactacacatagaaatgcaaatgacatgcaagctactgcgaagttgttaggtagttatttttgcagcaactatggagaaaagaaagatggattaaggccgaaaacagtttatggagctagtcaggagagaacatggagtgcaattacaatataaaaaagcttggagaactaaagaagaagctcagattttggctagaggtactcctaaggatagctatttcaatttagttaaatggttgtttttggcccaagaaaagaatccgagaacagtagcttaccttgagatggatgctaagaaaaaaattcaaatacgtgtttattgcatttggcaatcgattagaggttttgctttgatgagaagagtcattgctgtggatggtacattcttgaaaggaaagtttaaggaaattttgctagcagccactgctcaagatggagattttcacttatagccgatagcgtttgcaattgttgattcagaaaatgaagagtcttgaagttggttttttagatgtttgcttactttcagatttgtatccaacctcccatcacggaatctgcaagttttatctcaagaacaacatcagaacttaaaattcaataaaagagtaccatgattcctctaacctgtgtaagacttctccatagcttgaaccacaacaaaatctagatctgtagatggagcaacaaccgaacccaactcaggatgaaggagaaagtgaatttgtttttgtctcttccctatttttttttaaagcgaagggcaattttttttttgtttttttttttgttttggcttagatgatggaatatagtgcttaaaatttttggatcttacatatatggcggtcaagtaaaaagtttccgaaaaatattagtagaataagtgatttttgcttttttcgtagtgattttttatcttagcattgttttagtcttattgataaaataatcaaaaaaaatattcatcttttatagaagatacgaaaatgagcgatcttcatgtgcatacaat

SEQ ID NO: 61852 - DNA, 1644 bp, Arabidopsis thaliana landsberg
aaagttgccggaaacaacaaaattcgatcgagattcaattaaaaggggaaaaaaatcgaaaaggaaacataaaaaccattgaagaagatcggaggcgacgacggtgatgacgatggacagagaaaaggagagagaacttgagctcgagagtgcaatgtacacaaactgtttgcttttaggtttggatccgaatgtgatcggactcggagcctccaatggcacgcctcgggtcgggttatttcgccattcgaatccaaagctcggtgaacagcttctctacttcatcctctcttctcttcgtggccctgctcagtcttcaaaggtgcgaatcttcactgtctctctctcgctcactcgttacgaaattgatttttgaaattctgggtttcgcacatagtgattttggagtcagtcgtttgattttgttttgtcttgatctctcaggattttgataaggtttggccaattttcgattcggctcaatctcgcgattttcgtaaggtaaagagggcttgagtaatcaagtttcttttagtgttttgtgagcaatttcttttcttattgaattcatagtttacttaacactagaattatgaatctgaaggttgttcaagcgattataagcgagcttgaatcacaaggggcattaccaaggagtaattcgagggtttcatcactagccacttgctgtggaccaaggttggttgaggctacgctgatgtggttcttatgtatgtttgttcattaggtttttttttctagtgattgataacgagcaactagtttagtcatctccacttcgtattcgttgggcgctttaggcttagtattaagctcttggggtgattgcgcagcattaggtgatctgatatgtatatgtggtacttcctgttttgattgcagatttgtggagctcttgtggcaactttcactgcatgcgttaagagaagttcataggcggacatttcctgctgatgtagcttccaatcctctaccttcttctctaactgacgtttctttctcacatgcagctactttgcttcctgtaaccaaggtagtaccgaaagcattaccttcaagattgtgtgttatagtttcactggtctatgtgaaccttgttgactagttcatgggataacgtagaaatgtgtgtgtaaatgattttcaggcccggatagtgcttgagcgccgtcggtttcttaaaaatgcagagactgcggtacaaagacaggccatgtggtctaatttagcccatgagatgactgcagagttccgtggtctctgtgctgaagaggtaagacgttattttttggtgagaggtactccattttcttgtctggttattatggcttttattgatgcatttcattttctatttctttggcatcaggcttaccttcaacaggaactagagaaacttaacgatttgagaaacaaagtgaagcaggaaggagaagtgtgggatgaccttgtgtctagctccagtcagaattctcatctagtttcaaaggcaactaggttatgggattctataatggctcgtaaaggtaagggtttatgctgttctattttgtcttagttcttacaagttaatacagagataagttctcacatacagaattatgcaggagttatatagtttac

SEQ ID NO: 61853 - DNA, 1032 bp, Arabidopsis thaliana landsberg
caacgcattgctgaaaacttgtcctttcttaagcgttaattatttggaaaaaacttggtatttcatttcacaggaatttctgtaaactgtcactttgtaatacaactatgttacttttattgaattttccatgccaacatggtttattttttccaactttcatatcaacatgcgttaaaatattaaaagatcacctactaaacttgtgcattaaataaatcaatctctcactcgttttctttcttttcaatttcgtcagctgccttttctttcgctcaccgtattagttagttaattacgtccatttgtcataaaatatgtattaaaaaggtaaaagtttagaaaacaaattactcgtagtattgacctagtcataaaaattacgtaacattatggaaattcgcttcctttagatttaatatccattagaaaaatttcactttttcactcgaaatgatatcacatcagatctatttagaaatctagtgagtgagttgttcatgaactatacttatcctacatagttagtcctcgaaaaccctagtttaaagaaaacaaaaattaactaggatatataaaagaaaatgttttaatggtttttcactgagaagggtttatagtctagtggcaaggtccacatattgctatacctcatactggcagggctaacggattaggtgtagacaaaaaaaaaatgtatttccctactaaatacaagaatttcttatcatataaatattaaaatatttgagaaaattaggccataggcacttaactttataggatttttagtatgcattatgggtacattctgatattccttctgacattttctcttcctaatgtaggcgtattaatagacctaaagaattttagagtagactaccaatactaattttgtaatttttcttaaattagaaatatctggggtgattcgattaaacaatatactgtatgttagtttctttgtttttttggtcaacggtctactagacctttctctaccttaggtgaaaaactgaattcaaaact

SEQ ID NO: 61854 - DNA, 1071 bp, Arabidopsis thaliana landsberg
tcaactgttacctcatatgcacgataatctacctgaaagaaaatgatttcatacaatcagcctttctactggaaaagatatctttttatatgggctgggagcaatcactgtcaaaaaaatttaattgtatggaaaacacagagaaaagaagccgcccaacatagataatgattctgtgctaagatgcagatgcttctaatacacctagtctactcaagacagaaccttcaatagtacataaacaactcattgtactaaacccttggagaagtatcctttaaccagaaatttacctcaacgttatctccatagaggttaagtttgtggttttcattgttgaaaacttgagcaggatattcatttctagcattacaggccatatcatcagccagcataagaatgatcctctcatctggtattccaagtctcttgactgtcctagaaacaccaagtaaagagaatatgaacgtaagaaccaaagagtgaagagaactacctcaatgaatggttaatcgaacatatacataaggaaaaaaacgagctttcacctatagagggacagagtattggccatgtgccggtagttaaacctgaaataatggtagccgcagcaataggttagtatgtaacttgatgaagctagatagatttttggcacctggaacaagtttctcaatcaagcataactctcccacacaaggtcctaagtaaccaagtaacaaaagatgaaacaacagttgactagagaaacaaattcaggttttctcagccactcgacaacacaaatcaagaaggcacgaaattatgatatagatctatagcacaggttacgtcataactccagattcaaaggtcctagagatcatggtgagaagaatacaacttcaaagcctatcaccatttgtgactcacttatcagaagaactacattgatcagctaccaatgggcactaaagctacacattaaccgaattaacatcgatcaaaaactctgttacaagcaatctattgtgagtatatttaccagaagcgaaaaatgcataccaaaacagcccaattgtttgtgttgat

SEQ ID NO: 61855 - DNA, 1532 bp, Arabidopsis thaliana landsberg
agtctctaatctaaactttaattatggttgtgagttatgaacaagaattcggcgatcgctgttcttagtcaagccgtttatgtatgtgcgtatttattatgtttattatataatatcaagttcttcgagcccattaccgaagacaaattgtattcaatctcttcttttttttcgtcaagcaattatattcacactctctctcgttttactagttattatataaaacagatcgaaagcaggtggtcaaaacatgatatcaccagttacattcatcacgaacatatatggttcggaataatattaaaaacgacatatagagaaaggaaaaggtaatcatcgataattaattggatgtataaaggtaactattattatcataagagagaaatgatttagcaaaagcaaagtaagtacattattgtaaatgcatatatttgagtacaatgacgtgtcgactgacagggaataaacacgaactattgtcttcttgtcaaaatttcttaattggtagaagggattgaaacggcaagagttaacgcacgtgggacccgtggcttaagtacacaatcgaagtctttgaccgttgaactatctatctatcacacgtgcggcctgctaaagtcgtttgtttataaagatggcccacctctctatttctttccccaggccgtgtataattagtttatttgcatttcttgaatcagtgcctttggaggtgtcatgtgccatactgccatgtggcacatttcagtgactagcgagagttctaggcccatttctataaaactcagaccaatacactttgtaaatgggccttatagtttttaggttcattaaagaattatcataatgtcaatgatgcttttagttagacacagattttgggattactgtgaatagtctaactaatttatatactgaatatatgtcaagtcgtgattgatgaccatattcttttatttcgaaaatcatgtgttataacaatttgaaaattctccataccaaaaaattaagagaagaagttggaattttcaacaaactaaagatgtttttcaactccatttgagtgacttatataattttttgataacttagaattagcaactaactagtatctaaaccctaatcgataagaaactcacgtgatttaactatagataaaacctcctaactgtagccaaaatattaaaattatagattagggtgtagataataattagttgctaattcttagttttgtttccaagaatagaaaaaggcggaaatcattagcctagaatgtctaaaacagaattttccaacgagttaagtttcgctgcttggggatttttcgtttgtgggttccctaataatatattcgacgacttgactccgatgttatgtgtatatagagaaaaaaataaaacttttaaagcttataaactaatatcaaatggaaactaaagcactaaaaagcatttcatccataggatttataaacttaatataaagtaaaaaatatataaaaatttatatcggttcttgatcgtgtt

SEQ ID NO: 61856 - DNA, 540 bp, Arabidopsis thaliana landsberg
catgctgatctcacatgagcactgaaaatgcttcttaacatgctcttctcttactagagacggattaatagcctaatgatcaaaaacttttacatgaccaaatgaaatgtattgaattatcatcccgaacaaggtgtcagatgatgcccaaccctgtgtaccgtacttctatacacttcctctatagttggataagattaacatatcatgattataggcaagtggaaagcaacacataccattcttttcttttgcgtgcaaatgtactagcttctttcattcactccaaatgtgaacacatgctacaatcttttaagcctaatgggtatgtataactacattaacagactatacaacatatgaccctgcaggcatacagatatggtgaggaggatcccagcggactaagtagtttctagggtaaagcttaatccatatgagaaccctggggtaaaaattgatctgactaattttaccgatgtcacctacaaagaccgtttctgttgtattcacgacatgttatacaaataaagcgagctc

SEQ ID NO: 61857 - DNA, 504 bp, Arabidopsis thaliana landsberg
  unsure (1)..(504): unsure at all n locations
cacgcgcatggatcaggcacgcggccaggccaatggtgcgggtcttggcctggcaatcgtcgatcgcatcgtgcgccgtcacggcggcaaacttcagctgtccaatcggaaggaaggcggcctgatgatccggattagctttaccaacttgaaaaaacggcattgatgcacagcgacgacgattgccgtttcattctttcatcgcatcgcaggcataaaaaaacgcacatcgttgatgtgcgttttttatgaatgacgcttgccttgatcaggcgcgctcgtccttgacttccgtgaccacgccttcgatcacatcgccctgcgccggacgacgataataggctcgctccgccgcnnnnnnnnnnnnnnnnnnnnnnnnnnnnnnnnnnnnnnnnnnnnnnnnnnnnnnnnnnnngctgagcagcagaactgcaaccacgaccagcagacccacggcaagcagcagacccagcatcaaccatgcgaacaggcgcgacaggaaac

SEQ ID NO: 61858 - DNA, 1881 bp, Arabidopsis thaliana landsberg
  unsure (1)..(1881): unsure at all n locations
caacgttggaaactggtgaacctgtgtattccccaataacacaggttcgtaacttccgtcatagttaataaaacactaaaactgtagctatcttttctatctctgaggtcttagtgtttatatccttgtaggaaggtccgctgctgacggaagatcttattagagaaacagaggaattagtacttcggacagggaggtcagtgccatcttttatttgttgtagtttgatataaaatttatactccacagcgattctggtgattgaaagttaaccaatctgctaatgaattctgagttggtgattgaaagaccagtaacagtcagttagattgaaaataagagacgtattatctggctgaataatatataattccgtttcgttattcagacatccaattatcttgatagattggattattgtctttcttatggttcagcatgggggctggatgttctcaactcttgtctgacatgcaggctttcaaggtgattatcttaatgaataatcttattactgtctggtatataagcactcatgtaaggaaagaaactgtagctgatatgaaattgataagatctgtacctctgtattaggcagcaaatcctggctgtattttggaagattttgtgagatggcactcgccaccagactggactgaaaatggtaacatgtctggagatgactcttcacccgttcgaggtcaataagtacccggatgcagaaagaaggtgtgaccatttctcagtttctctatgttgttaaaccattactgtaatatttcaagtcgtattctcaactggtcttaccaacgttttaaaaaaaatattattacgtaacttatggcgtgagctgtgggaaacagctaaaccactccctgctgttaaacaagcacctttctttgatgaagatttagctgcgtaaatttcaataacatgtcctcttaaacgtagtgaaatctgctttcatcactcatggagatcttgtccatttctcatttaacttatacagagaaggaatcttgaattatttggaagacattccagctgctgaactttgtgagcagctgtttacttcgctagtaagtttttcccaacaaattgcgtatttttctttttgtgaagctttctatctgtaaggtcaatctcaaattctctcacttgcgctacgttaaatggatgtcattggttacacagttaaggttttagctgtaaatagcactttgacgattggattggttaaaaatatttcaggtttccctggggtttgtgatggtggagccagttttagctacaaacgatgacttgtcaaagcttttctttgaatgcaaggattatgtagtcgctatttgtcaggggggcgcatggaccgataagcttgatgatctatgccaggtactttactagagagctttgcacagattcaaaaacgtatctacatgcttggaaatctatcactttaatagagttaagaatgttttatcagatgccaaagtaaggccatgtggatatgaacattatgctcactaatcatacatcctaattgcatttatttggtcataataggtatacgagaccgtggaaacaatgttattacgtccagaagaagttttgagatcaatgaaacaaacagaggagtcgccatcaagtggcagcgaaacgaaacggcggtttaagcggctaggtttcatctttcgtggtagtaaagaaagaaagcagacaagagttccatcagaaactgaacagaaaagcaccgaacctagcccacgccaatcattctctagtctttntgatggcaagacgtctctgttttcaaagagacctcctagacctgaaaatgtgacgctggtctgaatccatattatttatttgatttgttcatct

SEQ ID NO: 61859 - DNA, 486 bp, Arabidopsis thaliana landsberg
tatgaatcataattatgcagttaatctactgataaagatataaacatcaacattagatctcgcatacttggaattccaccaaccttgggtcgaataacccgataccctcggaagctagtaaaatctgtaaacactctctcttgcttcttctataaaagtattctcaagatcaagcgttaaacttaacatgttatatatgaatcataattatgcagttaatctactgataaagatataaacatcaacattagatcttcgcatacttggaattccacccaaccttgggtcgaataacccgataccctcggaagctagtaaaatctgtaaacactctctcttgcttctttataaaagatatttcatagaagatatagtctcacagttgctataatacatcaagctccaaaactcttgagcacataaccttttgaagaacatctaacatgaacatccaatcatagatttttttgttaaattatcataact

SEQ ID NO: 61860 - DNA, 530 bp, Arabidopsis thaliana landsberg
  unsure (1)..(530): unsure at all n locations
ctggatgggcagaggacagcgnntatgtagggaacatatgattggatcaattattttatcataatggccgaaaattaaccacggaaaaggtgatgattaatattttaatcatttttataaaacaatcaattttggtcgtatgttaaatttcttattgagatatactatttagtttctgcctttggaaagaaaccgtccaatgttccttgctgcttcaatgtggttcgtgttggtaatttttgaggcaaaagacggattctcaacgtcataagattttttttatagtgactatttttaatctcccccaaattgtttgcagaagtgtattcgacacatcatgagcttgcttgttgcattttgctatttaacttttgttttcgagtttttatttatggccccctatcatctatttttattgtttatcaaacctatcgctctatttatattgtacatgtatatatgttgagtaagagtataataccgaaccatgaatttgaagagcttgcaaattttattctctttcggatatg

SEQ ID NO: 61861 - DNA, 494 bp, Arabidopsis thaliana landsberg
ccttccttcttcctctgggagccatttgttgatccctcactattccttgtagtttcagaagaaattggaggaccaaaagtataagtctttgggttataatcaaacaaacaaacaaacaagggcaaccaaacaagtgatcccttttttcaaacctatgttacaacaaaatcaacgaaagatgaaacacaacaaaagttgagctctttgccaaaaatcccgaatcagtaacactagagataaaccaaaaataccctaaaattaaaacccaaatgaaacctaagcagaatcacaacaaaacacaaaaacacgaacttaattttgctacagagatgacaatgtgctgagctgtttcgttcagattcgatcgggaaagagagtacttacggcggagaagataaaatcggcggcgactgtggaaggtttcttaagaataagccgtggatcgactcctcgtgtcccaaaaatgcttttttgaatgaaatcgaattaaaaaa

SEQ ID NO: 61862 - DNA, 498 bp, Arabidopsis thaliana landsberg
  unsure (1)..(498): unsure at all n locations
gcaccaccgcttgtacgcgttcgccccaccgatcattgggcagcccgagcacagccacagcagcgattgccggatgggtggcgagggcgttctcgacctgagnnnnnnnnnnnnnnnnnnnnnnnnnnnnnnnnnnnnnnnttgatgcggtccaccacatacacgtatccgtcgtggtccattcgaccaccatcgccggtgtgcatccagccatcccggattgccgccgctgcctcctcgggcttgttccagtagcccggcgtcacatgcccaccgtgcacgacgatctcccccaccgtgccgtaaggcacctcgttgcccgcagcgccgacgatgcgtagctcatcgtgcggtgcaacccgtccggcggaggtaacccgctcggaaccgggcccttccagcacatggtctttctgatgcagaatgggcgccaccnnnnnnnnnnnnnnnnnnnnnnnnnnnnnnnnnnnnnnnnccccggggtaaagcgagcatcga

SEQ ID NO: 61863 - DNA, 505 bp, Arabidopsis thaliana landsberg
gtctatctatcttccgattaattttccaccaaaagtgatataacttttgataataattgagacggaccaacattgtatttttaggcaaacgcaaattactgtttaatcgaaattttagataaagtaaggtaagatcagaccaaaaaaacaaagagcctactattataaagtttcgacataagaaggtcaatgatgtggatgatataaccaattgcaagttaatgagacgtgatacataaatttccttaaatctaaacttgtatccggtggtactagatttaaaatatccttataaagttcgttgatatatacatacacaccaaactcattttagcttgttgttgtttcataaagatccaagataatatgaaatcactttttaaaaattaatcctattaatgtcacacatcaactattttatctttccatttcagaaatttgatttttttccgaagaatataatggagctctgatgagtatgtgacccactaatcaaatggttcat

SEQ ID NO: 61864 - DNA, 188 bp, Arabidopsis thaliana landsberg
ccacagggacactaaagcaaaccagaaacactaaaacaaaaaaaacaaaaacaacacgaaaaacaaaaagaaaacaacggggctagacaagggaaccccgaccaagagagcacgactcaagacaccaaacaagacagacccagagccaagacaaaaaagaggccgaagagaggaaaagaagaagaaca

SEQ ID NO: 61865 - DNA, 1740 bp, Arabidopsis thaliana landsberg
  unsure (1)..(1740): unsure at all n locations
gttgcggccatgctccgttgccggtgatgtatggattcgacgaagagagtaataataatgtatgttgttgttgttgttgatgagatgatgagattcgttagggttttgagacagaagctaccgattaaggatcgtttgatgaagatgaagatcgttaagaactgtttctccggcgccgagatgatcgagattctcattgattacttggattgcgggaggaagaaggtacgtgtgatattcaaaacttatgatcctgtgttacgcacctatgttaactttacgtagacgttgaccacgtttgtctcaaattaatattattcgattaattcaaatcttaaaagattttctttccaatggataattgattgaccaattaattatatttagttttggttaatttagtttttattttttggcaccatattcaaatatcaagtaattagatttatattttcggttattatgcaggctgttgaaataggcaagaggttagccgagaaacacttttttcaccatgtttttgggtacgtccgtacatatataaatcgtgtcctttttttttctttggtaatatacataattaaatattcttgatttagtgaaatgttcataaactttatgtttgttgtatagagagaacgagtttgaagatggaaatcattactaccgtttcctagagcacgagccgtttgtttcaaaatgttacaattttagaggttctaccaacgacatggagccccaaagtgcagccattgttgggcagaagctattcaaaatcatgacagctattctcgagtcttattcttccaatgaccacactagtgttgattacatgagaatcagccagagtgaagaattccgaaggtagaatttggactcaagagtgcataaacggattttagtctaggaatgcttactttagttctatcgacattaatttggttatgctttaattgtgtataaacaaaggtacttgaatttggctcaagacttccaccgtttgaatcttgtggaactctcaacggaagagaagttagcattttttttgaatttgtacaacgcaatggtgattcatgctttgatcagtatcggacgtcccgaggggttgatcgcaagaaggtcattctttacggattttcagtatgttgtaggaggctactcttattcacttagctccatccgaaatgacatccttcgtcacggtcgaaaaccctcttatccatttatcaggccaccttttaataacggcaagacacggcatgaggtaattttagcgttccatgtttgtttgtaatttactcatatcggtgattttcggattatcctatagctctaattctatggtttaatgtcagcttggtcttctaaaactgaatccattagtacattttggcttatgcgatgggaccaaatcaagtcctgtggtgaggtttttcacaccgcaaggagtcgaggctgagctcaaacgagcagctagagagttttttcaaaatggtggaattgaggttgtcttggacaagaggaccatacatctatcaagaatcatcaagtggtaatcaattttctttacaataatctctacattgaaatttataaatagtgagacctaatgagacttatacgagtcattttggttattagtctaatgagctaagaaagatatacattgatgtgtatatgtttgttgcggtaggtacaaagaggatttcagtngaagagaagaaaatgttgaagtggata

SEQ ID NO: 61866 - DNA, 584 bp, Arabidopsis thaliana landsberg
  unsure (1)..(584): unsure at all n locations
aaagactgaaagacatcctgcggaaattgcgcttttggttgagaatgtgatggctgagcttgatgttactgctgaggaagatgcagaacttaatagacaggggaagcctgctatcaacaagcttaagaaactttcgcttcttaccgatgtacttggaaagtaagttgctaacttactgttatcttatactgtttctttctaacaatctgtttttaatacgtttatttttcgttatccaggaagcagcttcaaacagaattcctggaccatggagttttaaccctgttgaagaattggcttgagcctcttccagatggaagcttgccaaatataaacatccgtgcagctattctaagagttcttactgatgtatgctcttgttttcctgtttagggtttttccgtgattttgaccctttttagctgctgtaccaattactgagtctgtcttgcagtttccgattgacttggaccagtatgatagaagggagcaattgaaaaagagtgggcttggaaaggttaggatacattacctgattcanattgacaagaatcngtatgtaggatttatactcaggaacttaa

SEQ ID NO: 61867 - DNA, 702 bp, Arabidopsis thaliana landsberg
  unsure (1)..(702): unsure at all n locations
gtaggttcaaaatatttgggaaacagagagcagcagcactatattacaaaataaattaaacatacacacagtcacaaatttattggtggataatattattttttgtctataaagttatcataatgtttccacaattaatgttttctaatttcggcaaataccaaactccattattgccattcgaattaaatgcgctcccctttctctataatgcatagaaaattgacttttgataaatttcccctttgaccttgcaatccaagggaaatggttggtctaatattttaactaaagtatttctcttcattttaaaatattttatcatcataagacatatcgaacgtacaaaacaattatttcagttatagagaaacttttatcgaaaacaaaaaaaaatgtatatatagagaaactggttttttttttccgttttttttgaaacaggattgagatttatagagatcaaagttaatcaaattgaaataaatattattgcgatgatcctctgacgacaatactataacaccactaatgttcaacatgaaaactcaaccatttataagttgggaaaataattcccttgaactgtcttagatttttaaagctaagtttatcgctcaaactagcccaaaagagttggaaaacctgaaaaactagtccaaagaaaaatcatngatggaaagtttgaaaatttgagaggtg

SEQ ID NO: 61868 - DNA, 166 bp, Arabidopsis thaliana landsberg
actcagctggggttggctctggctcgtttagaaattgtagttaagggaactatctccggagcacttgagattaaatggagacttactatgcagaatgagacaccttcagcttctctgcatcaaccatgaaaactataaacgactcgcccattattgaagtctggat

SEQ ID NO: 61869 - DNA, 1247 bp, Arabidopsis thaliana landsberg
  unsure (1)..(1247): unsure at all n locations
agaccaattacatctttttgaaaaattcatgatttccattcttttagccgttcatattttgggaaaaattcgattttacaaattgggtactgtttttttatgagaaatttgttgtgtaatcgtgtttctgttagtatatctccataggacccaaaagtttgtatcttctatacaaaccaaacttattagagctccatgtatcatcatacaaaccaatctctagggaaagcccaaaaataatatcattatgttgtgaaagcttaaacactaatccccaattccaggatgtgtcattcaaccactacttcatgagttgattaaagaccaaatttatgtctaaatagtttcattgtttgaataaatggttattgactttacataccattgaaaatctttgaagagagaaaaaaaaacaaaaagagaatcttcttttgtgaagaaacgagtgtcgtaatcatgcatttaaatccaaacaacaaccatcttaatgattctacccaacacagtaacatgccatatacagatttccagctaggaaaatatttatttaattcctcatatcataatcttttttcaatatatatggaataaaatattaaattcattttttgtttggaatattactcatctttgggataataattaattaataacggacctggcgctaggagctcgaggaggaacctccggttcgagctcagaaggaagaccaagaaaaccattgaaccgatcaaaagtcacgtgactcacgtgcttaacctccgtcggccaacctatatccatagacgccaccacgtcatcttcccctctctccatcgcacacgacatcaccaacgacttcctcagaaccgccgcaagaaggtctacgaccgttaactgacccgagccggacccgttcccggatcttgacgcgtgtgagctcaacggcgttgaagcgtcgtagtagtctgtactcgtagtgctatgtccttcttcgtactcgtcgtcatcgttgtggatgttctcgtatttgtctggaccgggtcgagtgggtttaaactccgggaacccgatagttccggtggatttggatcgggagaagttagtcatcgttttctgttctgccagagaagatgagaggacgttaggggtagagttaagaagaagaagctntgaatgtgagagaaagaaagagatagagtgattaagggtttgtttggtgagaaagaaactgcgagaaaacgaaggaaaatttacagacaatcgcg

SEQ ID NO: 61870 - DNA, 294 bp, Arabidopsis thaliana landsberg
ataaaccagcacgattagttggacattgagaatagagatctcttactataatgcacacaatgcgtgtccttacttgcttaacaaatttagtcttgggctggcctattccttaacttccacgtaaaataacttgcgataatgtttgcccgttttggttaggtataaaacctatataccttatttttggggtacggagacgatattatttatgttgagtacatttgttgtttgacctacacgcatgtgcacgaagccatactcttgcattatacacctgataactgagatttttac

SEQ ID NO: 61871 - DNA, 381 bp, Arabidopsis thaliana landsberg
tgtatgcaaccacaaacacataaaacacacgcacacgcacacatatgagtgcattttaagtccaattgatggaaaatggctaactggcaagaaatcttttttttttcaattgggattgacaaacactggcaagaaatcaagcatatggaattcattacttattttcttaaaattataaaagaaaacttatgttggttgatatattaataggccccttgtgggataatttgcatacacgtggaggatattacgcgtgtggcgaattaaattttgacttttgataccaagataatatgtatatagtcattggtcatgtaccaatgatgcgaacaacgaatggattctgccttaacttaaccttatgatatggcgaccattcat

SEQ ID NO: 61872 - DNA, 449 bp, Arabidopsis thaliana landsberg
tgtgcgaaaatcaaatggatctggcaaaatgttctccttaatttatgttatttgcattatcacgaactacaaaccatccattgggcatataggacagcacatggtagcgattttgttacaaattgcctaatcttcatttatgatgacccactgatctatctgactgaggcaatccagtaaaaccctgatattctggggatagactgcgctctttagtatatcctcctcaaatttcccatggtttctactcgcactaggatgcactcatttgttggacaggggttccattttcttgaccggttctatatagccacacaagtctcactccaattgtacgtaagaaacaactacctttcttttggtgcccatgcgaaaaagacactatgcccttattcttctctactttattcctaaaccttctctggcgcttccaggatcgttacatatcc

SEQ ID NO: 61873 - DNA, 451 bp, Arabidopsis thaliana landsberg
aggaccaagggaaagaacaagcgtcaaaaacacatataaacgcaaggggaaagaacaataaatacaaccaaatacaagacactcactactgagaaccccagctacaaaatcggagccttcccaaggcataacagccactaatataatgcaccacaaagcgagtaccccaccaacagcagcagcaccatacgctaaaaaacgacccttacaaatgcatctaccccgacaaacctgaagattatgatgcatacaaccataaaatgcacgagcgatgatacataacaaagggaacgctgagagtaacaccatagccccaaaaaacgatccccacactgaaagaaaaaaggattcaaccctcgcgaacggctaaaacgggaaccccagaaaccaaagccactgggcggtcccacccaaatcacacaaagcacttttcaggaccaagaaagagcaa

SEQ ID NO: 61874 - DNA, 1760 bp, Arabidopsis thaliana landsberg
aaaaaaaagagaaatcaatctatatatgtactttattaatagaaaaattttgaatttcattaaaaagtatatcatagtatatggaaaaggtgggaagtttaaggagggcattactcgaagcacatttgttttggcattgactttggcatgtaagacaagccacatggccggccggttatcaccgttaatcaagacacatgaacattgctttgatttattttgtttgttaatacaattagatttactttataatccaccgtattatatagcaattactaattaacattatttttcatctaaaaatcccataccgatgtcacactaattctaaaataccgatgtcatgattggtacgtttattttaccaatcatgattaaaagcatagttagaagacttaacaacaaaacaaaacataacaaaaaaaaaaaggaaaaaagaagacttaaacattggtcttccaacccatagtgaatatagttacaaataatataatgatacattataatatgacaaatcacaatttatatttttatgttgttcgatttgtgactacatatttgtgtttgaaaagtagtatgatatgttttattcactacaagaaagacaacatttaattcatttttgtttgaataacgtaactcaatcgaccactaaactatcatacacgtacttaaaaaatgatgttaagtttaatgtgatccccaagtgttgcaattgggttgagtaataaatagaagtggacaaatggttagttaattattttcctagctaaattcaagtatttttcaaaattattttgtttcaaactaaaacttaaaagtcataacaaattctattgagttttaaaaatgaccaacaaattgaaagtgtggttgttgcaaatgcaacttggtggagatacggtcagtgacagcctaacacgactccatcggttcgatcaaatacctcacgtaacccgccgattcactcgatcgtctttattattcttttccattttcaatcatattgagcctgattgataattacaagtctcattacaaacgtattagcaacggtatacagtcaatatccgtcactaaaaatgctaattgcaacgaaaagtattcttctttctctatgtaactataatgtgatatagaattagcccaaaacaaattgtgtatgattaattagatctaaaataaacgatggtcgtcatgtgacgttgatcaaccgataaagagtagtctgaaatttactaataaaagtcttaatttgtactttttacgaattatagtttaaatggacacaaaagtaaatagattaacaaaactagaaatacgtggaaatttacacaagcactatgcatgactgcctgcattccctccaagagttttcttaccctaattagtaccggttcaagaaaatgaaggttctacaaattatcaattataagttcctaaagttcttttctttctgtgtgtcctagaagagcgatgctaattgatttatacaatgtactaaccaacgtaaaaattgtgaatgatttagcctaaaaatgctatatgcaatttcttacgtctatttctcgtactgtcatctcatatacccagccttagtaacaatccaatctaagggccgaacaaagagttgcatcctacctactaaatttgggcctattcgaagctaagcttggcaggtcgattttagtaaaatatttttgaaaggttcccttaaaaaaagatatttgaggactacacaattagttaaatattaaaaa

SEQ ID NO: 61875 - DNA, 639 bp, Arabidopsis thaliana landsberg
aaatggagtatggggaaaatcgggaacctgtgagcaacggagaagagagcagtggaatcggaagtttcgacgtcggagaattcgtcgtcgtagaagaacgggcggacgagtttgtagatgacgagaccgcagatgatttcaatccacatcgtttgcttcgtcttgttgttgaaatttgggaattggaggattgagagaaaagagacgattcttggaaattaagaaaaaagaaaaaaccccagctgaagtaaacgaacaacaaagatgctaaaaactaacacaaaaaagtcggttcaatcgagccataaaccacaaaactaaccggttttggtatccggtttaatttacaaaacagtcttcctcttcaataaaaacctaaaaccctaattattttcaatcagacttccactttcgaaacctctcaccgaagctacaatgagtatcatcgcaggctcctacgagagattcatttggggtttcaagcttaaacccacgaagcacgacgccgaatctcaaaccctaactctctcccctctcttctcctacccctcccacatcttcccaatcaccaccgtcgcttgttccggtcccgccgcagcttccggcggctccgacgatacaatccacctctacgacctt

SEQ ID NO: 61876 - DNA, 1645 bp, Arabidopsis thaliana landsberg
aaatgttaaggaatgtccaattctcatagactttacaagaattggttacatttgctatatacaaaaatatctaattggataaactctattataccatccaaatatggcaatgatttacgagtttgtgtaacgactttccataacagagcaatggatagattttgacattatgttaataaattttattcacttgaaggttctattttgtattacgtgcaagcatccactcattgaatttcttcactcctactacaagtactaacaaacttatcaatttcccaacaaatccatagatatcctttctctagcaatcgaagtaactattttagtttcattaaaataacatatcactcttaaggactatataataacaaaataccttcttgtcgttctcagtttcttctcccaattcattgaaccaaaaagattttgcttcatccaagatcttgaagatgggtataaaagtttcatcaaagatcaaaagaattctcgcatccacaggttatattcctattttcatttttaaataccactattatttttattttttctactgcaaatttgcaataaaatttgtaaccaagaaaataataattttgaaactttcctcgattggtacagcttcaggtagttcaaatcccaaagatggtgatgacgtggatgtccgagaggaatacgcaaacgcctttcgtacggaatcatacaatcacttttggacacgtgtcgtacagctaagccgcaaaaagtccacggtgtcttcttcttcttctccaccaatcgaatcatcctccacgtcagctcgtctcatgtcttatcgcctattcgcgcacaatcttctagacccggatccgaataccattactcggatactagatgtatcccgggtcgggcgacacacccgaactcttctctctgattatttcttggagacggcaaacgctttcttgctttgcacgctattactaaaaaacattcatcatcttcgttctaaatacaagtctttgaaacctaaatttcaatcggagaatcataattcattggctttagtagaccaattcgcggagatatcaaaatggttcgacccgtttatctcgtcgggttctaggatccagctaatcagatctggctgtttagacttgctaaaacacttggagtcgagacgagacaagacacgagccaaactcaagcttatcaacggactaactcacagctcagggcttctcgttttggctctaaccactacattgattgtaaccatagcctctcacgcctttgctttgtttatagccggtccgactcttttaacctctcgatttaaaccagccggtttaaggaataaattaacaaaaacagtggctcggctcgacgttgctgccaaaggtacttacattttaagccgtgatttggacacgataagccgactagtgacacgaattaacgatgaagtgaaccatgttcgagccatggctgagttttgggttggtagagggtcgggtcgggttcgaggcagtgaagaagttgctcgagagttgaagagatgtgaagaaagctttactgaagaacttgatgagcttgaagaacatatttacttgggtttcaatgactattaatccggcaaggaatcttcttggtaaagaagattttg

SEQ ID NO: 61877 - DNA, 543 bp, Arabidopsis thaliana landsberg
aaagatgtaggaattaacgcacatatgctttagtacacgaacaatatcgcttcaaaattaaacttgtttatgtaagtttcgtacaaaaatatagcatagcttatagttcactatcactacgtacgatgaaattcttcaaccttttatatattcactattaggaaacggatgaagtatgattaaaccaatataggttaattcttttacgcaaaaaagtcaaatcattaacaaatttaaaggattaagtttcgagtagaccgtgacaaatcactaaactagaaattttacttcagcagcttgaagcttataagagtaaacatctttacccttacttttgcagttagtgttgtttgacttattggtaccaaactaaaaccttaaaaaaggaacaatgaaatagaaaaaacttctagaccaatcagatttttttctttttatctctaccaaatacaaaaagtcgttgtcaaagattgtccatatcaataattttcaatatcttgcaatatcgcgtagctgtcacaaaccaacagcttgcccagaacc

SEQ ID NO: 61878 - DNA, 109 bp, Arabidopsis thaliana landsberg
tctaacggctcctagagtttagcgttagagctttatagtttagcacattagtggtttagggtttagagattacgattcagggtttagggtaatgttctagggtctccgg

SEQ ID NO: 61879 - DNA, 317 bp, Arabidopsis thaliana landsberg
aggtggaaattgtggtgggatggatgaagaagagctgggaccattttaaaatgttagattatggagaaagtactttcaatttatttttaaaaatgtaaatgaattatctcatttgaagttccttaagtacttatacttgtcttaatttcatacctttgacaagttccgagaagtcattctattggatgaaatgctatagtttaacaatgggtaactcttaaacagaaatgaatttatactatgctgctgcaatttacattattctgttctgataacgtgatacattatttgttgtcgaatgtatttaaatgatatta

SEQ ID NO: 61880 - DNA, 1234 bp, Arabidopsis thaliana landsberg
catgcagaggaaaaagttgttgtattcatgaaaaatccatcaaaatgtgtttatatcaatcacagctgttggtgataagatggttggaatctaccatacacaattatagaaaataatataaattttaaatggaaatgtaaaatctctgtagtaaaacttatgaaactgagtttataaagtccaaagggtgaatctgaaaaatctcactctccctctataaccaaaatttttcgatttacagattaaaaaaaaaaactcaaattatctgtttaaccaataaataggttaaccaaagaggcaagagaaacaaatggcggagaaagcgaagaagaagaaaaatggaggaggaggaaatcagagaatagcgttttacaagcttttcacgtttgcagatcggtacgacatcgttttaatggtcatcgggaccctctccgccatggccaacggcttaactcagccgtttatgtcaatactcatggggcagctcattaacgtttttggtttctctgatcatgatcacgtgtttaaagaagtctccaaggttaggacttcaaattagtttttactgttggtaaaatgttacgattcttgttagttgttaatcactgatatcattttaactgaaattagaggcttaaagcagctccatcgttaaaaacgatgagaatttttccaaaaaaacaaaaatattataatttcttcttaattgtattttaatagtttaatcaatggttacatgacatgtgtcattcaatggttaatttaagaaagggtctctttctcttcaattattactttttattaatagaatttggtgagatacattcctccatcccaccaatggaggtgtcctacacctaattactgttggtttgtgtagtatatgcgaaatcactaatatatttttatgttttagtttaaatgtaaatcatcaggttcaccaaaatttgtcttctatattattgttcttttaaatttgtaaaacgtaatagtaaaattttctttttgttaattcatctttaaattgttttccatttgtttgatttatatatttacttatactcattagtcagtgcatgcatgaaacaaatgttacggtttatatcgatttaattcttaattaatttcaggttgctgtgaagtttctttatcttgcagcctacgccggtgttgtgtcctttctgcgtaagccacaaactatgtttttcttctttttcatccttacgctaactta

SEQ ID NO: 61881 - DNA, 630 bp, Arabidopsis thaliana landsberg
  unsure (1)..(630): unsure at all n locations
tttttaaantcgtganttctcgtggataccttttttggtcgaggttcttgatattgtacatatataatattatagtataacgttaactagttataaattaacatttaatcatgcagctctaaatttttaaatagtgattctcgtgaatacttttttgtcgagttcttgatattgtacatatcaatagagtataaccagttataaattaacatttaatcatgcagctctaaatttttaaaccgtttatttccggtctccactttgtacatgtaaggttaagaatatttgttctccaaacgtttactagaatattgaaaacctaatagattggatctcgcacaacgtatccaatctattttatcaaaaactagctattgataattttccaagaaagttcatactattatgatcaaagtggtgaaggcttaaaattaataatgcttcgaatcgcgtctacttctgcatctacgaaggcattgaaccttatgtgcttgaattattgtatatatatgttggtgatttggccatgacttggaaccactcttagccattcgcacctttaaaaccgatttcagtatgtgttttcacgtaaagatcttgaaaattgaaacctctactaatttgttagaa

SEQ ID NO: 61882 - DNA, 452 bp, Arabidopsis thaliana landsberg
accacaaaaaaacaatcaacccaatacagatcttcacaacccataaacttggttgaaacacgacaggcaaacaccgataaggccaagaacacgcttgcactatgagagactccagaaaaacaggagggctaaagctatccctattcaacaaccgccggttttggatcaaccatgacgacaaacgccttgaagtcccaaacaagaggatcgagcattagctaaacaccccacagatgcggacaacccaaattatggactgggagtccaacctatcaacgaacgatcaataaataaaggacatatgggacaacaatccctataaaaaagactatgaacgtcccaaataaaacatcatcgaaggttgaccaacctagcacctactgcttcagacctgatatcacggataatgtacgaatagactctcctagatcgaacctcgaagcatagttcaa

SEQ ID NO: 61883 - DNA, 469 bp, Arabidopsis thaliana landsberg
tgttgacccacaaatgaagaattataacaatttagaaaagccggcccaacaagatccacaagagctaaacaaaatccggcccaacaataagtccaaactttaaaagctctcccgcacaattttcgagcatcccgctctcgttttcaggtacttccctctctgagctagggttttaattcgacgtctctcttttgtctctgtatcgattttctcgccgcgaatttcgaataggttcttcaccataagcttgagatcttatttctctactgttctttgcttcttctctatcggtaaattatcttctttgatttcgacgacggatctggaaattctgaaattttgtgaagctcgtttctttttgtttggtttcagtagatatggctggtaaaggtgggaaagggcttctagctgcgaagacgacggcagcagctgcaaacaaagacagcgttaagaaggaatccatctctcg

SEQ ID NO: 61884 - DNA, 216 bp, Arabidopsis thaliana landsberg
acacgcccagggaacaagaacaggcgaacgggcagcgggaacaccccatggctccagagcagagagaaccaaacaagccccaaagccacccacctgaacaagcaggccacgaggaaagaaggcgccggacatgagaacaagagcctacagccccggacagcgaaccccccacaaagaggcgagccgccacgaaggagacaaggccaaaacacccag

SEQ ID NO: 61885 - DNA, 411 bp, Arabidopsis thaliana landsberg
ctggatctgggggtcacccgctcggactgcacctactttggttgcacgtctggcgcggccgcttctaccggctcgacgcccatctcgaccggttcgccgcgagcatggcccggctgcggctcgaccccgggtgcagccgcgcccagatcgaggcgatcttgcacgggtgcgtccgccgggccgggttgcgggaggcgtacgtgtcgatgacctgcacgcgcggccggatggcgccgggcagccgtgacctgcgcaccgcgcggagccggttctactgctacgcggtgccgttcatctggatcagcagcccggaccgccagcaggccggcgcgagcatgtgggtcagccaggtcgtccgcatcccgtcgcagagcgtggacccgtcggtcaagaactaccactggctggacc

SEQ ID NO: 61886 - DNA, 466 bp, Arabidopsis thaliana landsberg
  unsure (1)..(466): unsure at all n locations
tcaccaccaggactttcaaataatatcctggcaaagactttgatggatgaaattcttttcctcaactaggcacttccttattacgccccatgcaacttctgctagcaagtactgaaacttcagcaattccggggtagaactcaagggannnnnnnnnnnnnnnnnnnnnnnnnnnnnnnnnnnnnnnnnnnnnnnnnnaccccctgcggaactcttcactacgtctgtaatggacacctcctcttccttcagcaacttgaacaataaaaagaaaaaatggtgcaggatctgaaagctttgaaggacagagctcaaatggacctgccaaaatcagagaaacaaaaagatataagcaatataagaacagttgcaagtcagagatctacctcccaggagaaaagtgtagacactcatgatttaaaaaaaaactgaacctcacaaatagtttgtgagcctagacttccag

SEQ ID NO: 61887 - DNA, 617 bp, Arabidopsis thaliana landsberg
  unsure (1)..(617): unsure at all n locations
gtatttacgaatttagtcgaccaatctaattaaccctgagttaaaaaatgttatgagaaaaagaatactgggccctgaattataacttttgggcctatgtagcccgtttccaaaggcccataaatcattattttacaaacaagaacaacaacaggtaaagaaatagacttggtggaaaaaaagcaacaaaacccagagttcttcataaaccctactttcttcttctccttctccttccttcctcttcagtagaatagttgaataccatagaatacaatgtctctgagttaaaccatgaggctcattctattcacttttaacttttttcctgaaaatgttctgttctcttcgcaattttcttcacgttaatcgcagattccctcgccatgtaagcccttcttcttcttccctctctcaaatccaatcacctctctgtttccctgtctcttctccttctcaatcttcctttatctcttgccctttcgtttggttcactagttttctctgtatcatacgataccctntcgttaccaaaagcggtacttctacttattccgaagattttgatagagattggatccgaaagttgttcacaatgatctatgggatgatcctgg

SEQ ID NO: 61888 - DNA, 590 bp, Arabidopsis thaliana landsberg
gtgccttcctgttctcaccaggtagagacaacaaaacgtcaacaaaatccatgtctccgtttttattttcatcttccagttttgcccttctgtgctcgtcgatgatcttagtgtgaaactcgtcaacacgcttctccacgtccctcatttctttctcgcatccggacggatccacccatctccaaaatggcaagtaatctcctaggtaaattacacccaacagccaaaacaatttgtgagttatgtgcaaaaattcttgggcttcttttgggctaactagagatccaggcccaaagaattgtttccctagtagcatcctagtcacattgttcatagagaaagcacccaatacttccttaagatttatcggctttccggtttcggaccgtttgaagacatctcgtattagataccgagctttctcagcccgttgggttgtaaaagattcaagccttttggttgtaagtaggtgttccatgcatatcctcctcattcttttccaatgcgggcccattggcgctaatgcaacgtccccacatccatacgctaggtggactgcggcgagtgttttgggctcgatgaaaaacatc

SEQ ID NO: 61889 - DNA, 609 bp, Arabidopsis thaliana landsberg
tatgtaagatttatatataaaattataggttaagatacatcaccctgtaaagtaagattcaagttttagcttttgctttgattcaatggtagtttgttaatttcctttatttgggggctctattctcatgggtgataattgctttactaattagtaaccactttgtcttcatttaagaaaatgatatgttgcataatcattcaaataaataaacttgaggcttccgttaccagtcttaaacgagttcaatacacatgaccctacacttctacagttgttaacctcacactactgtattcttacttttaatgagattattttgtgtgtttagactttagagttacactaacggtttcttgttagatttagctgacgtgcctttatgaatatatatagagttaaattttaatattttaagagtagtattacttcattaaaagcttagttgtaaaattactaaagatttttatatattataaactattttttcctggcaaacttatattataaaatttgttgagcgattgtgtgattcttcatccacaattagattaaaaaaaatcgcacaaagttatacaagaaaacatataattttacaattaataatga

SEQ ID NO: 61890 - DNA, 571 bp, Arabidopsis thaliana landsberg
  unsure (1)..(571): unsure at all n locations
nnnnnnnnnnnnnnnnnnnnnnnnnnnnnnnnnnnnnnnnnnnnnnnnnnnnnnnnnnnnnnnnnnnnnnnnnnnnnnnnnnnnnnnnnnnnnnnnnnnnnnnnnnnnnnnnnnnnnnnnnnnnnnnnnnnnnnnnnnnnnnnnnnnnnnnnnnnnnnnnnnnnnnnnnnnnnnnnnnnnnnnnnnnnnnnnnnnnnnnnnnnnnnnnnnnnnnnnnnnnnnnnnnnnnnnnnnnnnnnnnnnnnnnnnnnnnnnnnnnnnnnnnnnnnnnnnnnnnnnnnnnnnnnnnnnnnnnnnnnnnnnnnnnnnnnnnnnnnnnnnnnnnnnnnnnnnnnnnnnnnnnnnnnnnnnnnnnnnnnnnnnnnnnnnnnnnnnnnnnnnnnnnnnnnnnnnnnnnnnnnnnnnnnnnnnnnnnnnnnnnnnttattctgtctaggcaatatttctgaaatgataccctcatcttccatgttttccagctaccttaatcacctacctttattttacctttcttgtgaaattcatactcccaatgaatatcttgggttctaactctgaaccaccccttttc

SEQ ID NO: 61891 - DNA, 1483 bp, Arabidopsis thaliana landsberg
aaccctaggaaacctaaaccctaaattgggtttgcaaaatcttttgttttaaagataagttcccaagttgtcatggtacggagttataaagcgataacatttatctaaaaactccttttacaacataagaacgtctaatctcaatctatctcatctggttgactgaatccagttattgtatatttcagagaattgtaggagatcaagagttgggtttcagtctctggctggacacaagaccctctcgctgagccatttcatagagaccaatgctcataagaaccttagcgtcagctgttttgcgccagagctctctatatgggatgagtcggactttgatgaactcaccgtgttcacgaagtcctgtctctttgccttgcaactgtctaattgtttccttttcgacttgtcctctgtaaagaaacacgctcatctcttcatcacagcctccctgaaccagagataccaagagaaacaattcatcagattccaaacacgttctacgactatgcgataaagaaagttactgagtttctgcagcctgttacatagactaatatgagagttgtatcgcaagaacagcattcggatcaagtaaaataaggacttacaggagaagggaagatccggtaaccagtagatggatcaaggaaagccgtgagatcaaccatatcttcttttttcagttttataccaatctccttttcgacctgatatatccacgaagcaaaagtcatgtaacttgcgcaaaacacaagtccagaaagtttgtcagactctggtgcttcaacttgtctacaattctaggttcctttggtaaaacaacaaaaaagtccaaagcatattgcaggccatttcatttgcagtcacaatatttaaactcaacaacttctatactattttcatcttaaacattcaaattctttcacaaagttgtcaagtacctcgcgaactgcagtaccaacaaagtcacctttatcatcatccaacattccagcaggtaactccagaacaatcttcccagtaggaacccgaaccttccaaaacgacccgtataatatgatctttgttataaaatagaacaacacagaacattaatagagatacctgttcagtgagaaccgcataagtttcaccatctgactccaagagaataagcacagctacagctggtcctcgtgcaaatacaatacctggaacctaatgacgttttagcttacatatggcaagcaaaactaacatatacaatgaccacaacgagcgagatgatactaattttgaagatgattagataccttttgaccagtttccttgtcgaaaatatccgctttgaatttgagaaatccaattcttttgccaaacatatcaactccctaaaaatcataaactaatcaagaaagctccaagattctatatatgttctgatcactgatcataatcatcatcagataattcataggatcaagagtatctcaatgtgctt

SEQ ID NO: 61892 - DNA, 555 bp, Arabidopsis thaliana landsberg
ggcgatcttgtcgccgttgcggatcagaggcaggtcggggtagacaccaccgaactccatcgttccctcgaccatgccgtacatgtccatgggggcgtggtgctggccagcggcgctgaacaagtagtcgcccacaccccactgtgtgtcgtatacccggtagttctcggggtcgggttcacgctggtcctcggtcatgccgactcctcaaatcctgtcgtagctagcggacggcatgctgtggcacgccactatctgacacgccaccagcgccgcatcgtaccaggccggcgcctccaccaccacccggtgccagtcctgctcgacgaccccgacacgcatcagatcgcgggtgctgaaagctatgtcgaaagagaaggtcatcggcgtctcgtgcccgcgcagaagtgaacacccccggtccaccacgggaaccgctgaccacacagatggcatatgtagctgatcacaggccctgcttccgggcatagcgcgacagggccagggatcccgccatgacggcggtacagctaatggccgtcagcagcgcaatgc

SEQ ID NO: 61893 - DNA, 1042 bp, Arabidopsis thaliana landsberg
ccacaacaacttataaactcttcctcatctcctaagtgattcaatggaagctcctcacattcacaagaatcctcttgattttccatgtctggaaacaaacctatctaaactacaaaaaggtacaaactttcttaacttagcaacacaccaatgaaacccatatcggatctgcaaatttcatgaaaccaaaaccgaataaaaatgagataaagctaattcttttagatatcatctaatctcaattataccatatactgagagagagaggaaagggaacaaaaaaaatgaactttgcattacagatcaacaaaacagctaagcttgatgaagttacataaacagatcagcataaatcagagaacaaatcatttgaaagtacacagaagataacaaaagaagcagctcgatttgttgacccactaaacaccaaccagaccctcaattattacatatttcaaggaagaaaaaaattctaatttatttaagtagcagaaatcaccagagattttgtaataaaacgagatcggttgaaattaaagtatcattaagcaagaacagaaatccagaagctttcttaccagtggaaggagatttacacttggaaactaaaattaagaagaaaactctaagctataataacatcttcaaaatctctgtttttttccaggaaaaaaaagaaaataaacgcattgttttggatgtttctactgagtttttgtggagagaagaagaagaagaagaagaatcatcggttcttctggttttgctctctcttcgaatggcgtaagagaaaagttttacttttttttgttttgtttctttattctctcttttttatttattaatttattttatttttctgagtttttggcttcactttgctgtcattctcgtactgtacaatgttttatattttcccacagtgaaataattattttcacattaataatcatcaagtatttaatttaaaatatatagtttaaataattgaaactgtaataatggaattggattagaatctgagcatgaagaattatagctt

SEQ ID NO: 61894 - DNA, 417 bp, Arabidopsis thaliana landsberg
  unsure (1)..(417): unsure at all n locations
nnnnnnnnnnnnnnnnnnnnnnnnnnnnnnnnnnnnnnnnnnnnnnnnnnnnnnnnnnnnnnnnnnnnnnnnnnnnnnnnnnnnnnnnnnnnnnnnnnnnnnnnnnnnnnnnnnnnnnnnnnnnnnnnnnnnnnnnnnnnnnnnnnnnnnnnnnnnnnnnnnnnnnnnnnnnnnnnnnnnnnnaatccgggggttcaagagggaaacagccacaggagaaccaggaaaccggagagcttttccccaccttcttccgccccaactcattacgaaagcctggtcnnnnnnnnnnnnnnnnnnnnnnnnnnnnnnnnnnnnnnnnnnnnnnnnnnnnnnnnnnnnnnnnnnnnnnnnnnnnnnnnnnnnnnnnnnnnnnnnnnnnnnnnnnnnnnnnnnnnnnnnnnnnnnnnnnnnnnn

SEQ ID NO: 61895 - DNA, 1295 bp, Arabidopsis thaliana landsberg
tttcatctaacaagttctctggctatcaaataccgaaacacgaaattatgaggcgtccattcgacaatgctctttctggatctccctgagttaagtttctttatggtttttttcattgcttccgggagacattcttgaatcatctccatcaatgctgcttgacctaaacctgagtctttgctaaaagactcaatgatctttggtaagactagtttctggtctttctttactccaaacgttgcgcggatgtactcttcctttgcggtttctagctcttggtatattcccttgggcgtaaaaacacgaatctaaagccaaagaaaacacattcaagatctctcattcttcaaagaagatgacaaaagtgtaagcgttctctgattaccgcagggtcagaatggttgcctgaacaaagtgcaaagtataagagaggctcggaatgctcgagggaatattcttgatgttcatctccggttctgaattttttaggtatgagtaataacttcagccactacaacataaacagaggaagctttagacatagtcacatagaccatttgtatttttgagatactttagaagtcagccctacctggctaggacgaggcatcttgatacgaagaatataactttgtattgcttctaagcttaccatgcgacctcctatcttgtaagctggctgaaaaatgttaagcagagaaaaaaaaaaaaggttttattatcattcaaaaatgttaatgttttcaaccaatgtttttgaagcaaaccaagaaaaaagttgatatcattaccttggagagtagtaaaaatcgcttcccattgttctgtggaatcccatttgccagaaatgtctgcaatggtgaaaaccaattataagttaagagatgacagtaaaaagaagacaaaggttagatcaaagaaccagagagaaaaccgcgtacatgcatcacaagagcgttatgtacgttaatccagaacgccagtttctcttgatgagtcagttttctcggatcaacactttccagttgcttaagaagtaagctgtataagtataaaccaatgactactatcagcacaagaattgaattgaaagaacaaaggaaactttggaaagctgatatttaaaggctgacctgaagtttcgattcatcaggtcaaggtcgcgtcttttacggtttcgatgaatgtgtgacacttcgatcattgagctataaggtccgctgaattcaaactggtcatcgaaagacgagttttttctgaagcttggactccacatatcatactggtcttgtggt

SEQ ID NO: 61896 - DNA, 516 bp, Arabidopsis thaliana landsberg
agggaaatgtgatcccttaattgctgctcttatggaggtcctcattctgtctcaccatgcagcttctccaggactatggcctatctctcctcaattggatatagtcagctgattataaattacaggtttacttatgagcatgtatacagctctgaattccactagttcatcaaccttctggagatcctaacttggtttttggtaatccatttgaattgaaggggttcattaggatatggggaagatgctttgcagtctctacctggcaaagttggatcgcaggtattttatacatgcgcatgtaatgtcatttttctttctttcggacttacattctgcttaattgataagcttttctgacgcaggacgtgaaagattgtctcttggctgtagatcatgccattgaaatgggaattgccgacccgtctagaataaccgtgctaggtggttctcatggtgggtatctaccactcacttgattggccagggtcctaccggaaaatacctctcaaggat

SEQ ID NO: 61897 - DNA, 464 bp, Arabidopsis thaliana landsberg
cgggggccagccgaaaggccaccggcgaaaagacagccgtttacgtcatgaaaccggccacaaaaactcgggggggggggaaaacagaagagaccacgaacacagcaccaaaaaccgctgggcctaatacgcgcgcgagaaaacggggcccacgagaacacgcaagaacccaaccaagggaaagccaaaaccaccaacgaaaacgggaaaaaaacgacacaagacttgggaagaacgctaccaaaagccagaaccaaagacaaacgaggggagaagacgaaactgactgcgcccaaacgcaaacgaaccagcccccacaccaaccgtccgcggggaccccacaaaaaacccaaaggggcgaaccaaaggccaaaacccgagggccccagacccaaaggcacactccaagggcgccacggaaccaaacaaaccaaaccagaggattgaaaaacaaacccgaaccc

SEQ ID NO: 61898 - DNA, 104 bp, Arabidopsis thaliana landsberg
aacgcacacaacctgtggggagaccgtttcagacctagggagcttactcaatgatacacctgggacttcgtgattagagacgactgacccgctcaccacgcatg

SEQ ID NO: 61899 - DNA, 144 bp, Arabidopsis thaliana landsberg
ttcctgcaccccgggggatccactggggggagagcttccgccaccgcggtggtgcttcaatccagccctatagagagccgtattacacatgactggccgacgcattacaacgtcgcgactgaaaaaaccatggggccacccaac

SEQ ID NO: 61900 - DNA, 1200 bp, Arabidopsis thaliana landsberg
aacaagctcttttggtagttaatagcagaacacgcgttgatgtatcctggcaggatggtacaatagaatgtagacgggaagcgataacattgattccaattgagactcctggtgatcatgaatttgtctctgagcagtatgtggtagagaagacctctgatgatggtgataatacaactgaacctagacgtactggcgttgtgaaaaatgtcaatgcaaaagatcgtactgcttctgtgaggtggctaaatccacttcgaagggcagaagaaccccgtgagtttgaaaaggaagaaattgtcagtgtgtatgagctagagggccatccagattatgactactgttatggggatgttgttgttcgcttatcacctattgccgttgcgttaccagcatcttctcctggaaactctttagaggaggcaacacagcaagacaatggataccaagattcagaatcccatcaagaagctaaaatccttgtggataaggaagaaaacgagcctagtacggacctttcaaagctctcatgggttggaaatattactggcctcaaggatggtgatattgaagtaacatgggccgatggaacaatatcaacggtacgtcaacctcaactagtctttttcacttacaatcccttgtctgatctcattattattgcaacatctacggaaattttcagtgttttaatagtgttttttcgggatgctcaatgtatgtcccagacctatttggagttaggtttgtttatgttcttgctgctctgctttttattttatagatcagggagttaggggagaggccaaactataaatgttgtcccctcctagatggtttggcctaaaagaccgttgtttcataagttggaggagattttaatacctatcttaagaaataacttggagagcagttgttttttcattttaatgacctgagagatatatgcaatttggttcgttatgagactgtctatgcaagaaacagttagaaatctcttgaatctgatggcactttacctgtgaacaaggcttgttattcattaattttaatttataattgtctcttcctcctaggttggccctcatgcagtttatgtagttggacgcgatgatgatgatgaatcagttgctggagaaagtgaaacaagtgatgctgctagttgggaaactttaaacgatgatgataggggtgctcctg

SEQ ID NO: 61901 - DNA, 141 bp, Arabidopsis thaliana landsberg
ggacacgaacaaagcacacgggacacacaacgcgcggggacgggaacggcgcggaatgggccgcgccagacggggccagggcagagcaccgcacagagaacaggggggccgccacgccggccacgaaagaggggaccgagc

SEQ ID NO: 61902 - DNA, 1779 bp, Arabidopsis thaliana landsberg
  unsure (1)..(1779): unsure at all n locations
cttgctaatgtggtttattttgagtccattcttcttcaagtcgccattttttagatgtggatccatattttgctgttactctggatatagaagcgtattgatgtttcatttcttttcattctaaggacacctgaagaagttttggctgcaagaggtgtcaagccaactctgtctcctaatctgaatactcttgaattnnnnnnnnnnnnnnnnnnnnnnnnnnnnnnntgtttgtgttttcaatcactgaatccatttcacatgaacttagaatttgtattgtaacaggcttccggagtgaagcgtcttctgttttgcggtgtgggttgccaagtgcaaggtatgggctcaacatacttttttgtggacgtatatttcaagtttctccatatcgtgactctcatagtattgtaatgcagagtgatttcttatactgcagcattaagatcagtggagcagcatctgaatctggaaaagttgtatgtactaggcaccaattgtggtattttcctcatcctatctagatttgttttttctccagaactttcacaactagttcttgtgttgtacttttgaacattccatgttgtatatgttatttcggagtcttgtatgcttaggtctagaaatgcttatacatttttaaacaagtaaaaagaacatctttgattaatagtggacaacggaacacgagatggactagacaagtttctgaaagcagctagtaaagagccagagactgttctccattatgaatttatgcaagattacaaggttagcattaatacaaaaccatcacttatctgtgcattttctttggtgatgccaatcttgttcaatttctcttataggtccaactcaaacacttggatggacacattgaagaggtaaattcgcttaaaatactgtgttgctctgcaattgcagctgaaagccgtttttaaaaaactttttttggctaaagcaggttccctatttctctctacctgcaaacgatttagtagatgtcatagctccatcgtgttacaggtaatacaagtctctgcattgtctctataccttgaaatagataacctgtcggaaatttttaaaacttgtctacaattacaaaccctatcttttttattctgcagctgctttgattacacaaatgcattaacggtgagtgtttctctagcaattaagatgtcttttcacttaattttgattctgccaatttcaaacatttcctgatatgtatgagcttgtttatctaggatttggttatcggttacatgggtgttccgaagtattcaggtctgaacatgactgcccatccacagtatattacagtgaggtcaatatttctacgtattttgacatggaccatataggttctcgtggttggataaaattagttttgtttatgccttaaaccacagaaatgaacgtgggaaagaaatgctcagcttggtagaaaacccttttggagatcactgccaacaatcagcagcgtaaagtttctaacatttatatttgttgttatatttaagactttaagagtccacttaacaaataacatgaacaaacacaccttttgttgttgtttcagggtgatcggcgaccttttgtgacagaaactgttaaggcagacgatgctgctaagtttggtatgttttcaaacgtattcgaaactcttttgtttcttgcatcgtctctgcttaaagacattcagtttcaagcaaagctagatgccaaaaagaaagttctcagcaaatgcatgcaacggacattgtgcta

SEQ ID NO: 61903 - DNA, 1220 bp, Arabidopsis thaliana landsberg
tttctctctcgccaacttggccattcgtaaggcccacgaggtgtaagtggttgtgttgggcacatgctcaacatgagtatgtgagtttttgctggtgctacctactttgctcctggtataatctaatgtttttaatctaccatattattatataatcttttctgttcttcacacacatgttttttcaagttatatccatgttacaaaaataattcaatttttcttaacatataacatgtttagtattttattaaaaacaatgtttcatgcttaatcaaagagattattatgctcaagagtcgagagtaattataaaaatactttgttcgatttgatgattttgcttttctttttggttggcattcggcaatgtctatattattttttcttcactttctactttgtagcattcaactttgtgttagttttattgatgatcattgtctagtaaggcccactgccgttatcacaaaacccaacatagaataaggaatatgtgttaccggaaatattcgcattagccgccggttaaaagatgctaaacactccggtggccggagaaattttattgacaatgcgcctaagtgtgtgcagacattggatttgccacgctagtgacagccagaaaaagacccaaaacgctacaaatttgttagagagaaaataaataacccaaaaaacttttttgtgtcgcttctgctctatgaatgaaataagaaagaaagagaaaatagcctatttggattcctgttattatgtctaaatgggacttttcctggctttaaatagaggagagcagagaagcaatgcgtttgctttcttccagtcatctttaggttttgttgttcttcaatttgctcgcaggaaaatgcaaccttgccattaatggacgcggtgctcttgtcttctgttcgaatccacggacacatacgaatcctgcaatcataattgttagatgtttaccagtttctatcacagatcagaacagtattggtcctaagtgtaaagtgtgtgtgtatatgtttaacgtattgatcagaacaaagcaatagattttccggatttctctgggtcgaaagttaacgtttacctttccaaaagcagaactgtatctgctccgttgaaagacctgcacaaattcagcaaaacattctaagatcttttttggcaaagagaaggtgaagctttcttgtgtattggacggtaagctaaatgtgttt

SEQ ID NO: 61904 - DNA, 459 bp, Arabidopsis thaliana landsberg
tctaggggacagcgaatcggcctggcggtcgagggtgaggtagttcaggcccacgtcgttgaggaaggtcagccgctcgcggatctccttgacgatcttcaccgcgatctcgccgcgcctgccggtgagcgtgagctcgccgaagaacgccagcgcatcgtcgatggagcgatgggtaatgctgggcagcgtctggtcggcgacgaacacgttgcgggcggagcgattcaatcgttggccatcacactcggggcagggcgagtcgctgatgtacttggacagctcctcgcgcacggcactggattcggtttccttgtagcgccgctccaggttcggcaggatgccttcgaacggatgctcgcgagtgaccttgccgccgcgttcggtgagatagcggaaggcaatcttctgctttccgctaccgtgcagaaccgccttttggacgtctgggggaagctg

SEQ ID NO: 61905 - DNA, 881 bp, Arabidopsis thaliana landsberg
aacctgcaggatccattcatgattttggagatctgtttatcaaatctcaggttattaaatctccacttctcgtttaattctgttcttagcccaagttggtttaaaaatctagagttttgatcgcaatttgtgatttttgatttcagatcagaagcttctacgagttgattatatgctgtgtttgcagatctgggtttggttatatttctgagtaaatctctcacccaacaccatgtgtgatcaaagaccaaatcttttagggtctctcgtgttgttgggtttcttcatcttctttgtaaatggagaagaatgctctaattcgagctcattgattgggcatgagtctgagttcaagatgttgcaacatcagcttcgtggggttttcactgttgtcgatgattgttcgtttagggtttctcgttttgatatgctctctggttccgaggttcattggtggggtgctatgtcttctgattttgataatatgactaatgatggctttgttatctctgatcagaagcttaatcaaacattcaaaaactcatcttttattgttcggttgttgggtaatgttacttgggataagttaggtgtggcttcggtttgggacttacctactgcttctgattttgggcatgttctactctctaatgcgacggaatcagatacttcaaaagctgaatctcctccttcagagagcaatgatgttgctccagggaaatcgaataacagtgagccttttaaggctcctactatgtttgataattgtaagaaactttcggataagcataggcttaggtggagcttgaatgcacagaaaggttatgttgatattggtctagaggctactactggattattgaactacatggcgtttgggt

SEQ ID NO: 61906 - DNA, 837 bp, Arabidopsis thaliana landsberg
gatcatcatgtaattgctttttgccttcaatagtacaatgctactattttattttgtaattctattctatcatgttaggtatgggaatctaatgcaggataaagtcttttgcaagagaatttctttcattggcaaaatttagcagctttcaatcaattgcttctatattgaccatgtcatgatcataatcggagcaactgtggctgcactattgagtctcatcaattctcttgtttatgctcccttgttttttttttttttttggcaacactagcaattatataggtctaacttttgttaagcctcaaacttcattcctaaatgatatttacaatttagcaaaaaataataatatacagtggtatatatatcatgaaaatcattattgaaaaatgaaataaaactaaaatatataaatacaaaacgaagactggttttaaaaaaatgggaacaaataaagacaaagtaaatcagtgtcgcttaaagaagttaactttttttttttttttttttttgtaaaaactgatagatacagattgataaatgataaatttgcattaacatatgtaagtaacccaatttttttttgtgtgtgtgttaaattaccataatttgtactcgaaatagttcaacaaaataatcatcataatataaaatcattacttttaaaaaatcacattagtcaatttaaatcttaactcataagcgaaaatcacattcgcgagattaaagttttctagttatcagaaaaaaacgatacctttctcagattgaaatcgaaagcacggatctttcttcatacctcaaacctgcaggatccattcatgatgtggagat

SEQ ID NO: 61907 - DNA, 405 bp, Arabidopsis thaliana landsberg
  unsure (1)..(405): unsure at all n locations
cgcagtcaggggagcaatgggtataatggactcgatataataagggcgagaagtatgaaaagtaggtgcgcaagcaacgacgggagtcgcgggaaacccggcctctgcggcctgcatgcgccctgcggagtgcgggagacagaattcaaattttcaaatgaaaggtcatcctgagaaactggtcattcgtagccaaaatatgagatcgggaatcgggagcactgccgtgttcgtacgagcttgtacttgcaatgggaagctggcattaccctcttgtgcaagccaccattgcggcacgtggaatatacttgagccacattaaatgcaccatcatatcgtatctgagaggggtcgcatgcgcaaacactgacagtnnnnnnnnnnnnnnnnnnnngaagcgtacgg

SEQ ID NO: 61908 - DNA, 730 bp, Arabidopsis thaliana landsberg
  unsure (1)..(730): unsure at all n locations
ccgattggttagtaatttattaatatgacatgagatgtagactacatcatgtaaacatggagaagatgttatgttcctgcctttttgctgactaattatattatataaaatattaagtccttaaataatcgtataatattttataattaacgagtttcgtgtttaataaaaatagaaataaagactagtctatcatataattttctttaatgtgatgtgattagtctagttagaccggtaccttcataattcgaaaaggattttatttgacttagttggtgtatctttatttcaattttgacatatcttcatttatttattttcattaaaatcaaaataacttaataaatacattattatatagggttgactattaagataaacctaaaagtacttgaaatgtataactttgttttacaatttcttttaaaaccatatattaaatttatggatccaattatttacttgatattttacaagttaaaaattttttattaaattttgaaaagattttattttgaattttaaggtatttgagtggtttaagaaaaaataaaattgggatgctaaattaggctaattaaattgaacctaatggactggaataaccaagaatttcaaactgcatccgaatttgaattaaaaacttttaattttattttacaaattaaagcgatagataatcaaaaatataagttcattcaattacaaaccatanaaaatactatta

SEQ ID NO: 61909 - DNA, 407 bp, Arabidopsis thaliana landsberg
gggagaatgcctatactggaactgtactctttccagcatttgattcaagagacttgcgcaggagccttctcagttgcttctgtctcttctcttggggactcatcatcatgttgtggtttcatctttggcctaaatgacctggggctgttcaaaacagctgtatgactccaattctcagactcctgtatttcatctacagcccagtttggtgttgccaagtctccaggactgtcgatgagctgatgttgctccttgatcgaaaacaaaacccctcacatttttatcagcaggctgtatatgatcctgagtctcattatggttttcatcagagctgtcatgatggttattcttacattcctcttcctattcaaggtcgcctaggttttttgaagagccgcgttttactt

SEQ ID NO: 61910 - DNA, 1298 bp, Arabidopsis thaliana landsberg
  unsure (1)..(1298): unsure at all n locations
tttccggtttccattctccgtttcactgcgtgcaactgcgttgttcacatggttaacagaatccataacttcatcggcgactgccacatcttgcgtgccttctttggtttcttctacacctgaagtgtcaatatccgttggcagaatcacagttggctctaacacagttgcagctattggctcggtgatcatgtgcggtgggggaaactcaacgggatggcatccaggccaaaccgttcttggtacaaaatcggacacattgagctgccatgggaactgattgggatgaaaaggaccgcttgttacagggtaagtacttgtggggactgattgactgtaaggaggagggtaaacaaaggacattggctgcatcaagtttggagttgtcggaggtgaagggtaaggaggaggaggtccgtgatgaagagtcatgttcactggccacgacggtccaatgttcatgcctattggagtaggacgtataatacttggaggtgatgatgggttgaatggagcagctgacgcagatagcttcttgttaggcaacaatcctcgtgaggcatcgcctgagtccgtagtagaaattgacagttttgccttcagatcttcggaatcagcagctaattgatctatcacttgttgctctctggtcgaatgaatcatatctgttacaccatcgtttatcaattcaacttcgacttgttcttcaacctgaattccacccccagattcgtcgttttcatttatatgacttcctccgagtactccttcagatggttgtaactctactttgatctcttcttcgccttgggttatgttagattctgggtctgcagaaatttccttttttacctcttcctctaaccctgttatcatttgctcatcccttgtaagctccattgatgtaccctgttcagtttttttctccatctcatcatcctcttgctnnnnnnnnnnnnnnnnnnnnnnnnnncagacttgatacttagcaattgaaccaggtggtgccaatgctacttccttgtaggatggagattttccaagacttacaacagaatttttcgtgtggtaggcttcactttgcacagtactagacagagtaggtggctcaacagaagaagcatctgtcttcaacccatcttcttctgaagtttcaccagcagtcttagcgttaccagaagacggctgcgtcgatttaacccgatacgccaaggttttaactatcttcatgccaaatttggtgccttgagttgttaaaccaggagaatgatgatctgcatagcttgaatatgatgctg

SEQ ID NO: 61911 - DNA, 621 bp, Arabidopsis thaliana landsberg
  unsure (1)..(621): unsure at all n locations
ccaggcagagctgccgattttgaagacgcccctgccaaagtccccctcactccggctcttgttgttgaccccaaagatctataacgagaaagaattaaaagtggaccccttccaaacccatctaccttgggtgatctagagatgaatattgattcttagtggttgcatccactttaaatggagcttgtttcatcttattttcatactctatcaaactgactattttaaacctattcatttgctcgaggaggcttttaaaccttatatttaaacccagggaggacttttcattttgctttttgaaaactaagtatttgccttctaggcatttgcctcaaacatacgggtttgcaaagtccgtattttgttctaagattttatccatgtggttatgtgagaaaataggctggtcaaacctccaagcatactcttctctttctctttgactgtaaagccttaggattattccatatctattttttcatctagttcaccattaaagaatgatgttttaacatctatttgatgaatntctagttcatatatggccgaactgcaattaagaatctcatagaagggattctagtcacgagagaatatgtatcaaagaaatcaagacca

SEQ ID NO: 61912 - DNA, 716 bp, Arabidopsis thaliana landsberg
cgaatcctaaattttttcccgtgtgtgtatgtccaattagaaaattcattacagcttatctacaaacatacaaatcatatcattacctatgtgccactaagaagtcttcatatgaacttatgtctaactataaaaactgaaatttttatcatcttcattaattgtggaaaattagcaacaatttatcattgcgatagcttttaaatattaggctttcaaccccatcataatatgtattaggttgcattaccaaattgttaaataatcttgaaaaagaaaaataaaacgtagcatggtttacattattcatgttcaaaaataaagtgcgcatgtaacaaatatatatataggcactaaaacatataaccgaatgatattatcaaacattttccctctcccctttataaactcagatgtctaggaagtgggtacaatgataaaccacaccgagttacatcatgatgatgtcatcttcacacacacacatgcttaaaaaacgtcacaacctcaaatcccgactcattctttcaaagacggcgtcgtttgcacaaacgggttcttgctgtgtctacaacatcgtcaccattatcaccagtagacgactcagccttctctgccatttccctcacccccagtcgtctcgtcgccctttctctctttttcatttcaataagtctccccgcaaggtctctacacaagtccgttttctcattcgt

SEQ ID NO: 61913 - DNA, 584 bp, Arabidopsis thaliana landsberg
  unsure (1)..(584): unsure at all n locations
aatgcttggtcaggagagacgcgccctgcaccgtttttttggccgagtgcctgcccgtcctcgtggggcactcgcggtggannnnnnnnnnnnnnnnnnnnnnnnnnnnnnnnnnnnnnntcaatgcgcaacctctcgtactgctgttggacgttcttaacggcgcgatgcaccgaatgcccatcacatatcacaggtctctccaatgcaaagtggtctcactttgtcgaaatcataaggtaaaataaccggcagcactggatataactcaactaatgttgattataccatgcacactccaatgcgcgagtcaattctcacagagatagcattcatggccactggtgattttgtttattcgctccgtggtatctccctacacacagggggcggtgaagcgctgcgcatagcgcgagtgcactcgcgtcgcttcctgttcattactttgcccgacttcacaacagtgagtgtgctccgaaaaacattttcatgcgcgcagtgcaggtttctcactgatgattcgtcaggatgtctcccgccagacatacctgtgcatcaaatcatatcaccccaaatcacgcatt

SEQ ID NO: 61914 - DNA, 145 bp, Arabidopsis thaliana landsberg
ccaacaaaaccaacaaaaggggggttacagaaaacagcgaaggccagacacagggggccggcaaagagccagaggggagccaagagaacaaacaaaacaggcaggagaaagacaagaaggaatgcgacccaacaaaggacgagag

SEQ ID NO: 61915 - DNA, 1099 bp, Arabidopsis thaliana landsberg
tggtcgattttacttacgtatccgagatatatatccgacgactttctttttattttaggctagatgatgatagtactcctaagtttgagaataaaacagtgagataatgtatgagataagaagggaaaccaagtatatactaattcccatttgcaaaaacagtgactaaactttcggtccactcttccatggaaatgattgttgtatcttttgtggggttccttaaaaagaaaaggtctactctatctctacacattactagtcacctgcaagtgcatatcaactggtgaaaatcaatgaaatgtatgtatcagataattaaacaacttgcggataataagactaacaacgacaggacataagcaaacacacctgaccatggctctccttatcatctcaagtaactttactggtactttgaagttttctttaccacacatatagacttttttcaactgcagaatttatgtcaacaatagctacaggaataatgtgctttcgctttcatgataaatacgagtcgaataattgaaactttaaatggctgttgttatacttcacatcgttactagctacacaataatttaaaaccaaaaagaagaagtggggaagctacagtgtctgcaaaacaacatagaggagcaaaaaacaaatcattggatgagaaaggcccacaagatatgcttacacattaaaacgtgattcactttagtcaagtggaagctgatgcaagaagagaaatccatgtcactctctactttgtcaagtgtcattatcatcacctagaagaaccatcttctaacccttccaagtaaaaacttgaaacgtcattcactaacttctgttgctttctcagacctaaatacatcatcctttctagtgagtgatatacatacgaaagcaagagagatcatcatatgatctaatcatgctctttccccctttataccacatataataactacacaagttgccgtttttagtctactaaatgaccataagcatctttatcttaacaaagataacataaactaaccagagaagatgagcaaacatgtcatctcttaagtcatagatattaaccaagtttgtgaaaaac

SEQ ID NO: 61916 - DNA, 875 bp, Arabidopsis thaliana landsberg
catgtcaacaaaagcagactagggttgggttcttcatgcacaagaacagagaagtcgtcagcgtagaagaagagcacttcagcgttatctgagacagagtatatcttgaacaatgctattagcttactctctgaagccgagtccattaacttcatcagcattttcgcatgctccctaaaagcaaccagaccaaaccagtttagtcatgacagctaaaaatggaaatccaataataacatagagcaaggattagtgtagattagcttacataatctcatcttccgagtagccagtgtgatgtttcaaggtctcagtccaaaatggcgtcttcttaaggatatgacgcgcagcataaaccgctgatgcagccagcatcgatggacggtttaagacaactataggatactgcataagtcccagctcagccaagtagaacaccaatttctccatctcagcatcacatggaaccgcagctttaacgtatcgcgcaaggaacacataaggagttggaacagtgatgtaccattcaacttgtcctaagatcgatttctccatagccaaaacctgtttcctgttataggcattgtccgaaatacagacgaaatcattaacctcaggagcccaaatctcctcatacttgcaagctataagcatagcacctagtcccaacagctgaagctctcttctatgaaccattgtcaaagatagaaaccgatcaacgaggttaatggttaagtatagcgtctctggcatcaactcaaacttcctgtgaacatctacaagccaatctatcagaatcgatctcatcttctcgtttatctcaggttgtgatcctatatagtctttaatccctccttcctcttccacagtcctat

SEQ ID NO: 61917 - DNA, 551 bp, Arabidopsis thaliana landsberg
  unsure (1)..(551): unsure at all n locations
tttctttattaatgatatacatgcagcttcccgaatctatgaagcatagtcaagcggttttgtatctagaaacatatcaagttttggacttagaaatgagtcgtttacgcgaaattcaaagatggcaatcgtcggcttcagctaaagtgcggtgtatatccttcctcgtccaactcgttttatataaattcctgtnnnnnnnnnnnnnnnnnnatattctctgtctgtgcagttagctgctgacatgcagcggttttccagacctgaacggcggatcaatggtcccacagtcacacatctttggtgggttataactcttattttatgttttgtattagatccttggatgattaactttcctcgtgtatatagtgtaactgtgattttacttaatataggtcaatgctaaagttgcttgacgtcttggttcagctggatcatcttaaaaatgctaaagctagcattcctaatgatttctcttggttaagaggtgaaagatataatacttttatctttcctatctatattttctgcaaataggacactttgat

SEQ ID NO: 61918 - DNA, 506 bp, Arabidopsis thaliana landsberg
  unsure (1)..(506): unsure at all n locations
caggtaccggaccggaatttccgggtcgatccacgcgtccgataatccaacctcatancacacagcccaaccaacaccatgtttttgaaaaaccaagtccattctctcggccttcatactactatgctctttctcactgggggcagtggtcgtatgcccaagaggaggcaatagcaaaatccgaatgtgaagcattaggggaaccagagaaaagagaaacacttgaaatcatcattggtggaggtggtttacctgctccttttccctctccccctacatattgcccacctccttcaccaaaaccactgagccggttggagaaagcaaaacgtgttcttctcaaattcaaaaccacaatcgacgaccccaattgttacacggaaaactggagccaggacacaaacgccgtgtaaattaaatggggaccaatgcgcccattccccagacgatcaagcatgagcagtagctggacttggacctaacggagcaaaacttgccactaaaaa

SEQ ID NO: 61919 - DNA, 559 bp, Arabidopsis thaliana landsberg
ggttgcgccacggcaccgagaccaccgaggatctgacgcgcagcgccgacccggtgatccacgcgctgttcaaggccttccacgcgccgattcagcactacctggagcgcatcggccacggcgctgatcccttgcgccggcgcaacgagggccgttggcgtttcaacggcagctggtcggtcaggttgcgcacgtccggctttcacaccagccacgtccatccacgcggctggatctcgtcggcctgctacatcgacttgcccgagagcatgggcgacgccgggtgccgggagggcgcgctcaccttcggcgtaccgggcatcgtgaccacgccggtgctgtcggtagagcacgaagtgcgtcccgaagtcggcatgctggccctgtttccgtcctacttctggcacggcaccgtgccgttttcaggcacgcagacgcgcctaaccgtggccttcgatgtggtgccgggcaagccataacggggaggagcggagccgattcgtgtcccgcgttcatgccgtcaccgcattgaacgatatcgatatccgtggttcgtcgt

SEQ ID NO: 61920 - DNA, 1306 bp, Arabidopsis thaliana landsberg
gactaacattatcctgttgataaacctctggaattgtacactacgcttcaaatctgagctccagcctgcctgtcaacaaaagcatacaagaatcagagagaaggaagaaatttatctaggcaaagtttagacattggtatgctaaactatactagattgctaagattgacatggaaaaagaaaatttgtcacagaatgcaaatattgagatggaaatcagggttctgttaacatatttacttcatttttcagaaaaattctaagtaatcctgttttcggaagttaagagattttcacaattatcatctggcgatttcttaaagcaatttacctcttatgattaaagccccttccttgagtggaaacatttgtggatttatttgcagcacataaacgaggctcagaaggtaatgtttctgtggctgatccgacctcattattggctgttgtaacatttgatggaagcgagactccctatgaaacagagatccacaagcatgtcacacagattgttactaatgaagctctaaaaaaggtaagtaactgaaggaaaaaagaacgcacttccgcaattatttgaacaatagtggaagacagaataacaagtgtatcgaccacactcccgcttgctacattcgatatacttgtccccttcttagtaattcttgcatccttcaaaacaatgcctgtatcacacagagacatattaagaaactataccaaaactgtacatgtccttgatgtggacaagcctaactccataattgtccaaatcatagactgttataaactgtctgtttgagttgaaattaacagaacctaggaggattcaatagtaaaagatcccattcagatctctaataggtaacaaattccgataagaaagctcgaaaaccaaatcactcaaaaacatatgaaaacaatcgaaacatttaccaaagccattgtcgacggaagcggtgaagaaaatcccagaaaagacggaaccatccttgacgtgaacatgaacttgcaatccgattatacacatagttgctgctattaacaccgatgatgaagacttgttgttgttgtttgttgtcgcgtcttccactttccttgcgtttcccatccttttttttctttctgacgacctttcaaatcccttgaagaaagatttcaaatctgtagaagtttctatggaaatcacggtctattcggagctaaattatatacatatatatcatcggactaggaaaaaaattaaaaggtgaagaaaatgaaaaaacagatctagaaattacgagggaaccggtaacagcgactc

SEQ ID NO: 61921 - DNA, 764 bp, Arabidopsis thaliana landsberg
attgtattaaaattttatacttcataataatatatttttttttccactctctctattttttaaaaaaatatatatttatgttgatatattagtatgagagaaaagagttgatgtgggagtcaaatatatgttgtgatccgttaacttcaaagcaaattactgtttattcacagaagcttggacgcgtacggcttcgatttccttatatatatatattacacataaatctgccgtcttggagattggaaacatatctcaagcttcttcttcgtgttacgcactttcttcttcttcttctctctctctctttcttcttcgtcttcgatcacagaagacagaattcaatgtcgtcgacctacaagctcaatcacactgtacttcaatctctccttctcttgccgattctgttatactcactctctttgctctgttttgcggtgttatttcactctgtggtccatgaattgggcttctatgattcatttttcttaaatctctctgcttttttgtcttcttcttcaatttgggggatttaatagcgaatttgttgagctggtcaacaaaaatctttcatttttggatttctgatcgtgtagtaatcgccggagatttcgtttattgaaattgattcggaattgagaatgtgaagagactcttttgagtttgtgtgtgttttatatcaaaaaggttttaactttgtttgatttcttggcaggattcatttgcaaatggagatgcaaagagtttgttgccgaacccagaga

SEQ ID NO: 61922 - DNA, 154 bp, Arabidopsis thaliana landsberg
gaacaccaattcccgaataacccgaacccgaatctcctctttcgaatgtagagactcttttaaagactttcttaacagagaacacaccatgggagatcatggggcgcctccaccgctacaactcaagctatatcatcactacccttcaaccaaa

SEQ ID NO: 61923 - DNA, 772 bp, Arabidopsis thaliana landsberg
tagattaagaagcagtgcccaattttccttttctttcatcattccccaaatcatcaaacacagagtaaagtatactgacactgcttatgaagatcttcaacaatcccaacaagttcgttctttgtaacctttgggatcttgtttttgttttgaataaactttaaaagtatagacactttcttctccacttctgcacatgtaacagcatctcttacataacaaaacgttgcctcttaaatgaaaaattaaaaacgaatccgtacctgtttttgcctcctccatttgcaacagattcgttttcttcaaaaaattctgcaaaacacaaagaaacaaacaacatcgatcaaattcatgcaaaaaaaattaacaactttaacttagcatgcaagctaacgaaaacagcatgaccctaaatggaatgtccatcatttccttgtatcccaagaaagctttcaaaaattaacccgttcatttggattagagtagaaaaatataaagagtcaacatatgtaactttcattatggtcccataggaaataacatatcagagaatttagaaattggagaaataaatggaaggaaaattaagactatgtaagaggatgtaaactaaacgaaggtcatggtcatgaccctacaccgagaatgaccattaatataggaggaaaaaacaactgggttccaccattgatgcaatttaaaccctaaattcaaagtttggctctgcagagaaattaataggtttagattatcaccggcaaaaatcaggatc

SEQ ID NO: 61924 - DNA, 942 bp, Arabidopsis thaliana landsberg
tcctacagggaacattaagatctggtgagtcatcatccagaatacaggttccttgagatgtgataaactgttttgcttataaatgatgtttgtttcttgtgtcagggttcatcggtatggcgctatcttacggtttatctttgaatatgggacttgtttactctgttcagaaccaatgctacttagctaactggatcatttcggttgagagacttaatcagtacacacatttaacacctgaagctcctgaagtaatagaagagactcgaccaccggttcattggccggtcacaggccgagtagaaatctctgatttgcaggtatgtttgatttgaacattttcactccctaacttaaaaaatgagagtttcttgatcttataatgttcatatatacagataagatacagaagagaatccccactggttctaaaaggaatcagctgcacatttgaaggaggacacaagattggaattgttggtcggaccggtagtgggaagacaactctgatcagtgctttgttcagacttgttgagcctgttggaggaaagattgtcgttgacggtgttgacatctccaagattggagttcatgatctgagatcaagatttgggattatacctcaagatccaactctgtttaatggaacagtgaggtttaatctggatcctttgtgtcagcattcagatgctgagatttgggaggtacgtctaaatcttaaaacccatttgagaaaaccatgaatcttataaaggagttgagactaaacaaaaagctattttctaaaaatgcaggttcttggcaagtgtcaactaaaagaagtggttcaagaaaaagagaacggcttagattcattaggtaacaaatcttagtttcttataagagagagatttctagtaaagtcagatgttttgagttgtgttatttttttgttcatagttt

SEQ ID NO: 61925 - DNA, 979 bp, Arabidopsis thaliana landsberg
tttaaaatttacttaaataagtttaaatttaatgaagaagaaaaaggaacccattacaatcggaaaatgaatacaataagttgatttcttcgagaacgaaaactatgatcgaaaccccccttaacgacaaaagaatcgctctttacaaaaaaatatttctttaagtaacaccacatgttctttaacaaaaaaaaaaaaaaagtaacaccacatgtaaggtaatattctcctgtcgttaatcagggtctatttgaaaagttaaaactatcttattcatatgtcaaatagtgttttgtatagtttttcaaaggcaatgattagcttgagtttcttgtttagaattactgtataagtctctctacaatatgatacaactacaagataagtccttcattttgcatctaataaaactaggattggtattagttagaatacatttgcgaacctaggctagctatgctattagttaaagctttcaagtagtataggtatttaaagaaaagttagcgagacgtaaacaaaatttaaaaattcgttaactatacataaaatccttcaagagattttaaatattgtagctggctttgttgaaaaccacacacacatatatatattcatacatacgtatatgcattcacataatttgtacacaaaaagcatattcgtctgtacgttttttttttttttgtctgtacgatttctgaagcgtttatgtatctttttaatggaaacttaattattttgtgtccattaattaatcgaattataaattatttaaaaagacccggaaactgtcaaattgcctcgtgtcttccttcatcaacgaaatgacacttgacaatattctaggtacaaatcctacataaataaaaattaagtacctcaccgtaacattgttaattaaactttcaaataaagttaattattataaaccgttaattagtaacagtggtcgatatattgatttgcgatttttttt

SEQ ID NO: 61926 - DNA, 2328 bp, Arabidopsis thaliana landsberg
  unsure (1)..(2328): unsure at all n locations
caccataataaggtatataatgtcgacataactgggactttgaagatagagaaaaaccattatacgtataaaacatatataacccccttattcaacgttagctaaaaacatttatctagcaacatcaacaacataaataatttactctcgagaaaaaaaaacaagaactgagcatatgataatgaattcacacttcacattccacagataactctaaaatctttgacatgttcttacaaacagtccacggaatttacctaagttaatcttcaaacatctatggaatttgactgattaatattataattctatcatatatatttataaaatatatacataatacacagatgaaagtgacactaaggatccttcgaccaaaaaaaatcactgtgacgtatagggtgagtacaaaaggattaaaggagaatgatattttcacaagaagaaattttttaagttttgataggtaatagtatttcatctgaaatactttattgtaactttacacaaaactaagaaggtactctatattttacaaaaattcgatgtacatttaaataaatgtaaatcttgtgaaaattttgtagttggaaatttacattctaaaataaacttagtgtagattagctgaaaaaacaagtacatgttagtggtaaatgaattaactgattaatcaacatatttagagcaaaaatacaaaaacatttaacactattttcataattttatcgagcatcataatcttataaacaacacactttaaaaataaaaaaaaaacatttgaaagcattgataaaaaattgtaaacaaaaataaatgttttccaatagtcgattatgggggggggtggggttggcatacattcaaattagaaaagccagaaaatgggtttaattaatatattggtgttctccgatcgatctaaattattaaaatatattttgacggtttacaaaacaaaaataatgtgtactttttatattaatcttttttgtcgatcgatattaatcgcttttgtcgtgaagtttatataacgaaaaactttactttctaaattacaataactatttgcggcgaatcgattttaaaactgtgagattaatgaaacgatcgcgaatcttttttttgtcagaacgatcgtaaatcactaaaataatatttttattttattttattgatctactagaatttgacgtgtactcttaatctatataagttttttgtcgtgtcgtttattagaagattacaaattaaattataataattaattataatgatcgactttttaaatgtttaattaatgaaacgatcgtaaaaaaaactttgtcaaatcggtcgtaaatataacgaaacaacgaagctttctaaaaaaataataatcaaaattaatcaaatacatgtaaaaaaatatagaaaatttctaaattattactcttcacaattcattcatataaacaacatacctaataatatattcttaagtaaagaaaaaaaaagtgtaccgaataaattaactaaaacagccaaatctgccaaacaaaagagtaaagaatttcgtcagagaagtgctatcatttttattctgtcacacttcctccgccatttatacaaataaaaatctcctaccattttaaaatcctttataaaatatattttcttataactttaatgcaaattaaatatttcgaagaaaggtaaattgtttttttctactacacttacacatttcagagagaacttaaaacgtgaatccgatagatagagagagactgagaagctcactgcttcgctgattttgaggagagagagagagaagagtacctcacaagacttgcacagatatatacgtaagacttctcattgtctgctttcttctccttctccttctccttccttcttcttcaacttttacctcagaagcaagaacaagtcctgaagaacccaggtctctctttttttccctctgaatttcttctactttgaatcttctttgtaatagcctgggaaatttcccagatttcagcttccaatcgatttatataatttttcagctcttgttgtttttttcgttgttaagtaatctgtctggactggtctgctctggtctggtctgatgatcttccgatgatcctttcctttgtattgacgatttctttgatctttccctttcggattttccttatctaggttccaaagattgttgctttccttattaaaaaatcaaagctttgtttttttatattctcacactgngaattactatactctngttntatgctatggaccctggatcattgcttaaagctacattttgctttttgtttttga

SEQ ID NO: 61927 - DNA, 1409 bp, Arabidopsis thaliana landsberg
gagagtataccaagtacatccttttgtgccataacttcttatttttctaaaaccctttgtatattcttttggcctggtttgtgtgtgttttgaattatatatgtactgtgtacgtgttttctacaacgatttgtgtgtttccatttctttgtttggattagtcgatcaataacgaaatagatgatttgaagtaacgaggtttttggactaggttaactaggtgaacttctaaagtgatattatttgtggattaagaagattttattcgaagatatttaactgatagagattctttctgtctgactcggaactttgaagcatcagagtctcacagatgaatatagtagaagccgcacgttcctcatcccgtgaaaaaggacacacgtctgacttctttatattgctgggtcttcttctccctttcctttttacttcttaaagtttaaacctttgttattatccatttcattcacatgtttttttttctgtctgcttatcatttacacgtttcttgatttgtttcattcgaaaaaaaacatattaaatagcatccatataaatttgtagatgaagattttgacatattaaaaaaatgtaaatgcatattttagcatcaattcttccaactaataatgataaaaaatttccatcgtttggaaatagtagacactatcacactaatgatccggtagtaaaccatgtgcatgagccatgaggttaatttgcattctttcatttgattttcactccataatctttcgtttttatttggtcagtcaaaactcaaaataataacacatctaattttagtggcttatccggtggactgaccatcttcaactatacattttgaaaattatttgtattttagatcaaaattatttattattaacaaaaataaaataaaatacaccttatatccaatgatttatataaacatatatatcaatggtcaaaattttcataatttttaaaattgtaaagcaaaatattaaggtcgtaatagtaaaatgttaattatatcttcccactgaaaaaagaaaaaagaaaacgaatcagttttattccacttgcacaaatcttcttcacacacatttttttttcttcactcggactgatatgagtagccaaatcgctttgtcaccggccatcgccgccgccattcgccgtccgtcctctcacgactgtctatccgcttccgccactactgctaccgccacccccatggctctcaaatcttgcatcgtcgcacctctctcgctattcacctctcaatctcaaatcaaacactcaagctcaagaaaaacttctcgaaccacgattcgatgccgatgtagcgataaaatccgcagattcgataaacgcagacgccaatccttcgtcctcaccgtcatcagaggaagaaatcg

SEQ ID NO: 61928 - DNA, 1710 bp, Arabidopsis thaliana landsberg
aaagtatattctacgataatcatggagaaatagacggtgatataaaaaattaatattaacacaatgaaattttaatagataatcatgtcttgtagaataatcatgaaaggtaaaatattaaattttcagctaaaacttcataacaaaagaaaatttgtaatgggttattagtcccacaaaaatggtctttatttttcttattaacttttactactattaatattattatctaatttatctgaatcattgattttactaatcacgtgttaattatgattaatttaatgctaattcaaattcgaagaataatgattacattttcgcatgaatcttgaccgcaagtgtatcctagcctaattaatatgacaaaaataccttactatatttctttagacaaaagctaactggagatccgatttgacttggcgtgtcaaaggattcaatagtacactgaggaagcctcctccgtttctcctttaaagtttaacaatttcaaatctcccgggaaatataatacatacaaataaacatatatcacatatttagtttctttttgtaatccaaggcttttggacggaaattcatacaagttcttgaaagttgtcaagaacgggatatccaaaattgtattcgtgaaagatatataaatcgtaatataatttgccattaattgtcaagaaaaaatctcaaatatattgttattcggattaagatgatagagaagggatatacttactttcctttagacaaaaggatcatgcttaattttgaggcacttgtaaaataaaacaagacaaatatgataatgtataaattgacaaataactaaaagcattagcataacaaaagtaaaataaaatggtcaattgggataatgttgctaatatgctttcgaggggaattagacaagttggcggggcagtgtcacacacttggagccgtcggtcaatttcaaccatcggttgttttttaatcacctgacataataaaccccaacaaaacttatttaagaaatagtaagtgctttcgcttggttggctattgatttgttaatcaattaatttctacttactatatttttaaatggtaaaatataaagggttaaacttgatcacgtagacgatagtcaattcgttttctcgaaaggttggctagccagaaaattacattaatttaaagtggaacttttggctgtattgatctaatccaaaataccctagtgtcttcttttcgattctataatattaaatcttctctctttttcacgacaccaagagccattttatttgaacacatgtatacaacttataagaaatatacccgtctcaagctattgaacttgttgcaattaaaaatgtaatcgttcgatgttggaattaaatatgtggaaaggagtcaaaatcagtcaattattcagagtggcctgtttatagttggctgaaaacttttagttcgtcgtttaaaagtttgatttcgtggcttaggattgaccaccggtcgacttatggcagttccatatagattaatttgataatgacgtaactatataccatacacggccgaacagattgttttatataggcctatatgtgtaaagttaaagataatttgatttattatcgagtatatgacacaagttttaatttatttctaatgtttaaatttaatgattctggtttagttcttcatgaatatgatctactttgttaa

SEQ ID NO: 61929 - DNA, 381 bp, Arabidopsis thaliana landsberg
aagcagatcaacaaatcatgaagcaggatcgtcacttagaacttattatttacaaaactttgttctcaaaagtgcatggttacgtctcttgtatactacattagattacaaattatatagtcaatattaaatagatttctgacgcatctttccaattagaaaacgttttgaataccttttaggattattgtgatagactttctaattgttttgaatgtcaaaactagcattgcattttgttttgcagtttacaatgtcataatagtcttaaacttcaaatgcaaagacaaacccaaaaataatcatggcaaaagtttcaacccaagtcacggtttacattagaaagaagaagaagctgcaccttgcacagggggcttttgg

SEQ ID NO: 61930 - DNA, 1221 bp, Arabidopsis thaliana landsberg
tatgcagtttaagcggtttatcaggagttttagataaaaagacaggcatagctcaggttcaaactcgttaccgtgggaaccaaacgagttctactcatgatctatgtaaacatgggaagaggcgtgaggaagatttggtgatcaaaccatggaagttggctaagaaaaagaatgttgacagtggagatttggggaagggtgagactttgaggaagtccttggggaatgtttctaaaccggacaagtcatcattgcaggctgcaaagagagaagctgctggtgaggttgtcaaatcttgtgatggtttacacgttaagaagagtgaaaccaagagtactagtccgagtgtttcacctgttgtgagaacggtcaagaagactaatcttgttgtaaataaggcttcaaggatcagccagaacaaaagtcctaaagaggatctttcgaagaatttgaagaacaaagagaaggggaagattgttgaaccggttagatgtgatgatgtattagagaagacagatcttgaagttaagaaggtttcaaggatcagtgagaacaagagttctaaagaggatactctgaagaacaaagagaaggcgaagatcgatgagccagttagatgtgatgatgtattggagaaaacgagtcttgatgctcagaaggtttcaaggatcagcgagaacaagaattctaaagaggaacgtttaaagaatctgaagaacaaagagaagacgaacattgatgaaccggttagacctgatgatgcggtggagaagacattgtatgttgttgaatctagtgttgagaagaagaagaagaagatgagcaccaaaagtgttaagatcagtgagactcagcaatcttctgagaagaaaatcataagaagcaccggcaagaaaagtcttagcttattaccatctttgcctccaccctcagaggtggttacagggtcagatcctaggccaataagacagactacttccaggtccaagactagtttgcctgagaagaaacagagtggttctgctaatcttgttactaatccgaaacccgaaagcaagattagacccgaaaggattggtttaaaggttactccacctcctccttcaacaaagcagcaaatgaatttcaagaaagggaaagttctttgaactaaaaccagaagattccactacaacatcgatcaaattcaagaagagagttgttcaagaaccaaaactcaga

SEQ ID NO: 61931 - DNA, 1964 bp, Arabidopsis thaliana landsberg
gtgggtttatcaatccaagctttccaaccaatgcaatcaccggtaagtctacccaagattacatcatatatcactgtaggatataacaagcagcatctaatgtggttggaattctttgcatcataaggtacaaaatctaggcacaaggttatgcgtggtcagtttctctaaagtagatccatcaatgtggttcgatgacactcatcatatcgcatgagtatgcacatttcttcagtagagccatccctcccaagcaaaataactgacctatctctcccacagatatatgtcggtccatcaaatacgctgttgattgggcaaactccatcccctctcaagtatgaattccacattgctcatcatatgaacgataaatcggataccattcatgttcctaggacgtttccttgtcacaggctgaaacaattggaaaaagaggacagggttatatggaaagctttagcatgaaccgggtttatgactatatgtttcatctcatcactgagtactcgaaacttcagaagttcaagccagagaagccggcttccgctaatgaagtctgtgcaggatcattgctctgcattgcagaacaaaaagagcgggaactactcgaaagatccagagtcgtaccttctctggatcaaccatgtaaacttccagtagaagataggaataggcttgagtggttgatccaacagaagaataaaacaatcgaaaatgttagatgcatggagatgacaagaacacagaggggttctaaatgaattgtctttttagggacatgaatttttggtgtatcctctctctttttttgacatacgtgtgtgttgttcatcagttgtagcacgagatgataattgattacgacttgattaatagaataaagaaagaaaccgtaatcttacaaatacattgggtgatgagagacgcaatgataaataatcagtctgacccagatcttcaaagtaacaaactagagccatgagatacaaatcctaatcctttggtattgggaggaacctaaagtgacatctgaacaacttgaaaactgatagcagcaattgaaatacagtcattcacgtattttctcaacttggtaaggtcagcttattccaaatattgaccaaatccccgagaaatgaaaactaacccgctccaaacttcagattcaagcatttccctcgtcaaactcatcatcatcatcaagcacttcatactcgaaatcttggtctctgttctccatggttttcccgaactgaaatgcctttgtacccattgttgtgaaaggcatcagcccaaatgcacgggctgttttgatctctctagcaatctttctttgagcctttgcgctaatgccagtctgtgcaagagataaataaaaagagggattcatcatgtgaactagcaaaacgccattatgtatcgtaaaagtaagaaacatccatctgacctgcttcctcttaataatgatcccagcttcagtgatgaagtttgcaaggaacctaacattctgtccaacaaaacataattcataggtgagcacaaaaacgaatatgatacactagttgtgaaacatatttacaaattacactcaccctgaaatcagcattcttcagaacttcctcagtagttacctcagacttgttattattctgtctaggattttgcatctgtttttgcatctgtcattaaacaaaagaaaagatgtttagtgcatgtcttaatcaaagaaaaaaagaaaagattaaggagaaattaggactcgtagatccctgcaaaaaccaatctagaaatagaacaatctatacatgaactacacattcatataacatgaatccaaatcactgagagataatatacactgatacaaatgcaacactagacaaaatgagttacttatgatagctataaactgattcagtaacacacttgaaatcaaataataaacatagtcaatagaagta

SEQ ID NO: 61932 - DNA, 503 bp, Arabidopsis thaliana landsberg
caataacctctgcgcattgtgttataagtcacaatgtctggtttgatcctgccactttctataacctcaaaaacacgctctgccgaatgaacgaacatggcgctcactaaaccgttcatcaaaaagttataagtgtacaaagtcggctcaatcccattctctttcattttacgccaaacccacaacaattcctccaccattccaagcttcccaaaactcttaatcagagcattcgccgcagaaacagtcataggaaactcaaatttcttaatctcactgcttacaaacctaattctatccacatcttttgccagagccaatacatcaaccaaggagacataacactcgaggttatgagtatacttcttctgcttacgagaccaacagaagaaactccaagcaatatcaaggtttttcgcgaatctcatcggatttcaacacaaacgaaacaaaattgggcgatagtttgataagaaacttacggcagaaaccatctagattcg

SEQ ID NO: 61933 - DNA, 503 bp, Arabidopsis thaliana landsberg
agccgttgaggttttgcatctgttttattaaataaggaaatgcatggaaggtgttcgataaaatgccaattacaatcagcagtttactactatgggcattttaatccaaattcattcatttttttgtgtgtttagctacaaggtagaaatatcgcatcctcgttaagccaattgtgtaatgtcgatcatgacagtgagtgatacaaagtttgcattttggtaatcttttacatatggacattgcttggtttatgaatctttgagaagcctcaacaatgttcatatatttactctgttcgtttggagattcattgaatgctttaaaggctagatggatctaagcaaaactgaagaaggaatggttctgttttgtttgtttgtagagttgttggacaatgaagaaaggattgcacccacaaatgcaatggatctcttatgtgacgcagagcggttgattgatgcacgtgatgatgacaagaatccaccatgttggcaaagtctat

SEQ ID NO: 61934 - DNA, 989 bp, Arabidopsis thaliana landsberg
  unsure (1)..(989): unsure at all n locations
gacctgtacaccaagtcttttgtctctcccttaccttccctcaaaagccaattttaatttgctttagacttttcatttactatgaaccttgcttttcttctcaagattgattcttgcagtttttgtgtctctctatttcgtcaataaaaaaaaacttatctcgatcccttcttggccatgaacatcgtacattgaaaagttgaatgtgttcagtaatctataatgatatgaatcaaacgagtacatggtatcataacatctaaaactcactctgattcagacaggtttaaacatggatttgataaggtcttgttacatgacataactaataatacatgtttctgctccaaacatcttgagctatggatttaaccaagttggttcacaaaagtttccctctagtaggtggggaagttggggttgacattggctgcccaagcttccagtcctccaattatatccttagccgaatcgaaacccgactcacgaagatattgaacagctctttgtgaatcattcccgcgtctgcatacaacgaagacactaggatttgtgcaagattcagtgttcgcatggccattttccttttctttaagagctgaagtaagctcgtttaaccgagtctctaagtttgcgagagggatgttgagtgaatccgggagagagacaatcttatagtgatgtgaaggtcgaacatcgagcagaacatgttgttccttcttttgaagaatttctttgaactccttgctactaattcttgactctgcaggaagcaggttcaatgggccctgtgatcaaatcnnnnnnnnnnnnnnnnntaatatgagactactgacaacaactattggattcaagataagagaaaaagaaagaataataccgcaaataaaggaaattgagtgaagtccccatagtcaaaatctttaaaagtttgcttattgaaagatgaattgtctccacacacggtgcactgtgatgacctgcctctg

SEQ ID NO: 61935 - DNA, 631 bp, Arabidopsis thaliana landsberg
  unsure (1)..(631): unsure at all n locations
nnnnnnnnnnnnnnnnnnnnnnnnnnnnnnnnnnnnnnnnnnnnnnnnnnnnnnnnnnnnnnnnnnnnnnnnnnnnnnnnnnnnnnnnnnnnnnnnnnnnnnnnnnnnnnnnnnnnnnnnnnnnnnnnnnnnnnnnnnnnnnnnnnnnnnnnnnnnnnnnnnnnnnnnnnnnnnnnnnnnnnnnnnnnnnnnnnnnnnnnnnnnnnnnnnnnnnnnnnnnntttttctcttattttgtttattttttttttttttaattttttattcttttatttttcattttcatttgtcattttctttatttttttttttttatttatccttttgttgtgtggtttgtcattattttttctttatatcttcttttactttttaatattttttttttttttttttttttcttcattttattttttacttttttttttatttattttattactattttattttatctttctaattttatttctattttttttctttttatttttttttctttctttatttattcttattcttcttctgtttatactgttttgtatttttctttatttgtttatctatattttttttttgtattttactttcttttcattatagcttttttttttctcttttattttcattc

SEQ ID NO: 61936 - DNA, 1100 bp, Arabidopsis thaliana landsberg
aagcattcagtaaaccatatatccaagtccttttgatactgattcttccggggttttatggagtgactgtgaagatagaaccgggtcataaaaaggaagctgaggtgcgagcagatccaaattgaattgaagggaactgagaagagagagaccattctgagccaatccgttgagcctctgtaacgaaaacttctcttctcctccatctcccctccttgatttaccgtactgttgaatcgagataatatgtccaatcgtcttctcgtacgcttcttcccattctctcttcgtcttctccacttcaacaacaacctcatccatgtcgtaactgcaaatttcataaattataaaactgcagagtttagtaatcaaaagagatataaacaagctacggaatctcccaatgcaatctgctaatagctctctaaacatccaacacgtataaccatctaatggtttctgtatgaattatgatcgaatcactacaggaacggtatcagaagactcgattgatttgatgggatataagggtcacaaacttacattggttgatcgaaagagatgaagagcggagaaaatgagaatgaaattgcgaaactagggtataaggttgaagaagatctgggaaccagagagtgttggagatcaatattgaatattgatctgtagaagacacctcaaattttgatttctggggaagaagagaattaactaaaaacgacgtggttttagataaaccatgtctattctaaacccggttatcttgcaattgctatcatgtctggtccaatgtccggtttatcagttatttagttatatggtcatattcttattggttaaaatttctagcattacttattgatgaataaagaagtttactgctgagttttgttcaaagtacacgttaatcggatttatgaaacgacaattacacagactgacccaaaattggtaattgcggcatccgatttacccgaactgcatgccgttttgcaaaatctcaaaatgaaaaacggcatggtttcttagtaatctactctagttctagcaaactgacttgttcaattgcacatagagatgatcaactcaacacaggtatg

SEQ ID NO: 61937 - DNA, 1675 bp, Arabidopsis thaliana landsberg
aggttagatgttttcttgttgcgcagagaagattatcagaagagcttgaacaacgtagccctgctgtaataagacttattgttgccaagccaatgctgcatatgcactccaatggcgtccaagtgaaagctactccttccatggaaccccaaaacttttccttgtgttgtagtcgaagtgaaaaacgtcccggtttcttcaccgtatggcccgtacctcccacggctcgtgtagaaactcagagacttgacaacattatatcggtctgaattgttcagaggtccgtaataccctgaaatgcaggtgatcgattcatctggatactcaaatttaatctgcaacacagatttgagagcattagaaatggttctaaagcatcaaacacaaaagtagctttatgtgaaaggagaaatattgttgtttactctgtgtgtagcgactccattgctgtcaccaccatgtttaatggaccaaacagattgtccatttctatcgtactcaatttgtattgaagtgatagcatcatttcctcttgtcacaaatatctgcttgatccctgaaaatactccatcgtcccaagcttgacctccgtcacctccccacggtccaggcccgctcggtgttggttctttgacgactccacgatcaacctgtgaaaacgattacccaacaagtaggctgctattagggtgtttaatctagataaaccgaaccaaacttgaaacgaacgatttaaaaatcaaacaggtcttaatttggctaagatatatataacgtattaaaaccgaaaccatataaactgagccatagtagagttgttatacagtggctgctattcatgaaatcgaaaacttgaaaaaccggaaaataccatggtgatagaatctacaagttacctcttcgccatggccgtttgctgcaaggactagcttattagcccatggggaattttctatttgcgcagtgccggagttattatgaggaacaattgcattgtgaggagatgatggcttaagggaacttattttgcattccataacatgaacacctatggaatcaagaaataaaccctctcttccaaggaatccaacaactttaccctcgtccatttgatgtgtaaaagacggtccttgttcttctccataaggtccatgctttcctctgttggtgcggaaagtcagtgactttatcacattaggtcccatatacatcagcggcccatatgttcccgttacatgtgttaaaacctctgaagggtagtcaaatacaatctgcaagttacatttaaacctgtgaaatatgaagtgtaattaaacttaagtagaccaaaaatcgtttcaaattcacgcaccttatcatgtttgaatcctcccacgccaccatgtttgcttccccacacagcttgtcctctaaaatcataacagaccttcatcgacacaatcccgacattgcgtgacaaattgatttgtcgaataccggtataaatcccatcgtcaaacatgattccaccggttccgccccatggtccatatgttttcgcgccaccttcaatttttgactgtgacttctcagtatctgtcaccacctgataaaacaaattccataaaaaaaattgttaaaaaaccagtaaaaatccaataagacctgtttttcgaatgtataacagaaaagtctt

SEQ ID NO: 61938 - DNA, 1612 bp, Arabidopsis thaliana landsberg
acacctcaaaaaacaaaggagtgttgttgcaagaattagacaaagctgacgcagaccataataccaccagcattatcatcaacagaagccagaaccaacaagatctaacctgcaggattccctttttggtactggctggtcttatagaccgtggacaatttcaattcagaagcaattagcgatacatcaggtcctataattgcatgaacttgagaggagatctcatgtaccaatacaaagcaaagaaattctacaaagaagtggctttctcaactggaacctagagatagagctaccaactttcaggaattgggatttccaatcctaactaatatattctcatcgctatatgatcatagatccaccagtgtctcatactctctcagttacatatactaaaaggacaagcaaggaagatattttggtacatgtttttggtctttctgaatcaaatcgacagatactacataatatcaatgctatatagataacgtcggctttgcgaggttatctgctaccaaaagggacgatatgcaaagacttcttctaataaaaagattgataccagcaaaccaaaccatccattaatcatatataatcatatcgataataagtgtattgaaacatgatctcaactcaaaatctgataaaaatgaaaaataacaattatctctctatcatatctgttattcaaaaaatctataatgggggtgtaaagttgattccccaagtaattcaatatcccagagcatatcaaggtaagaaagagactactacttattaagtcttgcgagagaacaagacactaaccgctacagagatggtgataatggagacaggaacaacccaatactgctttgtcaagtcaaaaagcttctgaacagagtcttgtggctggtccttcttgtagatcttaagctcaggtatttccggtaaagaagattcatctagctcgccaataaaatacttctccataagttccctagcatctttgctgtgccctgcgtcttcaaaatcatccgttgcatctttgccttcaacaacaacatcatcacatttacttggattagagtagagacaacaacagatcagtcatttagcaaggatgggcaagaggaagaagaagaagcttacctgcgacagcaagaagcacatcatctcctccaggatgctcatccatataagaggatacatcatagacctgtaaagagaacgcatcagccatatcattttcttggggaccaagattgtgaagtcaacacattatcaacaaaaaaaaagaggaagaagattctgattagctcaatctaactacatataaacagcaattacaagattcttcattagattctataggcaacaagacacagatatggtttctgaaagcgaaggaaacttcaggattcacaaacacatgaacaaggattgaaattagaagattgagaaaaagagtagaccttgccgtcgatgacgacccagcagtcatcttgcttgttgtgagttgcggcttcttccatggaataaagctttgtgagtgtcggcatcttcttctgcaactgagtagcgagcgaaatagcgaatgggctttgatttttctctttttgggggttta

SEQ ID NO: 61939 - DNA, 1857 bp, Arabidopsis thaliana landsberg
tttggccttttgattctggattgtgcttggattattagaagagttcaacaaaaggattacaactttcatcaatagttttgttacaaaaggattgtactatatgtaagtgtaacccaacaaacctaaaccaacagacaggaatgcggtagagcaaaccggtacaatcaaaatcaaacacccttcataaaactatatcggatacgccaaacaatatgaaaatatatgtctctgtgtttagtttttttcgtgaaaataagattccgagcaatatgaagagctaaagtgttgtcactgtagagtacacagagagagcataagaagcatgctttatatatttacataatataaaaccaaaatatatatttacataatataggcaatccaaacatgttcacaaattccaagagccataactttgtatttagctttgatagacaatgaaatggatgaattttcattgaacataaaatccaagatacatagtacatacgaaattgtggataacttgcctagtcataagcagtgaaacctcaaatatataggtctagagcagcaaagtaaaaacaagctttgtccaatgcttcctttaagaaacaaacaatcttatgaactatatgtcccttggtgcatatgagaattgaccttgtttaccaccaaaagaaacattatcagacaacatctcgaagatgtaacttgcgttgacaaacataatggttttttttttatctaacaatttccaaaatagataagtaccgaagatgaccaagatccttgagttggaagtaattaaatagccgaattgtcaattacaaaaaagaaccaaaatatcatatggtatcatccacataaaccaaaataccaacaaaaactttaccataatacaatatatatgttcaacattaaatattatcaaatctcaaataaaaaataataaagagttctaagaacatttgtggatagatcataaatagatttataaagtttgcaaaaatctatcatgaattctccttttcgtcctacaaatattacataacagtatgtaaaccacttcatccatataagctgagtcaaattctcagttcatcttcgctatatgtatcaacttatcggaatcacttctattattaatggaaaaaccgaatatcacctaatgagaggttttaatttctacataaaactataaaagccatggttgtataatcaaataggactgtgggagtaatataagcaattgaaaagtatagcgaaaatataagattctacaagtgataatgtcctattttgtaaataacgatcaaataaatttcaaacagttttagaccaaaaaccctttggtcatcgtcaccagagattagatctaaaaccctatcagagaccatttcgcgtgaacaaagatggcggggcctttgcttcgatctctttggtcaaacaccactcgaagatccttctcttctcattcatcaccttccaaattcggatactcgctctcctccttacgctccttttcagcagccaccgcttccacagctgcagccggagctcctaatagctcgcttgaccctaatcgactaagaaacgtggctgtgatagctcatgtcgatcacgggaagacaacacttatggacaggcttcttcgtcagtgtggtgctgatatccctcacgagcgtgctatggattctattaatcttgagcgtgaacgagggatcactatttcttcaaaggtatcgcctttcgtatgtttggattggaattagagttaattgttacttcacaattttgaaaatggttctgtttaaaatgattctgagactctatcaaagcatatttatgttctggtcttttttttgtcagtttgtt

SEQ ID NO: 61940 - DNA, 1294 bp, Arabidopsis thaliana landsberg
cagatcaaacgatggaatcaaaatcaagagtcaaaaaatcttgccgcagaagtagacgtcaataacaaacttttctaaaaatataaactaattttgtcgaacttgtttacttggctctttgaactcgatcgttgaatttcacaaagcatgattttctatatatagctcaatctatttttgctctgagttaagaatatttataacgagtgttgatgatgaaaatgaatacttgtaatgagaataaagattaaaacacaataaatttcttcaagtaacacgaacaaaagattattatcaactattttaattaatcatgaaatttgctacttgctttttagtttcttacgttcttgtctttctcgttcttagcgtctgtaaaggtaatatataccagatattttctatcgattctgtttcgttacttgcgtaatatagaactatgacccttacaaattattggcaaacaaaattacagtgttgacattagaaaaaactaacaaaaatgttgttctagaacaatgttttttttttgttttttttttttgcattatcaataattgttttatctaaagagcttcaaccaaaaacaaactaacagttcttgttgtagaagtggaagccaaagaactgtgtaatagaatagaagacatcgatggaaattgtgactttgaaggagagaaggggtgcttgaaattcatgacgaataaatataagaaagaaagacatgttagctgcacatgtactaacctttacatgttacacaagaccaaacgtttttgcgactgtaaacatcgctgctcaggataaactcccctaaccaacattgcttttacctattttttagtttttactaatagaattgttatgagtgtttgtagtgttgtcattttcatgacccataaataagttatgttattctaatgtatctctctttttccacacaaatttttaataaagttatgagttacttctttctaagtagttagtatgagttttccaatcaatctattttccacgttcagttttccaaattgtattgatcctgttatagtgtaattacgcattttgtaattggccatggtactacaatactaatactatcatgttatgtgcagacttcaatcttttctttttaaaaattaattattagcatttgtaatattgatgtaattttaatacaaactgtttattaattttgtttgaaaaacttatgtggacaaataaaattagtatacagaacaaaaaaatatgtttcaataccaaaaaaagttcactccctaagcttttctgtctc

SEQ ID NO: 61941 - DNA, 961 bp, Arabidopsis thaliana landsberg
attttttttatcaattaacaaacaaagccatgatctttaaattatgtgactcaagatctcaaattagaattgtttaggctatattttgttgaaagtgttggcaataatgcttttggaaccataaactcctactactttagccttttaggtgttcttctagtagttctgcaagtaaaatgcaggcgaaaggctgaagagaattttctaatatttctgctcatattgtaaagaaatccagatagagaggctggattgtaattatcccctgaatttggcaagctgcctaatacaagcaatgactaaccccatgtgcttactcttaacctcaacttaggcaaactgcatttcactttttccacaatttctatatttatatatatgtgcattcgtatccaaggagggtttcagttatatatttattatgtattgtttcaagtcatagatagatcattgaacacaatcttccatgtctgcagcttacaatctcatgattaagtcgaaaagttgcctttttagctcttctattctctttgttgttacacttctctacttattatgtactgtatctgcttctccttctctgcacccagatgaaggtttcgtagtttcaaagcattatatcatatatatatacatgtgcctctctttgtgaatttgaactaattttgtttctggtttgctgtcttcgccagtggaagcgctgaaggatatcactgaaacattgggtgtgaagcacttgaacctaagtgaagatccatgtctcacaaagactttggtgatatcgcaaggtgttctcaaggaaggacagaacagcacaatcagatgtgactgtcatttcaataactacagcacttgtcatatcaaacactggtaagaaaaaccattcagaaaaagaagaaactaaccgtttgtctgcttatttctcttgtttctgaccaattactatgtacctcatatctag

SEQ ID NO: 61942 - DNA, 1196 bp, Arabidopsis thaliana landsberg
aagacaactgcagttgctggtacaacctatgaaaatcaaaatcatcagacaccatcaaaaggtttgtttcaaactgcagaaatacacatatggcatggtattaacatcttttaagtcatggacactgcagcttaccgtgaaaacagacattagaaaggaccagtgaattgtttttgatagagatctgcataagatgagaaggtaatactcatgtcagcctttgaaaatcacacaatctccatgcagaagtgagaccacaaccagcattaaggagcctcatttttaatctggacaactgaaaagtccagatttacaatcaacatttccacaattagaaagaaataaaaagatatagagaaagaagatcttagtgaaacatactgcattccaataggtgcacccaaagaaacagctcccaaagcatttataagagcacctattaaacaaatcaaaacacaggtatagatatagtagacacaatcaagggatactgaatcagcaaaagcacaagatgaaagcataagaagctcagactcactcacatcttcaggtttagcttaacatctagaatttccaggtgaactcattgagcaatcaacttctttgaaaaattagtgagctataataagctgaaaaacagaaatactaaccggcaattagtccgactaagcttcggccaacagctctaaagtactggaaatcaatgagaaaatcatgaatacagagtcaaaacacacaagaccaaaataatactatatgaaaagaaacgattttttcgagcattaagagtgtaaagtgaggatactagcttgttttgtcaatttcataaaagggaaatgagacaagcacaaagcaatcgagttaaaacgagaaattcagtttctttaattctcacagagaacctcggagatgaactatactcaccgagcatttctctgggtttcgtcggaacaagctgtagatgattaccacgatcgggaactcaataatctgaatatcaacatcaaaacaaaaaggctaaaattaactgaaaaatatccactagcaaccaggttatgaaagaaagttttagtacccataggagacgcagagtgagagttggatcagaaatgagatcgacagagtatttgttacggaccacgtgaaatccgaagatcagaaataacccagtaatcacataaacagcaaaagccccc

SEQ ID NO: 61943 - DNA, 430 bp, Arabidopsis thaliana landsberg
  unsure (1)..(430): unsure at all n locations
cttctcagttaactggggcggcttttttaaaaagctttttctttttttccccacagggncgngnngatactgntcttaaataatgttgcatctttggcaactttgacagcagcctcttgcaagggcgactgcttcagctgctgcagctacaactactgcttcatcacttgtgagaagtgtctcagaggctaaagcttctaaatattttgcctacaaatacaaggaagttatcaagtggacttcaaattacagttaccaattactaagaatactttttgtgcgtgtgggaacaatagtcactactctgagacaataactgaacgaccaaatcttagtcattcactatcaagcccgattttgaacaacaaatttcattgaagccttgggaccactattagaacgacctgacacgataatttacaaattttac

SEQ ID NO: 61944 - DNA, 733 bp, Arabidopsis thaliana landsberg
ggttggaattagttgtgctttgtttctttatgccttctcaagaattaggttctcaaaaccatattctattttgaatttttcttaggtaagagagatgcggaagaggatttggacatgcaagttacgaagaagcagaagaaagagttgattgatgttgttcagaaggagaaagctgagaaaacggtacctaagaaggtagagagtagcagttctgacgcttctgattctgatgaagaggagaaggtgtagcttcaatctcatagtttaattagtttagagtaatatgacaaagtttagttattttgagtttaagattgtgtacaatgttctgtctatactcatcttgttcctctaattctcctttttagactaaggaagttgcaaaggaaactccatctaagctgaaggatgagtcttcttctgaagaggaggatgattcttcttcagatgaggaaattgcgcctgcgaagaagcaaccagaacctattaagaaagacaaggtagagagcagctcatctgatgatgattcttcttcagacgaggtattagttgcttctgcatcactacacgttatctcaagcgtagaggaatctcgtaagcttactttgcagtttgcttgttaggaaactgtccctgtgaagaagcaaccagcagtccttgagaaggttaaggcagagagcagttcatccgacgatggatcttctttcggacgaggtaagagttatgttacaca

SEQ ID NO: 61945 - DNA, 1305 bp, Arabidopsis thaliana landsberg
tgccaccatcttcaccgcacaatccaacggtccaccgtaaatctccttatccgcattcatcatcctcgtcttcacaacgtcgatgggattcgacgccaccgccgcgacgatccccgccgcaaaactcgccgctacatgcgttcctatccctcccggcgttccacggccaccagctaccaagatttctttgacgtgatcatacgtagcgagctgagaagctgtcacgatcatggcacggttcacggttagccatgagccacgccataaacttgaaacgccttcttgccttgcgatcctgtcgatcgcgtccacgacgctcttgtagtttctgcgacggtttaacggcaagcttccgtcggcttgcattctcaccatcgccacgtcagcaggattcccgacgactgatccaacggctcctgcgatgagtccagctgtgatctttgttaccaatgggaagttacctgtttggaattatcgtttacgtttaatttatttgatcttttgtgtaataatatggaaaaaattcgaaccaaacaaaccgaaactgtttaagatcgaaaccgaaccagcatttgtttataaatccattggttttcttatttaaaaccaataaccgagaactgtaaacgacttttagtgtaatcaaaccaaaccaaaccgaataaaaaccaaaattattttttgagtaatattgttgccgatcgagtttagtattattaccggtgagttgatcagtccaccttcgtttaagaaagtcgtatatacccatacgggtggcagagtaaagcatctgacggaggatggtggcggagacgccggagaagagagcggcgggtccttcggttttgacaatgtgtgcccctacggcgaaaggggtcatgacggagcgcgtggaagaagacggcgcgtgaatgtgtaagggtaataaggaaatgctgccgatgagagagtcaagagcgaaaacgggtcggtaaggtttcacgggaagattatgatcaaggctaagattagggttagggttttggtcgagcgagaaagaatgttcgccttgaagctgcatacggactttgatgaggtctaatgggtgagtcagagctccggcgatgattgcggcgatgccaccttcaagaaatggtttgaagcccattgaaacgattaccggaggattttattgtaaggagagaatgttttgaggaatgggaattgaaagaaaagaagagtttgggagataatagatcttttgtaataaaatgtttggagaagaagaaatgaaattgaacaagttggaatggaagaagacaagcc

SEQ ID NO: 61946 - DNA, 1844 bp, Arabidopsis thaliana landsberg
gattgtacgtgttattggtcttataactattttgcaccaaagggattcttcacatcacggacaaataataattttaacactaatgaaacaagtaaatatagtgaaacgataggttttctatagtgattctttacattaacaacaatgaaacaataaatataatattggagaggggtgtgaaagaacaaatatgttaattaatttctacaaatgttttcacctcctttctcgattcatataaaacaaaggtaagtctttgttccttaccttcactctctagaaaagatttttttggccaaaaatatgtattcacgcaatcagcagaacaaaaacctcggaagatcacgtccaacgaaggacctttaggcttaggggtaacgtcatgtcttccacttttgagcaaccttgcaaaccatcaacgaagtctttcatgtgcattttattcaacaatggagttttgtaagaaggaactattgaaaaaactaatggaactaaggtgatctagatagtgaacttagcttttcccaaacttttctttatgcactacaaaatttcaataaattaagtttttagaaaaggttctcaagtgaagttagaattttataactcaaacaatattcatgtacgtgtccaccggttttcatggttagattttgagaaagagtgagtccaaactttttaataacgtttttgattccgtgtaagaatgtgtgattctccctcctcctgaaaccctaacccaagacaggagatctttctaacacattctatactaattcacaaaaatcttccaagttccgtccgatgtgggacaaacaattctaatatcccctctctagttaccgctacgagcctacgaccatcattctttgagtcgaagttatacatatgaaatgggaggcgtgattcacgggtgaatcctacatttgagaaattagaacctatgatctgtgaccatattacaagatttgaatctgaaaagaaattttattcttcccaatatttgtttttgcgaaaaaaagagattatttggaattgctgacgtcacatctctctcaggagattcccacccggaagtatcaactgtcgtcgtgtatcggttgtttccgtagatctctgttaccactttccatccaatttcaacaaattggatttggcaaactttcggatcagaaacgtgctcgggatgaggaggtacaccgagaaagtttggtcttttattcgttcgtcgctgagtttagaataagggattgtcttcatcgtacgactctgtttttgttgaaaatcgaatgctccaaatgaagcagccattacagaaccttaatcagtcgcagaagacagctttagctggtgttttcgtgctccttttcccgattctctatccgaatctcttcagccctcttggtcgcgcctctccttctctcttctccgtcagtctctctctctctatctccgatgatttatttggaatttcacattttgggattgtgaagctgaagaattaagtttggcatttgcaggaatggaatgctccaaggcctagacatttgagcctactccaaggcgctcttgatcgacaaattgtaagtgggtttagctcagtttcttggatgtatctactacgttcctctaaatctttttcttcttcctcgaaccaatgtgtggtcgatcagacaacaagttgagttatggtctcccttggcagatcaaggttggaagccttgcactgaatcttatagaggcgcttgtaagtttccaaatataaagctttcttccttctttcatcgtttacattcatgggccctgaaaagtttgtattttgattgatggggttgtcactcttt

SEQ ID NO: 61947 - DNA, 280 bp, Arabidopsis thaliana landsberg
  unsure (1)..(280): unsure at all n locations
tctcgaaaaggattgctcctacggtggatttattaaacngcaccgtttttttttttacaccnaaaactggaaaaccttatcattcaatggagctgcataaaaacaatatcacaccttttcattgtatctttgaaactgaagaacttcaggagccatgtaaaacggagaaccacacactgtttcaagatacttgcccggatgtagttttctgcttacgaacatgaaacatataaagatctttatactataagcatgtcttttcttcctaaaaaactttacc

SEQ ID NO: 61948 - DNA, 1310 bp, Arabidopsis thaliana landsberg
ataaaagccgtatcttgatcatgtttcaaagattcttttatctttaggatctgtttgtttttgttcctttttgttcatttaaggcaaaagatatgtttttcatcatgaaggaattgcttgtgttgaatgcgttttaggtctctgattgatgagttttatgtttcttataacatcagatgcccccgttctttgttaggaagaaataagttatcatgtatgaaactatgatttatctattggttcaagataagcttgtctgatgttgcgcttaaggctcttttgctggtcttatgttgattcgttgactgtaatggccaattgactggtatctgtttctgctaatcagggccagtgataagtgtcaaaaagagaaaaggaaaactgtgaatggtgatgatttgttgtgggcaatggcaacattaggatttgaggattacctggaacctctaaagatctacctagcgaggtacagggaggtatgttgctttgactccctaatcatgtgttctgaaatccttaatatcctagtcaagagattagtagctgtgagtaacatcgaagcttgccatgatagcagttttacaatcccttcaatacgtcttgtgtagaatttttgaagcaagaaagataaatctagaccaacagtcaggatgcatattagtaaattttaaaagacatttattactctctcttttgtgcttttgttgttaacatacataataaaatcaaaatgtttcttattaagttgagactaattcggttcttttcattccctgggattggttgctgacacaccacctgctgatgcagttggaggtaaataaaccacatacttatttctactttatattccattccagtgttgcccattggcttcttacgttttgttgtgaaattatgatagggtgataataagggatcaggaaagagtggagatggatcaaatagagatgctggtggcggtgtttcaggtgaagaaatgccggtatgattttgacaagtatagatgataccaatgctatacagcctatattgtacttagctctgacttcatcattttgattcaatcacagagctggtaaaagaagttgcaagtagtgattaagaacaatcgccaaatgatcaagtaattcttctctctatcacacggcctcatgtacacaaatgaagagcatagtctatatgcatgtaggttcatatccaatcttcacttcgttacaactgatgatagtaggacatgccttgtaaacttgctgatcatgttatattttgctgtatgaatgaactatggctagtttcaaaattgtttg

SEQ ID NO: 61949 - DNA, 1028 bp, Arabidopsis thaliana landsberg
tttatgcaacaaggttcgtatatgataatagacatgtgtacacctaaggcaacaaagaaatacacatacactaacattgttggcagtgtgttttgttgtgccacaggcgtaacaggctttccgcttcaaccacctcttattcctgaccgttaaagaagcttagagtctttggtagctatgaagcttcatatcatcatctttttcttctcaggtcaagagccattctatggtttaaaggatgctcctggctaatctcaacacttagtttctctccctctgctctaaaagctaccccattttatggaatttggaggtggctttttaagcagatcccaatgggatctcctgtttcagatggtgatcatgtcgtatttgtcatctctcaccttcttgcaattgcatcttctcgagagaatgggtttctctttgagagatattgctaatggagcatcatcatcatcaatcactcatgtgccaatctcaagctgatgcatgtatcagcttaattagtttatgttgttttagcctaaggatggctaatcaacaagacaaagaaaatgtctgttaggataatgtaaaaaaaaaataaagcaccaaaacaattttctgtttgaaagactgaaaaaacgattgcataattaagcaaaatgatcagcacaaaaccctgcaagcctttttgttgcatcaacatgtttagtatcttaattcttaaagacttagtcacttaagtcctcaagtctcagattatgtttcttaaataaaaatgcattactcaatgtctctgtttactgttactagtggttaaaaactttggggagtaacatctcataacctcctagaatatactatgcaacacatacaacttcatgcttttcagtttttgaatctagtatgttcataaggatactggaaatattcatactgaacactgtactcacatctcctcatgttctcatgtttcccaatgtatgcttctcagtccagtttgacaccttctagggctgaaaacattaagacgtggttgtgtg

SEQ ID NO: 61950 - DNA, 1087 bp, Arabidopsis thaliana landsberg
atatgctctagaatttatatgtatatagaaaccggtatacaatataaagttttttttttgttttttttcttcaaacaattcttttcctttagaatcttatatgtgaaaggtatggtacgttttgcacacacaaaaaaaagttatggtacgtaaaagtctaaaaggtagacgtggacaagagaaaaacaattaaaatgtgtgatgagactgaaatgagaatcttgatgaataaacatttttatcacattttcattctattctagaattcgtgatgataacgaaaatctgtgcgactagaatcacgtctcaagaaaacaaaaattttcctttttttgtttgtcaagtcatgtttttacgttaggacatcaaatcctgtctcaatggaatatgcattccataacacacgtatcagaacaaggccaaacgaaagaaattgtaattattgccacgtttagtgaaagaagcgggatcgaaccttggccatgtcaatgtgtcggggatagtggtgaccatgacgagccatttggcaataaaaatgaatattttcttgttttggaagttattaattttggagtaagaatggggagaagagtcaatgtggccatttggatagttgaggagtctttgtatcaatcaatggccacacaataaaagactctttatctcctttcactgattctaagggtcaaaagctctctctctctagtctctatggggccctcctcttataatttaactatataaactacatttcttggaactttatgttttggccatagttttgtgtcctagttaattagtgtattcttcttgcttgcttaatagtaccacactgtatatgaagtgttagttgtacggcttacgttttgcttgatatatttctgcatttgagttatatgttttaaggcttaatttctctttaagtaaaacgaatttcaggtattattacgatcttttttggtatgaaagaaacctgtccccttgaccactgttatgtggactacacaacattttttttcctttctttggaaaagacaaaagacattctcctttttgacatttttgctgcactcggcaagatttttat

SEQ ID NO: 61951 - DNA, 2050 bp, Arabidopsis thaliana landsberg
ccgacaaacacttttttgattatggatctactaccatcaatggaatgtgtaatcttcacatctaatatgtatttctgaataatctcattttttcaattattcaactatttcattttaccaagttcaatgttaaccagattagtcaatatttatatatttcgatacaataacaaaatgttatttgtaacatatataagagatatgaattgatcaccactaattatcaattgattttaatttgcaaactcattatattaattatcgggtcttgatcgggtagtcttgtcactggggtagctgtatttcctcagcctcagtctctaatccagcaataacactctggtttggtctcttccatgatcccactccaaactagtcttctgtgtctctttgcctacgtatgggttgtactaattagctctgtgctcttattcctatctgcttttattctcctccaagtataaactgctagctccaaattatgtatttgtaagagaacacaaaagataagaggaatactatatagtttcaccacccaaaaaaacaatctcatatatagtatcataagtttataacctaattgatccaatgtatatatattttcggatataggttttgcggatgaataacgtaatttctaaattaatcaaaactcaataactttgatactttcattgaaaattaatacaatgaattgttgaaccaaaaaaaaattgatactatgaactatatatattaacgtaacacataagtaatatagccctaacacttaagtactggcggatctcaggtctactagagaaagatattacaagaaaaccacccaaatattacattacgcatattattatactatatgtgcatgtgtaatgcaatatgtgtggtgtaacatatatgtatatgtgtgtgtaacatattaaaagtgagaattgcgtgtgtacggtgttgtaccaacgagtttgtaaatatatttggcccctcgtgagcccaagggagaacacttaacgatggatatgtttgagttaaaccttcaagttgaccccataatttttagaaaatcaaacttgaagagatctcaactttcattttcttttacagctcaggcctaatcatttaaattgtaaaagtatgtgaactaattacgtacgacgccacacaatagcatataactatttagctctgggacgtagcaaaaacaaaaacgaaatatacatccttgtgaagtgattactcggccctacgtctacgtccatcttacaagttcacaattatgctttgttcttttgtttgaggaataaaatgtcaaaacattttaaacagcagaggattgctattcttggatttgttgtgtcttttatagattcaacttgttggttgcatggcttgcgtatttggacttatggttttaggcacagtggatctagggctgagttagctattatttaggaatagtaatttttatctcttttttgcctgtggactttgctcgacgtatctaacacagtaacactccgatggtaaaacaaattatttagagtatgtttttttttccaattctgaattttcttctatcggtcataagtagggatcataacacaaaacgttttttttggaatatatggcgacattgaaaaagttattgattattgaatataacactctatttaaacaaaattgtaagaaaccagataaagtttattctatataagtattaacgtgtttatctctttttcataagaaaaaagcttaatgcgttacaataaaaatgatagagggttacatacttacgtatatagagaggtacggttgagaaagagtacatacacgttagtacgttacagaaagttggttcatatcggcaaaaaaacttatgtggaatatttgttatataaaacctctttttaagtcttgaatcgtaatcagccttaaagataaagaaaaagcgtcatttggggttcaaaatgtgactgatacaaagaataggtcggggttgaaaattgataaaaaccaaaatttggttgatgtcggttataattataaagtagggttc

SEQ ID NO: 61952 - DNA, 917 bp, Arabidopsis thaliana landsberg
cctgccttctcagactggctgcaaaaagactagatcaagaaccagtaataacagcatttattttgctcaccggatacagaagccaggcagtcagcatcatcttcagtagtagctgacgcagatgccactagagaaacaaactttcagcttgtatatagatttgataaagaaaagagttccaaaccaacaaaagttgtaaagcagaggtcaaaagtctggaaacctttaccttttagttcagattccacaatcaatgaaaagagactagctgcagcatgtatcccctcaggtggtagccacgcattacccccagaaccatccattgactggcaggagtcatcacaacctttggtcaaatagtgcccactagtatctcataggacacaatttactttaaatgaatcattcttctagactataaaaaatttgttggcaaagacaatgatcggtctttataaataccctgacaatcacaaagaaaatgcccaaagtacccccagagagccagatatggcacagtttcataaacacagtgattcatgatattatggatagatgcagcagtagtaaaataaatcttaactatactcacagtaaggagtgtggtccaggtatctagcaagatatcgcgtgcctcatagctccaagtctcttcatcagtactattcgccattagtactttgacaacttcacccattaacatagataagagtgtaagggtgccaaagggcctgaagaaacagaaagaacaactttattatgaataaagaaacaccaaatggcttttaactgctaaaaaggttatatgccaaagaccttaatgatcgcaagagttggtcaaagacaacaggagtagtaacagtcccaatagataacaatgcgcggcaaccatcaatcatctctctgaaaaaaaggtt

SEQ ID NO: 61953 - DNA, 1393 bp, Arabidopsis thaliana landsberg
aatcacctatcaaatgcaacttttattttcatacttttcgaatatcaatcggtaaatggtataacataaaaattatatatagtacacagtatttcatgtttttgaaaaaatcactaaagatttgtctaaattttccttcaattttctatctcctagacttcagtttcaaaatatctatctcctaatatactcagcttcttattatcacaaatttgaataatataagtttatacatttgagttattattggtcatgaatagtcattagtggtcgtataactatatttgcatgcaagattatttcttaacaactctcatgaatatgtaaaccaagaactagaaagaaggtcaagaaatatacgagaacaaagtgaaggatcgggagtgatcacgccgcaaactccgggaagtctgagagcctttgccttatcaatcttgattccaagttgtgccgccatgtcaccggagaggaggtaacataagcattgcggcgagctctccactagccccgctagcgccggacaacacgtcttgtccggcttggccgcaccaccaccttctccgaccgtaacgtacgagagacagcctgtcatgttcattaggttcgccatgcagtctggtgcacccgatggtcctgacgacggagacatatccatttgtgctgacacatgtcctgttagcgatgctacgatgagaacaacggcgattactacaacgttagacattgttcttttgcgttggtttgagagacgaaaaaaaattgtgaagataaataatctcgtgagcggaaacaaagctatattaaaggattttagttagttgccattaatgcgtgttaataacttccacctaccctcttattttattttcctgtatttaaaagtttcttattataaaacaaaagctaataaaaaagttgtaaaatacataaaatgcttattaatttgttgcggtatatgaaatgaactgtggtggcgagatcaaatcagtcgaatagataatgtgttatgttttcctttggctgagtaagaaattatatgttggaaaattataagatttttgtgatagtattatgaaaaccatcagaattcacaatctgtaccatctcttaaaatagttatgtttacatcaaattaaagtaacgaacaacaaaccgtacatgcaagggaataaatcatatgatgattatatatgtgagcaaaatggggttgttgctaaagtagaacaaaaaattaaaaaacaaaaactataaataacaagaaaaattattttaaaataacatctctctgaagaaaaacatatctagagtaaatgtttttgaaaaaatatttaacatatatgaacttttggttttgtttgattttggttcgaaagtggatttatttgatgtttag

SEQ ID NO: 61954 - DNA, 689 bp, Arabidopsis thaliana landsberg
ttaatcctttgctaccagacaaactagatgtttgcttacaaagaacactctcaagagtccctaatttccgatgagacgatctcggagacctcggtgaggtcacatgtcctgtgacctgagctgaattcctttgcttggcagctaaatcacttttctctttcttgttcgcctgtaattcagttacggtggctgatttcaacttttctactctagcaataacatctccatcatccttatctggcacaagattccttttcggttgtgaatcagccataactcctatagaaatctttctagattgacttgatggatggtagttactgccgaagcttctatagtcgctcatcttttcctgaaatgtatcaccacaaggttaacaattctgctgggaaaaagaatgtaaatatcaacgaacacctaatcactcatataatttctgaatagcaacacaaacagagaagtaaagcagtacaacgcaggctatattcagcgataatggatgataaattaatcattaggaatggtaaatttctaacactcggataaaaaatttggtaatagaaaatcccaaaataagaaggtgctagatctggataatatgacgaaaacaagagaagcagcagataatagatgcttgaaacgatgaacaactagcgagatggatatctctagcaacgaattcattggag

SEQ ID NO: 61955 - DNA, 915 bp, Arabidopsis thaliana landsberg
tttagataatccctgggacatctctggcagagctgctgcctcagcttctggcgatggatgaaaatctccttcccttgtgctaatatctggtttctgtttccgggctttgctctgtggatgaaggtcatgggaatttccctttttgtctgaagatgaagatcttttgccagtttctgtgctttcagaacgtggtggagtattgctcttgctcgcctccttccgactccaatcagcttcatcctttttgcgagaatgagccttacggcattttacaacagtgttttttcttctacccctttgtttctttggcataacactggaattcacagcagtgccaatttttccgcgcaaaccttcctcaaaagaaaatacactatttacttgttctgtgcacttgcgacctaagttggcaccagctttggttttcttctggacacctttggctcctaccctcctctgcaacaaagatctggttactggccttctggtagcattttcagggctttcagaatcagtttcgatagaatctgaattgtgtctaggcttaataagaggatcatcatttgaacccttgtcttgactcaacttgaagttggtcttctcaacttctggggtctcagagttcacatcttcattatttgctggtgaagcttttcccaatatctcccacagttttgatctcaaaacatcagtagttccatttgtctccttccctggcttatccatcttctctctctgtgaggcaaccttttgctgcaagactgcagatggaggttcttccatcctctttggactcctattcatcactctatcgttcctgccaccattcagctcaccaagactgtgctgaggacttctaatgggacagttttgaaatgattcacgagctggtgtctgatgtgcttcattaagtcc

SEQ ID NO: 61956 - DNA, 548 bp, Arabidopsis thaliana landsberg
ttactattctgagataaattcccttacggtatttattaaaaaggataacggacttacgcatgaatctattcgtaatcaatgagtggaaaccacttttttggtgtcatagttgcattcgtgccggccgcatcatctaagaagcaaaccaaggagattgtttttactactacgttgctcttgctgtcttgcaaaagatcaacttgtaaatatccacccataaactcaggcccgatatccaaaatccagtatagacactaggcagaacactataagtagcaatctacacttcatagacaaaaaaggctaatcaaacctagtttcgtcttaagaaaagtaataatctaaaacaacactcgctcaaaaacaataaacaacataatttacgtcatgttcttctgtttccctcaaatcgaatgaatccatttttccttgagtggtggaggttcatcggaaataaccataccgatatttttcatgaccacaatactttattccgtcgtacacgtttatctacgatctagcaatcaatctacgaagccaagaaacaa

SEQ ID NO: 61957 - DNA, 324 bp, Arabidopsis thaliana landsberg
  unsure (1)..(324): unsure at all n locations
nnnnnnnnnnnnnnnnnnnnnnnnnnnnnnnnnnnnnnnnnnnnnnnnntttgtagagagagaaagagtaataataataaagtggaagaaaaagaattaggagagtgaaacaagaagaagaagatgaagaagaagaagaagaagatttgatgaagatgggtgtttgaggaaactgagttgaggctgggactgggactatgtctacctggaaatggaaccacggtaacannnnnnnnnnnnnnnnnnnaattaggagtgaggaagagagggttctctgagactgaaactgatgaaacagtcaacggtggtttgatggttaaactt

SEQ ID NO: 61958 - DNA, 1124 bp, Arabidopsis thaliana landsberg
gtggggatactgaaaacggggcctaaaatcatgggcttaccatgtctccttgagtgtgccaattttatgttagaaacttcggagtgtgccaatttttttataatacttagtagtatcagtgatttcatgacatagagcataacaaatttaaagtgaaaaatttgtgggtccatttagatttttgagtctgattcttgataagatcttggatctggaagatcaacgcttgtaccacttcaatattattattatacgaatcatcgtcttgcaataaacactagagttaaaatttcaatagcctaagcctatctaacctagtccacatgttatttataacccttcaatgtatattatatactattaaagttaagaaagtgacaaagttttgtcctttcgaattctgcaatggataatctatgaccacttacgcagatctagaataatcttacgagtgatacaactatcagtaagaaatacaaaagtaatttcttatggattacataaattattataatattttatcatcatagtccatcataaggatatataaatacagagtctttgttcaagcaaacatatcaatcaacaatacctcatctttgattcttgatttgattcgatttagtaagcaagaaaatgggtgttatggagaagaaacttcgttcactaaaatgccaagtgagaatagtagaagcaagaaacgtagagatcaagtcacaagctagtactctgttcgttagattctatctctctgcaggacacaacagaaagatcgaagtaaacacgagagagctctcttcgaaatcagaccaactcatgtgggatcaatcttttggtctggagtgtcaaggggacgaagcagctgtcaaagaattgaagcaacagagagtcgtttttgaactacggaggaagaaaatatcgacgtttcttaggaaatcatctaaatctgaggttgttgggagaggagaggtttcttgggaatcggttttcgagtcgccaggcatggagattgagagacttgtggtgatgggtgaatccaaaaattgggtattggaagatgaaagacctttgttgttgaagatagctataaaggtccaagctttagaagaaatggagaagatgct

SEQ ID NO: 61959 - DNA, 542 bp, Arabidopsis thaliana landsberg
agaaacttaacaaaaagaattcacaaacaccagccacgtgtcaccttttgttaagccagtcgtcactttaagtaaccgcttgtcactttaagaagcggtcccaagtcaactcgcgccactcaaatcaatcatgcttatgtaaataacaactaaacgcagacgcaatcaccattttctttatagaaatgctcaaaatcgtgccttttaaggaaactgttgctttgcagaatcacaaaatctatataccaaccataagtttccaaattttgttctaaaaatcaaaaaaattcgtatcatctttttgtctttttttaccagaatttcatccttatttcgtgctaaatcattttccaaacattcataatactttttgttggtttatggccaactaacaaaatatcctctagattttcttctttgtgttagtctatataaagcaataccacagtgatcctcttttttaattcattctgtgtttatgtcaataatcacaatggttttgggtaatgaaagtttttgtctttgtgacattactctcttta

SEQ ID NO: 61960 - DNA, 221 bp, Arabidopsis thaliana landsberg
aagcacaaaaaccataacaagaggcaaaaaccagagccggcaaaaaccacgacaacgaatactcaaacatagaaacacgtacagtgcagacgcgcgaacgaagaacgcaaaagcaactgatcagttaccagcgacgaaagccaagctaaggaacgcaaccaaaggccaacatgacaaaaaaaccaccagattcaaaggcgaaagcttcccaaaacaagcct

SEQ ID NO: 61961 - DNA, 642 bp, Arabidopsis thaliana landsberg
  unsure (1)..(642): unsure at all n locations
tatcactacaatcctacttttaaatactatataaagttcatagtttacaaaataaaataaaaaccaattagcaataatgatatataatatgttaagaataatgattgttttatacgcgaatctaacgtgttcaacatgttaaagtatttattttttatagtagaacaaaaaactttgtaaatatctattttgttctagtttttcaaataatcaaatttggtaaattggtaaacataatcctaggagattttctgagattaaaagtgttagacaatgagctgaagttagcaatgaatcatgtacatattaggggaagaagtataagaagctgttttggctaccggcaatagctccgttgatcgccgtggtagtgtcaacactaatggtgtttctgactaaagccgacgagcatggtgtgaagacagtgaggcacatcaaaggaggtcttaatccaatgtccattcacgatctcgactttaatactcctcatctcggacaaatcgctaaaatcggattaatcattgccattgttgctctaaccgtaagtatcattaaccaattttccatttgaacaatattttaaattttatagtttaattaattatngttttttctttcttaggaggcgattgcggtggggag

SEQ ID NO: 61962 - DNA, 1511 bp, Arabidopsis thaliana landsberg
ttcacatgttcataatctgtataaagcccatttcataatttgaaaaaatgattactaaaaaaaaagaaaaaagaatatttaggaggagattaaagaagaaaaaaaccttaaggcctctttcgatgtatttaacggcgtaaaactctccgttggctttttctctgacaagcttagcaactccaaagttaccggaaccaagatctcttaagatgtcgtatctctccattgatcggaggatcaaagaacagagaaaagaaagagaatattgttgttctatgtctctatcaaaaactatgtcgttttgcttcctcgaggttattaaagcaagatgctaaagaatttaagctttttttctctcatggttcagtcacatattagcatatttatatacagacatacgtacagatacagtcagcaccaacttacctttatgggcccacgagactgttgggccgtcaatattattgttgaatataggcccatttgacacgtggcatctctcaaaaacatgaacaacaaggacaggaacaaggtggtgaacttgcaaaccgttaaatttggtttgtctcttcatcgatatttatgatgtgtaccttcttcggaagagaccaagaattatacgttttctcgcaagagaaaaataattcattgtcaatacatataattaatccttgtatgttatatagttcatcaacatctcagagattgaaaagtgaatacctgattaataaatgcgattacccatttttagtaatatattcaatcttttaaattgaagttttctaccaaacttacctgttttaaaattaaataaagatacctaattttcttatcttagaaaacataaagaatggcccacattttagatttcgtgatcattttccgcaacccaataaacaaacaaactcatctaaatattataaatgaattaataattgagcttaatctttatttacaaaacaaaattttagatgtcgaccaaattaacaggtcaacggctaaatgatcaaaagctaaaagccaataaaaaatgttgcttaaacaaattacgtggtctattaaacaatgcgtgccttagatcattatttgatccttctgtttgtttctttcattgtgtatttactttttcttgctttttttttatagataggtaagcaaaatgtttagcagacttcgttatagtcgccccccataatgtttttgtttttttctttcattcttatcgttttagtataatgtattagcatataaataatgtgtgtataatcaaatactatattcgtgatgattcaaacagctctgttttttttaagatacgcttaacaaaatcctctcaatgatctcttgtgatcttaaggaaaattatccagcttagagttatcttatacatatccttcatatgtgattttgttaagacttgagatatgttaatctaaacaatttgttaagacacgaacttacggaattgagatatagagggttaagaagtcaacgccttgagaaagcgaaat

SEQ ID NO: 61963 - DNA, 535 bp, Arabidopsis thaliana landsberg
  unsure (1)..(535): unsure at all n locations
aaccgaactctttactacgaatgtcggatttgatagattctattctagaactgaaagggatttaatcaaattacatagtctaagcctaaacctttttaaatatacggattcattatcttcttcataataaaaagcatatacgaaataatcaattttcccgctttgctacactgtaaactattttcattttaatgtgcaatcataaataaactatcccctaataactttcaactatatggatatatttttaaattgtttttgaaaataaattgctgagtttactacaatattattcactttcaaaatataacatcaattgaaatcgctattcaaccatattttttttattgtatcaccatctatattaactctatgtctgatttttctaccacacaatacttttataaaattcactacatgaatattacaccatctatactagttggtcaaagcacacacacgtagatcaaactcttatttgaactccaataatgatactngaattcctcattagataccgatacaatctctttca

SEQ ID NO: 61964 - DNA, 587 bp, Arabidopsis thaliana landsberg
  unsure (1)..(587): unsure at all n locations
cttttacccgaattctcctcttcttaccgtatgctccttattaattntgcaatacaacattgttgtatattcttctgcaatctattctagtatatgttcttcaactcttaacttgttgttgtagggataaaggcaagggattatcatacttgagagctggtcacaataaaaccggacatttagagttgacggaagctcagtggcttcatatcacaagtcagttaaaagggagatgacgaaagaaagaaaatagagttctttgtttttgtcgactctgaaaatatttctatgcatccgaaaaaaggaagtttgtatggatactttgattcaagaatataaatgggactacgaagaaaattcaatgataatcatattacaatctccctcacgattgttattggaaactttccaatggtttttggtgaggaaggaagacgaccatttgaatcttctaatataaaatactgagatgtgttgccaaggcatacagtgtgtggctgtggtaatataatacgtcgggctaaccacacattccgtgaactagggtagatttctttcaaaatagacgactacatgtctacattttt

SEQ ID NO: 61965 - DNA, 572 bp, Arabidopsis thaliana landsberg
  unsure (1)..(572): unsure at all n locations
gtgcgggtttcggccaagttggctgcgtatacaccgctcaaggtttcgagtacgactggagcggcgtgattctcggcccggacctggtctggcgaaatggcggatgggtcgttgaccgttccgcatccaaggacccggtcttcaagaaggccacaccggaggcagatgtggaccgtctcatccgaaacacgtacaaggtccttctgacccgcggcatgatcggcacggtcgtctactccaccgatgcgcagactcgcgcaaagctgctcgaactgatcgagcagcgcggggaacttgtggtcgccggtcgcgttgacggctgatccgccgcaaggacatgcggacgagccgtgcacgcacgggggttcagccactacacacaccttcngcggcgtgatggctggaccctcccaccgttgcggtgtcactcatccagcggccagccgcagagttcggcccgggcttcggtctggacggtaagcacagctctatcgagccgcttcgagtcgcggacgtgtacgtgggagccgctgcagcgacttccacgcacttcagtttgacgggcaacacac

SEQ ID NO: 61966 - DNA, 1793 bp, Arabidopsis thaliana landsberg
tatcaccattagttacttatataataatgtgatgtacgttggtcttggtgcatagctctaaatcaaaaacgagctcgaactttgatggacaattatagactagagaaggtcaccgcctgagtaattacttctcataaccaagtgtatgatactataaaccaacgtgtgagtctcgagttatcccaaggcaatgtatgtctaggagcacaagctacatgggcacgcgactcgagagtactactcaagtcattctcgtggacagccttagtatacaagcaagaaatgctggtcatatctctaataacaatgaaaaaagcttacatagattcttggaatttgttcgcgaacattaaattcatcaaaattttataataaatatatgtagtgcattataggaatatatatgtaaatgtataggtaaaagtaaaactatagcttttaaaatagcctaaattattattggttattgaaaatacactaaattgaaatctaaatgtaactatttaaaaataatttatcgaagttccattataattatttttattcatatataaataacttttttatgtacaattcaaacttttaacaattatcgtaaaaacatttattcattaatattctttaaaattactctgtagaaataagtgcccaacccaatcgatcatttgagctaagctctaccttactagcgttgataggaataacatgttaaatgaaccaaaaggaaactaaaagttaaaccaatttgtttaggatctggtgcaagacaaattgtctggttcggagagtttgattttcacggtgaaaatttcaccgaaaccttttagtaccatgactcatggcacatgaatcgtgactcctcttcttacctccacttgtcttgactcttgagaccgctgaagtgtccactgtaattttaagttttattcaacgcaaaaggttttgtttaagagatttgattcacggcaatattaacattagtgactggtcattaatgccatttagtggaggccaccaaaggttacgattctctaatttactaaagacaaaacaggggatctctaagatcaggctgtaactaagttattttcttcagttctaatttaaatatttaataaaaacctggcgttaaccatgctctcttgggcacgacctctctctttatcataattaataaactttttttttttaagttatggagactttgaacatagattaaaattagtccagtcactgacagagtgacattgtataagttttcgggggtattgaagggatatttagtaagtaaacccttcggtcgttagacataaaaattagaaaatttatggtgactcttagaaagtactatattctgtaatagagaacggtccatgctcgaatagatcgtgtaatggttatttgggttgcactttaacaaaaacaatggttttaatttgggttgcaacgggtgttagtctgcctttaattctggaaagctgatattctgatttcttacaataattttcgtatttttagtacatgaaacattgccgttggtgggttaatgtaattgatatattcttagtgggattagacgtgaatcttttctttttgtgtaatagtactactcaaatttgtgagatagtttttagaaaatctgttgaatcatgtaaaaggtcgaaactagttgaaagacaaatggtaagataacttataactctagttttaacggctttaactggtttgaaacagaaaagtttactgctttcgtctttctaatatgttagagacattaaatttcgtacgatgag

SEQ ID NO: 61967 - DNA, 1160 bp, Arabidopsis thaliana landsberg
aagaggaagaaacagaggaaggatctgtgaatccgaaggtgaagaagactaagaaagtctctgatcttttgtatcctcgtagcaaatcttacgccgttactactagtacccctatcttgtaacttctcttcttcttttttcttcttcttaattttagtattttgtggattgattatcatttttctagctcgatttttcgtgcactgtgaaatactattttcttagcttgattttaataattttgtggattgattagaaataaataactaaacctactctagcttcgaatccaagtttggtttacatcgtaagtttgacgtaaatatattaggtagaataattgtgtggaaatttataatttttgtaccttgttaatcagttgaactcataaactgatatatgtatgcatctcaattttcggatttatcatgtcattgataaagttctgttcagatatacgtatatacgatgattagtgactattattaattcaaggacagcattgtgctttaacactaaatgacggaaagcttatgaatcatggatgtttgtaatcttctctttcgtgttttgattagtatagtatattgttgttttgtcctccaacaactggccactgccaaccaaatctactttacctaattaagtagagtatatagggctgccccactgttaatataatgttttctaactaattatccgagtgtcgacacaaattatatacactgaatcaatatttcttacgttttctctactttaaaaaataaaattaccatcttcttttcatttcgttagtgacatggctccactaattgtgacaatgcagtggttcatagatgggattttctatagattaatagcagctaatactggataaaaaccaaataatctgcgaatcacattttaagttgtaaatgttagaatttccgattcacttgcatgacacaaagagcactagtcattgatttgatgtaagaatacagtgaaatttggtacaatcaaaagcgaaagagttttatggtttatggtgttgggggctttttggattgaaattagaatctcccaaggttcccttctctgtgtgctgttgtatctatatagccaaaaaaaaaatctgtatgacgaaaaagccatctcttgctttcttatcctacatgtca

SEQ ID NO: 61968 - DNA, 1184 bp, Arabidopsis thaliana landsberg
agctttcgcgtgcatattacaagtacagtggaagaaaatagcatgatttcacattgagtagctctttctttttcttctagaattgttcccttctcttttgtaatgcatttttaactcttctttgttgagttattgggtctcatgggccaaagaaactgagtctctacaaacatttggtacgatacattctatctttttttgcttttcttaaccattaatatgtgattaaaatgaaccgaattgagaccttgtagaagtagatatataaatgtgttgtcactaaatataaagcttcttatcatttccctcatacttaacaccacaaatgcttgatcatgaaagtatatatgttaattagtcaactaacaggcacgaactattgataggatcatatgactgatggaacttctttctttattttcattgctttaatttaggaattacagtagtcaaaattaaactctacttatagctagtttcttggtagctctagtggccctatatagaagtgttttcacttcagattgtacttcctatatatatgcctcactaattgcatagtgttagatcacagcttaattaggaagctactaatcatggagaacaagtgaattaaatactgtttaatttgaaatcttgcaatatagatcacagacgacacgaagtaagaatgaattgtgataattatatgcattgagatttaaaatgaaagaaaacattgtgtactgaaatattaaaactaaagaagtccatcacaaaagatgggtttatcgttagagaagtgcaaaaactattggttaacaaacttttgtgttattttatagctatatacactgacatttatataaaacaagccttgagcaaggttaattaacccaaattgatgctataacatgaattaatgccctatataatagcatgtatatatatagatccctactttttctctaagagtctctattgacgttgtatttgattcgaagtttcaaaaagtccctctaatgcatttttgtttctctcttgatctctccagcatggccaagatcctcagtcgttatgaattagaacaggctgatgatcttaaaaccttggtaagctctttacttagaaccttgcatatcaggtcgcatgcatatgtaatcaagatgagcatctagaagatatcttatagtccattgagatgg

SEQ ID NO: 61969 - DNA, 183 bp, Arabidopsis thaliana landsberg
ctgatcatgcactggctgcacttgtcaaatgctgtgtagctgcttagatgccacagcactcgcaagtttcacatccggcgactctactcccccactcgagctctcgtgttggtggccggcgtggcgaaccgaaccaccacctgatgatgacagcgcgggttatcctgtgaggtcgagagcacg

SEQ ID NO: 61970 - DNA, 452 bp, Arabidopsis thaliana landsberg
  unsure (1)..(452): unsure at all n locations
taccgaccaaataagtttcatctttcagttttcttcatgttatttngattccgagacattctgntcatttatttggttaagatttagtaccaacagtcaataaacagctaatcatatttgttttggtcagtcttccttttagacccgacccggccgacaatattatcgaaattttgacagtctatacaaggtttctattttgagctaaaacaatgttcttgcacttttttttatgcatgactcgaaaataatagattgagtgccataatgccacaatggctctaatgtgatcgacaagtatatatataaccatcactaacaaagtataaccattaagcattacgagaatttccttcaaacaataatattcaattatgagaatatatatgttgattggaatctggaagtggacattaggattttggcctttcgactattgatatggaatcatg

SEQ ID NO: 61971 - DNA, 493 bp, Arabidopsis thaliana landsberg
cacgatctgccgtcccggtttggtgaaacccttgcccggtttgttctcgctccagttctccagatactcgcgctccagcacggccaggtcggagacatccgagggatcgggcgccgatgcgagggtggcggagacgtggtaggtggctttgtccctgtcgtagttctttcgggcacaggtgatgatatctcggaacaactccggagcgtgccgggcggccacgcggagggcctccaggtaactcgtgccggcggtcttgacgtggaaccggcctttcgaggccctagccagcgcggggtacatcgaaagcttgtccgaccccgagtgtaggctcagcttgtaggggccgagcagttcggcgatcgcggcgtggtcctggagagaccgctccagcagagagaggtcgcccttgaaatcgacgcccttctcgaagtcgcccacgtaccggggagccaggctcaccagcttcattccgtgcttttggcactggtcg

SEQ ID NO: 61972 - DNA, 1396 bp, Arabidopsis thaliana landsberg
  unsure (1)..(1396): unsure at all n locations
tccctcctgggatcgctgaagcagccgagtctgactcactctcgctcttagagctcagtgaagagaagaagaatcctcgtttccgaagaaatggccgctaggctacgaagccgatgctgaaacgccatcgttttgccttgacgccgactgttcaaccgactcgagcgagttaaatctgagttcgctccgtgagttcactcggactctagagaaagttggactgaagacggtagagatgctggcgaatgcacttgggtttgnnnnnnnnnnnnnnnnnnttaatactctgatgtgggttaaccaaggtgttcctgatgatgaaccggaggtaaccaacggattttatccttttgttgtttgtttacagtatcagataagggaacagaagtattgtttgctaaccgagtctggttgggtgtccgttttaccccgagttgactcggttcttgtgacgttgggtgacattgctcaggttagttctcttttgcttttgacaattgacagaacacatatgtctcttttatttatctataattaattggttagttgtcttccttaaataattatcaaattatcatcctttgtaatggaactttattccactataccgttaactggctgttttaatgtattttaaacattatccaaaataaatgttttccaacgcatcgttcaaaaagagaacaagaatttggatatttccgatatttattgttgacaacaacaacaattgtggagcataaccggggaatgtgttttcacttttcgtttgaaacagatttatggcattgggaaagaaataagaatttggaaatttccgatatttaaatacttatacacatcacatcgcaattgtacttagtgtcctatagaattcaacaattcttttttttttaggtcaaaacctaacagctttctacaatatagttttcaacttttgaacagctaacaaacaacttaaaattggcaggtttggagaaatggagaggtcaaaagagtgaaatatcgaccagtgttgtgttcaggacaaaaagatggtccagtaaagtgtgtaacaatgacattgatgcttacacttcccatggacagtatggtttcatcattgaaggatatgatcagtgacggcgacaaagaagaagagtatgcagaggaggaggaagaagatggaggaacaagaagtgatgagagaagggcatttaggccttttagtttcaaggagtacgcatggagagtgtaccaagaacgtctcttcttcagggatccacttgacagatacagaatcaaatctttaaaagattgacgaaccgatgtttgatttgtttgtttctttcttgggttaaattggtactatagttcttggtgttacttttcttcccccataaaatctcttgatttt

SEQ ID NO: 61973 - DNA, 285 bp, Arabidopsis thaliana landsberg
cccccccccccccccctcccccccccccccccccccccccccccccccccttccccccccccccccccccccccccccccccctctcccttagtccgccccccccccccccgccccccccccacccactctcacccccccccccccccccccccccccctcccccccccccccccccccccccccccccccctccccccccctccccccccccccccccccccccccccccccccccccccccccccccccctcccccccccctcctcctccttccccccccccc

SEQ ID NO: 61974 - DNA, 434 bp, Arabidopsis thaliana landsberg
caaaaaggggatgagatgcctcatgtgcgcgccttcaggcgcgtcatttccgcggcgagatcgtccagcgcgatgccggcggcctgggcctgggccgcgacctgggcggcgaagcgctgggtttcggcgcggagattgcgcggcggcggcggcgcatcggcgacataggtgccgcgtccgcgcatcatggtgagaaggccatcgcgctccagctccgcataggcgcgctgcaccgtgttgaggtcgatcctcagcgccaccgccacctcgcgcatggtgggcagccgcgcgccgggcttgagcagcccgcgccccaccgccgccgcgatctggtcgcgcaactggacgtagatcggcacgccattgtcctgcagcagaaggtgattcagcatttgtcatattgtatggtaatattcatacaatggcaagctgag

SEQ ID NO: 61975 - DNA, 1389 bp, Arabidopsis thaliana landsberg
catactaagttactctattcttaagcattttaataaaatcttcactttggaaatcagaaaaagaaagagtggacgaaaatacctttagttggaagaaatattcaaataaagaagaaaaaactctaccaaaaacctatccaccactcaaacctccccaaccaaaaccccatgacttggtttacccttttacatacaatatctaatctcataatgcatgaatctatacctttatgcacttttgcggatctttttccaacttccgcatactaactagcatatctatctctaagtcctccctatatatttaaattaacaaattaaatcaacgtaaaaatgtcaaaaatatatattaatgttttgaagagaggtaggtttcaaggtaagttatatgatagagtttagtattcataacaaagattcattatagtacaaataataagttatagcgtaaaccggtagagaaatagagaggaaaaagaggatcaaaaatgtacaagagtgcgaaatgtgtgactcccattagaaaagacacaagtttgtataatgtttcattggtaaccttagttaggcctttctctttccatgtgctaacaacaacatacgtatatatataaatgtctcacaaacattaccttcagccattctcttatttggctcattcgattattataggaggaaaccatggagctaaggaaatctcaagtggccatgcctgttttcttggcaataatgagtctaatggtgagtcaagtggtcttcgccgagaaagattcaggttcaatgtcccctcatgatcgggcattagcagaaatgcaagcccttaaagcttcattggttcggcgaaatctaccggctttggtatctcctcctcctacccctcctcaggtatattatataaccttctctagtcataatgatcatgtagtttatgtatgattgagattgctcaaaaggttttcatcaagtgataacatataagataaaatgatgtatgtcgtacccagtccgttcgtgtaccaagtgatatcatatggtgccgatcccacagggaaattgtatatcacggatgcaacattaaaagctatggaataagcatctgatggtccacatcatggaccttccatgctaggtataaatgatctcggaggagcaagaatttatcttaaaggtgaagttacttaatcagtccgcctctaccgatttccttaaccggcgcccgaaatcttcttggtaagtttatcttttacttcccatctcatttctttttttgcaactttattaaacttattcattgcggtagttatttcttggaagtttacaatagaattccattttttcctactgttattacataaaccccaaaaacatgtttttataaaattattcttc

SEQ ID NO: 61976 - DNA, 452 bp, Arabidopsis thaliana landsberg
  unsure (1)..(452): unsure at all n locations
cctgtcggttttccaaaacaaggctgtttgtaccaacgnctttttatttctatncnnncnactcatatcttattgataatttcaatggctttatccagtgtgtcttcctttttcgcaaaacaaaaacgcagtaatttctgttccgttttggtattataaaaaacagatacgggaatagccgccagttttttttcagcggttaacctgcgggcaaaatcaatgtcgttttcttcagaaattttgctgtaatcgagcaattgaaaatatgttcctttgcacggcactgcaccaaaacgcgaccccgcaatacctttgagaaaataatcgcgtttattctggtaaaagttgttcaacgacaaataagtttcgggctgtgaaaggtattgcgccagggcgtattgcaaaggcgtattgctgcaaaagacctggtactggtgcgctttcctgaactc

SEQ ID NO: 61977 - DNA, 471 bp, Arabidopsis thaliana landsberg
  unsure (1)..(471): unsure at all n locations
acccaaagtctcattctctttacttctaattacacacacctgttgatataaaaaaacaacaactcaagactgatcctttctatgcaagaaaatgtgcataagtcaacgctaagtagtggtcattgtttcaagtttttcatctagatcaaaatttaatcaaccacctcatttgcaagggaactcacanatgctcgcttagtctattgggtgcttatcaatttgaccagatgtgttgtgcgcataaagcagaagcagagaaagaaaagcgctagccacgaatattgcatcaaaccatcgatgatagaaatcaaactgaatatctccgcctaatacatctgttattatccctctgtgccaacaaaaacaccattcgtttataatccacatttcatcttttcaacagaagaacggttgtaattattgttatagtattatcttacgtacctgtactcatttctcaagctttttctt

SEQ ID NO: 61978 - DNA, 223 bp, Arabidopsis thaliana landsberg
taggggaaatggtagacttagtttgttctcttttctatatgatacaatcacaacacttactacacttgactgatgtgtgtctatgcgcagcatccgtaaagcgatgcactctcaattctgccacatgagtggacgagtgatattctctagccagctgctttgattagtaagtgattctcaagccgaccttaagaggcactgaattcatcaatagcaagacact

SEQ ID NO: 61979 - DNA, 498 bp, Arabidopsis thaliana landsberg
gttaatccacatattttttaataagtttaattaattatagacgaatagatagctagaacgggatggtaactccatttccacaaaacagtacttacttttagttcctaaattgatagatatgaaacaaaaaggttagatgataatgaacaaactgataaaattgaacatttcttaaagtctaggagcggtggacctgaatctttgagaatgaccgtgtgactcgtttttgggagatctacatatgcacctcgattgttaaatatctagtattattaagtgaaaagacgcaaaaacatgtaatataaaaagagtggaaaagagaaaagtcatgtaatatgatttagtaagcgttaattaaaatgttctagtggaagaaagaacactagcaaattaaataggcaatataataatgccttgattggagatatttattatgagatagggttaactatttcaggaacttatatcaaatagtctccaaaaggaagaaaacaaata

SEQ ID NO: 61980 - DNA, 688 bp, Arabidopsis thaliana landsberg
tcgagccaatgcagccttggtcaatgtaaattctaacattgatcttgcaagagcattcagactcatgaggcttcctctctatagaaacaatcctcgcatccacccaaacctatgcaagaaacagatacagagtattttgatgagtttgaagatgcagagtatttgaagaatcaaattcacgcgatttcagctacatgtaccggttccaagtcatcctcgtggatacgatagagaacacaaacatcgatatcaggccgaaggaaacagatacagtcgctcaaagccgcttttcttgatctgagaccaagcctttggaaaggacggatatcttccaacacataaccattctctaacagacgtattgtcatcattccatcttcgatcctcatgtattccacaggcttccatgtacccgagcagaagaactcgaaagctaaagagtaagaaccggaacattgttatccattagtcaaagtgatccagtctatactttggcatttcaatccaacaatttccaacttctcaaagtactgaatggtttataactttaagttcagctctgtggctaacttgcacttaaatgagaacaaaagaaaattgatataaagggaaatgcacttaccacatggatcaaatggatgcttcaaattgtagaaacctcttttcttcaaatttttttataactttt

SEQ ID NO: 61981 - DNA, 508 bp, Arabidopsis thaliana landsberg
atgtgatgtcttgccggcttcttgtgctgctgtggtacattacggggcagtttcatgcttggttgccggattgctaaccatagaatacatggacttggcggaacaggttggctatcataccaattcttgaatcctcgatgctccagctgcttttttaaaaattcttcagggatcacacttgaaatttgattcgcatttatgtatgtgtcataaaacagtctctgcaagctctcaaaaagatatctcaggagcacccaactgcctgttcgcgagctggtgctcttatggctgagctctcgtatctggatttcttctacactggtgttcaggtgggtgaatgatctaactcctgttttatgctacacttactcgtgtgtctaatgcacatgttacttggctacttgtagcgcgctgcactatctactgctgacaacatgtgcaagatactacgtattgatgcatctgattatgtcatggaagctgcacctttgatgacaaacctacttca

SEQ ID NO: 61982 - DNA, 647 bp, Arabidopsis thaliana landsberg
atgatatgtatgcaagttaaattgcattacaaatagtaaactactttaaaaaaaaaaaatacatttatgagagattcacttaaatatcttaccaatagaagtaaaaaatcttttaaaaatttaacaccacaatgcactataactaatgatattatattggtgagagattcaatgggtcgctcactaatacataggctctaaaaacaaaaacaaaaaagacttagatctaaaaaggaaattgagaaacattttctaaattcctggataggaaaacgtcaaaacgacattaatcaaggctttacgtggggtatctctctatctatattgcaaatttgttttgtaataaaagttcgaaagacattacatgttaactctttcttttggccattgacttaagtcggtgataaaaaatactctagctaggcacatttgttatgattaaagaaaatgataggggtgaaaaatatgataggatcgaatgtacaatttcaaaaaggaacactcgctcagtactcattaattgccttgaagaaaattgtagcatcctaaatggagaaatgaggaatcgtattagaaattcaaaacttgtgtatgatgaataaggcctgaaccaattctcattaatggtttttttccgctcctataaa

SEQ ID NO: 61983 - DNA, 567 bp, Arabidopsis thaliana landsberg
gggttatgtcgtttcttacctgacaagagtatgttgtgtggctgttagtgttgctaacatcttagggccatttgattttatcatatctaagagctgacatatttatgatttgctgctgtttgatccatgggataggatgtatcatccaagataatggcgttaactcataatggaccccgtgctgtgtgtgtcttgtctgcaaatggagccatctccaatgtgactctccgccagtctgccacatccggtggaactgttacatatgaggtatcacgattcagcttgtaaagttattcaatccctttttactccgatttttttactgctttaatcctagtgatttgtatacactgaaaaccaggggagatttgagattctgtctttatcgggatctttccatttgctggagaacaatggtcaaagaagcaggacgggaggtctaagcgtgtcattatcaagtccggatggtaatgtcctcggtggcagtgtagctggtcttcttatagcaccatcacctgttcaggtattttctgccttcttcaaattcaaaatatttgatatatacat

SEQ ID NO: 61984 - DNA, 1018 bp, Arabidopsis thaliana landsberg
gtggtgcaggtcggtgttacccattatttctcatatcttaaagccaaggaggagcttggatatgttccattcaagagctccaaggaaggtatggctgcaactatctcatactggcaggaaaggaagcggagatctttagacggtccaaccatgttcacttggatagctgttacaataggaatgtctgctctttttgctgccggatggttacccgacataggacctgtgcctttcttaagagccatacacctcttctttttccggacaatcacgattgtaaaggctgtcttcattgtagcagtggtactacatgttgcagaaggaatctatgcgtggtttctggctaaacgagtcgacccaggaaatgcaatggggtggttcttgcaaaccagcgctctcgggtttttctcaatgcggtttttattgaagagagcgaaagagcaccagatttaaaaccaaccttgttttgatgttgtaatcaaaaaaagttttacatgacttgaatgttttcaagattgaaaaacacaaaataaaagatctacattaatcaggatattccaatttctgaacaacttatggttccgaaagtacctcaacataaaataaaagatctaccttaaacagaacattctaatttctgaacacctatggttctgaaagtacctcaaacacacaaaataggtcggtcaatttatcaaactccttttgtctgaacagaactagaaagtctaaaccaactgtagaaataaccatcagaactagaaagtctaaaccaaatgtagaaataaatcactctaataacgggaagttgttggttttaagccgacacagatcacttggctacttccagggcatgttaatggtgttattgtaaggtcctccagtgctctgatgaatagggcttccatgtcctcctccacaagatgactcactcattgtgactcgaaaatgtgggctacttggagtcatcagcacctgcgttggggccacacgcggtaatacgggtgacgacagtccc

SEQ ID NO: 61985 - DNA, 781 bp, Arabidopsis thaliana landsberg
atgcataacagtactcaaaaggcaactcagaatcagttgtttgataacgtttgtccagagctagagaattaaactgcaaaatcatgtttggttattaagccatgtaataccaatcatattacaatatagatgaaggcttacgctttctgaaataagggtgtaagctgcatcagtcagataagtgaatgaggttccagagtcaaaaacagcatcaaattcaagatcgccggtatttcctccaacgcttattttagtgacggtgatattgtaagtaggactggtcaacaggaaaacaacatagtagttagaagaaggaagtatattcaaggagatagacaagtttggttaaacataaagaagatatgattcaacggcttgcttactgtggttgtcttatgttcaatggtgtttcccgttggtctacgctacctttatctccaaaactgatcctaccagctccatcgttcccaaaacacattgagaatgagtttgctgcaattccttcttttgctagtacactaggaaccgatatatcttctaagccaagcccaaaaagaccatttggagctgcaccatcatggaatacaccggtctgaacttgaccacatctgctccagtacaaaaagattgttaagatgaaaacacaaagtcacaaaggtttaggcttgccaacataatagatggttcgagaaacataaaaccgttctattatttcatatactcggaagtctgtaaggaagaatttacttacccaaaagtaacacgagcgggaatagctttg

SEQ ID NO: 61986 - DNA, 366 bp, Arabidopsis thaliana landsberg
cacagaaccctttgattcatgggtgaatgctctaggccgatataaaacataccattatacagcactatcatcatgagacaaggttgaatgaactaatcgtcaggacggaccctctgactaccccttgatggaagcgaatgacactgggatcgtaggctacttcttaagacctctgaccgcccacgaagactttcaaacaggtcgtctgcctatacatttgctacattgcactctagctggtgaggatggtagacctggatcgagacgactctttggcttaatacgcatttggatgcacagagcctatagagctagaatatggttaaggactccactggcaatagtaagctctatataacagtaata

SEQ ID NO: 61987 - DNA, 1279 bp, Arabidopsis thaliana landsberg
attttctgatttctatgcagcacggacagccagagtgttgatcgagcatatagaattggtcagacaaaggatgttatcgtatataggttaatgacctcagcaactggtgaagaaaagatatacagagggcaggtctgtgacatatttttgttcctctcttagtttcatagctgagtgattttgatatgtatgataatttgtattatataatgctgttggtatatgcatctttaggtatacaagggaggattgtttaaaactgcaactgagcataaagaacaaatccgctacttcagccagcaggtccaatttcaattctgctgtaaatagcagtctaattattttctagcttttcttttcttcgtttctaaatctttataccatatgatatctctcttaggaccttcgagaactttttagtcttcccaagggaggctttgatgtttcacctacacaacagcaactatacgaagagcactataaccaaatcaaactgtaagcaaacactgaattctgagcaaaaattgtgtcatgatggtttatttcgattcacttatctttgtttgttttttacagagatgaaaaactggaatcccatgtaaagtttctcgaaacccttggtatagctggagttagccaccatagcttacttttctccaagacagctcctattcaagcgatacagaaagatgaagaagaacaaataaggtgactctgtctccaaaccagctttttagttataaaacacttttctttcatctttcaatctcagtttctgatgcgttctcttacttaaaaaggagagaaacagcattgctcttgggacgcgcatcagcaagtatttcacaagacaccgtcatcaatgggtattaccaccaacagcctctttttttgtgtcaaatttatgttgtgttgttttgtataatctcatagatttgaaaaaaaactgcttctgacagggctgactatgctttcaagccaaaggatgtgaatttggacaagagaatcaacatttccccagtcgatgacaaggaattgtcagaaagcgtaattaaagcaagactcaatcgtttgacgatgctattacaaaacaaggtaatgacaccaattcattgtaacatctagaaagcttctcaggcattatctcgaagtctctgttttgagtttcatttttcatctcatagggtacggtctcaaggctacctgatggaggggcaaaaatccagaaacagaatgctgaattgactcgagaactgaaagacatgaaagcagcagagag

SEQ ID NO: 61988 - DNA, 1163 bp, Arabidopsis thaliana landsberg
agctatagagcatatacatcaaaagtacttttcttttctatagcattatttatctttaacatgttatacatggagaactaaaatggtcgtttctcagtgtcttttcatgatgatcacttttgtattgcctaaattctattttttcagtgaggtgatcctaaccctgggtagctcaagaacagtgcttgagtttctgtgtgctgcaaaggagaaaaaaagatcttttcgtgtatttgttgccgaaggtgctccaaggtttggtttctccctttactatatgtttcatcattaccattgttagtgttttctctcaacatttttatattctctctgatttgtccatctaactcagctgtatcaaattttcttccatttctattctattatattagatatcagggccatctattagcaaaagaattggtagctagaggtttgcagacaactgtgatcaccgactctgcagtgtttgctatgatatctcgagtgaatatggtacaattcattcctatccaactttatgttttcttgtccttgtcttctaaataatttgcaatgatgtgaaaatgcacaggttataattggagctcatgcagtgatggctaatggtggagttatagggccagttggtgtcaacatggctgctcttgcagcacaaaagcacgcagtcccattcgtggttcttgctggtagtcacaaggttggtttcgagttgtatttaatttctcaaactgttttttgctctcaaaacttgacttagggtttccaatgtaataacagttgtgtcccctctatcctcacaatccggaagtattactaaatgagctgagatctccatctgaactgttggattttggtgaattctctgattgcctggattttggagcaggttccgggtctcttcaagttgtcaacccaacattcgattatgtcccaccaaaccttgttagtctctttataacagacacgtaagtctcctatatataatctttgctatattcttaggttggtccattttcatggcattacttttttggataaagggttggtgatagcgttacctttttggttacaggggaggacacaatccatcctacatgtaccagtcttattgcggactactactctgctgatgatttggtgatgtagcgataaaggactag

SEQ ID NO: 61989 - DNA, 1184 bp, Arabidopsis thaliana landsberg
caatccccggaaaaccttgtgcttggttcatcgtcatgccttgagcttgtaactgagcttgcagttgtgcttgaactttagactgtgcttgagcatgggctagggcctgagcttgagagaactgaaactgagcttgaaagttagctgccatatgagactgagcaaaaccttggtttccaggaacagatgcagaggccatcccaggattcccaaaaggcaaaggcgcagagccttgaggcttttgtggattgttgttgttaccagacattgctatataaacctatcagcctgaaaaattcagaaacaaaaaataacactcttgaaaaataaacttcaattacacctaacgtatcgtaagcttatcagaaatctaagacatatatgcagaaattcagatgaatgcaatagatcggttacctagagaaatcgaaacctcaaaaccctaattttctaagattgctgcagagttcaactaaataggagtaatacccaggcttaaaaactacgtcgaagagaaaatgactgaaaatgcgaatgaagaactcgattggagaatttttgaaatatactactaagtggccatagaaagatctggaatttacaaaatcctaagagatacaaaaaacagaaaacccagagcctatacaccataaagatcgagaattccttaaaaaaacgaagattcgcagcttggtacctgcttttttgattcaccttctttccgggattcaccggtgttccgttgcttctcagttgtcgagactcgagagagaaaacaaaaacaaatgcccaccggagctatctattttactgtccgggttaagacccgacccgtatttttaaagcccacattgagttatatcaaactggcccaactttaatccatgtgtttttttttcaacgacaaatccacatacaatttgacgacaaaattaaaaagaaaagcattccacataattttgttttactatagtttttcgtctcctttttttttttttgtcaaatacgaatctgtagttttagtgttctttcttaaatatacctaaaactagggtaaattagataatggctgccccattgtttatagattaaagaaaaaaaaaaaatctaaataaatattgggattatttcaattagaagctagtagactggtatactttttcataaaaattttaattttattt

SEQ ID NO: 61990 - DNA, 1410 bp, Arabidopsis thaliana landsberg
  unsure (1)..(1410): unsure at all n locations
atgagaatccagaatgcttccagcttctgttgagctctctcctgttactcacaccaatattccacacatgtgagagagaggaatatcaaatatcttaacttgtacttcaattcttttagggtggtaacagatagatcatgtgatttgagaaccaactagaccttttgaagtaagtgaatttttggacttaccactggtgtacaactttgctgcccttttctctgcttcttctttagatagagggtatataatttgatctctcagtgtccctaaacatgtataaggtcgctgcgggacaaaaaacatgccattccctgacccaagttctttgatatccaatgatggtttggtaagtcttccacatacagtgggccagatatctctaaggactctaaatactgaagtctttccactaccatttggacctgaaaatgttgctactgttagcttggggctcatgcaataaattcaatgacagagattaattcaccaacctgtgacgagcaggcttttccctgaaactatttcacacgacaacttgctagccatcaatttctgagcaggggtaatgatatccacctccgaaaaggaaagtagatcttgagaatccaaacgacttgtttgattttctgaggtaacacctaaaatagttggacataacgaatatgatcaactcaagtacagacattaggtaatgatggaaagagttcatgaaaagatcacaatctgaataatgacttcatatatgttacataaagcaccaagattttgcatcgcctagccaaagtgtgaacctatatatgctgtagtacctgactgagaagcatccaaaaactcatcgagctcaaaaattctgttaataccaccagagagctccaggaacttcttgtgtagttcaagaatatcgccaaaagccataaagctttgggagacaacagaagctagataccgcaatgcatgtgccaattcacctggtatcaaaagcatcatgtagaggacatgtaaatacttaactggctcacgttaatcaaggaagtgattaactacaatgaagtgtgacagatcttcaccttgagtggagacaagtgctctgtctcccttgtgttctagggcatacaataaactcaatccccacgtcacattattgggaagttgctttgtcacaaaatcatcaagtatgccatacaaccatttcttcctcaagagcatgagagaatgatccagtagggccctgaattttttgtcaaccatctgctccatggagagaaataaaataagagcagattcacctatgagacaggttaaagctcacacaagtgaagccacatttgacatgaaaagaccatcatcacataaatgataaaacaattcccagttcacttncggtagctttgattcaaaaataactac

SEQ ID NO: 61991 - DNA, 730 bp, Arabidopsis thaliana landsberg
tgaatgaacttaaggtactacaatacagcaatgcctcacactctctaagtgaaccatttttcttgtgacctgtaataagctaacggcgcaggacaagaaaaaagcggtacgaaaactttgccaatctaggtctttaccaatttctatttaccctttctaactattttctatcactcatttgtcgttaataccaattaatgacatcaatcatgtgcaatattatagtcctccaaatactgaattgaattatgaatccttcatcaagtgactttagacttaatctacacttcgcatcagtttttccactgccatacatgatacaacaaccactaatcaatacaaaaggataaaaaataaaaataaaaatattattacacatatcataacggaaacagcagcacatgtactataaacaaactctatcccaatctatttgcagaaatctgtttaccgactacacacatttaaataaaaatttcagattcaaaaaacaagttctagatcaaaaatatatatgcatgatctcctcttcttcaccattataaagaacagaaaagaatctcaatattcccgttactaaaaggcacaaaaagtaatttccctaaagtaagtagggtcaaatctaaaactaaatacaaaatccccgggggcacaaaatggaaataaaaaaaaagtttatattttatttcccttaacatttttatttatttatttgctatagggctttccc

SEQ ID NO: 61992 - DNA, 461 bp, Arabidopsis thaliana landsberg
ttggcctccgcgccgcggatcgcatggagccgctgatcgtgcggctgggcgacaacctcgattcgatcgaggaaggcctgatgatcaatcacaagacggacgtgcgctcgaaactcgcccacctccgccgcaacctgatcagcttccgccgtctgatctggccgcagcgcgacgtgctcaatacgctcgaaatcgaggacttatcgttcttctcgccccgcgaccgcgtgcggctgcgtgaagcgtcgtcccgctcggcccgccttggcgacgagctccaggcgctctcggaacgcgccgtgctggtgcacgaacaaatcctcgacacccgcgccgagcagatgaacaagaccatgctgctgctcacggtggtaaccgtcatcctcatgccgctcaccgtcatttccggcgtgctcggcatgaacgtcgccggcattcccttcgccgacaacccgcacgcc

SEQ ID NO: 61993 - DNA, 1350 bp, Arabidopsis thaliana landsberg
ttatgcttcttcctctgtttctcttgcttcttcttggcaggtcccttcccatggaatccatgacacagtgaccgatacgcttctttctcaggcattatccttccgcacttgttcaccctctgaatctgtatatccttaaatctatctttgaatctgtcatcttcatgattattgtccttaacaccaacaaccttgccttcctccttgaaagttccttgctctctaagacggtttaacgcgcccgataaccctgtcccgacatcagcttcccgcataatcccatctcctctaaccctagaatgattatcaatgggcttatcaacaatatcttcagctttggaacaaacctctcttcgtctctctgatgattcaagcctctctttctcatctcttacagaaccaagatcatgatcagcttccactctcgaagcaagaacttctttatctagagcaatatttataaccaatttcttattcttcctcatcgaatcttttttcatagctactttggactgagacatctttatcaaaaccccgatgatgagacagaaacacgacaccgcgaaattcagaagctatgagtgaattctcaataccttgtgacgtatatatagatagagatactagagatctaggttatattttgacctttcctagttagaaatcctaacaagaataggaaaattacctttcaataccttatgatgatgtatcgagaaccgaagaccacaaagaacctcaatcttataagattccacttcaatcacataaattcgccaaaaaattgtagtcgatgaaaatcaatagaacttttaaggattgaccaagagccctaattgagaagccagttttggtggctgatgatgactagaagaatttccttgcaccgcacgagccgaaactaaataaaagccgaaatccacgttagggtatataccgtgcattatatttagaggaaaatatgaaagtagtttttttaacaaaaacataataattttaatactataattctctcaaatgggaaggctattaaactttacatgtagctctccagttacaaaaggcccaaccagaaaaactatccggatttggaatcagaaactttagatccgatggattaaagtagttttttttttttttcaaataaaacttgagaaaagactagttttatgtcaaaaattgcaatagtctgggagatgtttttgtctagtttttttagtttttgaaaacatggtcatatctgataatagaataaacagattaaaaaaactctctcaggcacgactaccgatacccgctaaaagaagtttcgtattttaaaaattctagatcttaacccacttttttaac

SEQ ID NO: 61994 - DNA, 673 bp, Arabidopsis thaliana landsberg
aagacacttagaagaggatgagtccggtcgtgagaagtggtatccgaatggcagattcacaatcagtgacgccttgttgaacgaacatgtaaatcgaataaccaatggccgaagcgcccactaacatcaccaatgtgtttgctagaccaaccatgaaattgctaactcgaaacatttttggaaatttgctttctccaaatgataaactcgattaacctgatcggattttaaatagatacggagagggagagagtgtttttttgttgttgtttgaatttgataattatgtttcgtaacggttttagtgtgtgtgtgtgtgtttttaagtgtgtggagtcgtggttattggggaaagagggaaacggttgcttttttggtagtgggttgatgatattagtggagattattagccattggttttagagatcgtgtgggggttaagaagatcctttactttagaggaagtcgtttaattagattttgactaggtcttactgccacgtaactaagactaataattaaactgtcactcgactttttaaacattgaatttaataagaatttattgagtaccagattgctgggaaaattacatataggtttatgttaattttatttttaaataaaaatgccatataaattcatattttttggtacttggaaaagggaaaaa

SEQ ID NO: 61995 - DNA, 463 bp, Arabidopsis thaliana landsberg
tccttattttcttaaatgggagattcttctctttttcatgtgcgctaattatgatttctatatatagtatacatcaaatacataagaacaaaaaagatactagtgaaagaactttagaacgaaaataaatataaattcgaacggtcataaaactacaagcttcttatttatataaatactgttaacctttctaaaataataagatttgacaaatcgacaagctctacgtggaatctcgtcactttgttgacaattgacatccattctaatttattctagttaatatggatagatatgttacatcatacatggtatcattttaatatatagcaactctaaacataaaatattccaaattgttctgatttaattccatcttcgtcctttccgataaatgaaaatcaatggtgacacttttaaaaaaaaaaaaaatcttaataccaaaaaaaggttattattaaaa

SEQ ID NO: 61996 - DNA, 507 bp, Arabidopsis thaliana landsberg
gaccctcttcgttttgcatcttgaaagcttagctttgaaagagtaaacgagtcctatatatccaaacaatgcaaaaagacagaaaaaacagaactatcttatattagacaagaaccaacaacagtgacatacactgagatcgaaaatgactgtaagtgaaagtaacatcagagaaggattcaagacaacaaaggcataatcgaattcgttgagtaacaaacagatctaacaggacaataatacgaatttgaagatctagggttacaaaaactacagattcaatactatttatccatcatggttcttctaccctaaaccatcggctatattggcaaaagtccatatatttctgataaatcgagacgaagagaagattaagtaaaagtacgattacctacctgagtagagagcgagagaggagaagcgacgaggtgcggcaaccggagaaagagatgatgaagacagcgagagttttatatttggggaaccctaaggttttttagtggg

SEQ ID NO: 61997 - DNA, 605 bp, Arabidopsis thaliana landsberg
tcttccataatgtttcatctccgcttaacaccgccattttcggacataacacctctatttatctacttcttttcctcaaggtactgaagaaatttatgtatgaaataagctgagaaaaacgttataacccattttctttttgacgtactgaaaattcattctgaatatgtaaatccgtaatccgatcagatcccggtaaactagaaattcagtgaagtaagaaacgatagcaacccgaccaaaagtagtatgcgaatgagaaagaagacaataaaacggaaaatttgtcttttgtgatcattacaaatttcaagaaaaataaaagtttgaatctcaaaaaaagagctgaagactaacccgaatagtttagcaagcaatcctctgtgactgtgaaacttgtacaaataaaaaaaaaaactatatatattgtagaagaacaaatagtgacgatcgatttgattgaacgccaagcaattgatatgtgaaaagaaagaccagtggtggcttaatggttgagatgaccactctgctctctcttgtgacagagcacgagaagaccacaggctctgctattccttaattgtacaaaccttcattcacccatt

SEQ ID NO: 61998 - DNA, 1726 bp, Arabidopsis thaliana landsberg
attttcagtcatttcaaacatcagtttttgcgtttatatttgaggaaaattgaaaattttccatagagatacacaactatttagcgcaacatacaataacattttccaaatagaaaaaaaagaaaaaatttacttgtttcttaacgttcctactcaatacacaaactaacaaacaagttaaaacgagtaaagattcttggcgaaaaaaacaacaaataatgattcaatattttaaaataacacataaacagttggtctaaatttataaataatctctaaaaaatatcataaaaatcacatggtttcattctcatatacaaagacagtaagaagttttttttttttttttcggaagtggtcttttatgaatattgagttagaaaatggatttttttttcctactaattacttacaaaattttgatgaaaaaatagagtagacgaaatttggtagaaaatttcttgcgaaaagatacaagaaattcactaccaatttatgtaacatttggtaggcaattcagaagaatcaaactagattcatgacatatggggagaaaggcaagaaacaaaaacaaccgaggatgagtcttatgctcttagctaaaagcatttatttagattttaggtgtggttgcgacaactgaaaaaataaatacattacaaacgattgacgggctgagcgagaaattaagaagtcgagtccctaaacccgtaggaaccaaccatatatggtgagaccactgtggaatctgccagacaacacccaagcatattaaccataaccacagtggttgagcaggaaactgtttgactggtaatgactcattaacagaaaaattaacattgcagaaaaaaaagttataataaggtaaatggatcgtcccaagatcattattggataattaaaatcactggccagtggaattaaagcccaaacaagcccatgatagctcaaaactagatcaaccagtaatggcccatgatgtcgtacttgaggtgacgtggcaaattctgaattcgcgcaccggtagattcttttctttttccgtataacacctttcaatacttgaggtgacgtggcaaattcacaaccactttttatatgatataccgcttttaccccttaagcctctccgcgtaaaaccgagaacaaaatcttaagcaccgttgttccgattcagagatcatcgtcgtcgtcgttcagaaaccttcaaaaatggctggaaaactcatgcacgctcttcagtacaactcttacggtggtggcgccgccggattagaggttttcatctctcttttctatatattcctctaaactactgtgttattgcgatttgattctctgtatttatcgataccgtctcgattttatttgtattcttctctctgccgatgcgttgattttttgataaacttagaagattttgttgcctcagatgttgaaaaatccaatgttttcatcaatttgatttggattgtaaaggctactagattacatgataaaacacaatcatgattgtaaatgattttcttcatttctgatgcttacgtagtcactagcggtttctatatggatctcgttgctctgggaatctatggaaaatttgagtacagagaacacgccttttaagctagataatgtgattgagattatgtacgaaatgagagaatgatgaaaagagacgatggtggtgagagtagctcacaaaagaggaattattagtgat

SEQ ID NO: 61999 - DNA, 382 bp, Arabidopsis thaliana landsberg
acaaacccatatgtgggagagattctcccttttgatgattttttaaaccaacgacctaatgaccgaaacgttggcatcgtggagtatgatgtatgttccctccattgatatcaaatattcatttggatagtctatcacaaactgctatataggaagaaaaaaacgatagtaaacctacaatgaaattataaggataattataatctgatatagtatttaagtgatatattgactgcttgacatattgtcaataattttgacataaaaaacgcgtaaaatcaaagcctagagagtataactggcttttatatataaacaatttaaagtatattgatggactaattaagaattttatgtttaaaaaaaagaattcagtaccttc

SEQ ID NO: 62000 - DNA, 588 bp, Arabidopsis thaliana landsberg
aaatggacgtccataagcaccccagcatatgtggacgcccgatgttccatgccgaccttaataactcatcatcactagatagagaactgttgcagtggttaagaaatagacggcatgtcttccaagcgacatgggatagttaggtaaaaaatcttctttattatttagcaggttgcccttttgggaaagccagaagcctgggcaacacagatgctataaatagtcttatattcatgaacaaggccattcactgcaaaggacctcagcttacccctgattcttgagtatagctctttgccatatatgtgatttgggaactcggttataacttcgggttaggaccattgatatgatggataaattaggcttacataattatcagcgaggagagtcatttgactaggcttatctaatgccaaactcatttgattaccaatagagatgataagggtagcccatgtggactagcctctacattataacggtcttggccaccttaaaataagtgaaaaataagcatgtcactgttctgactcgagcaaattttttcaatcttggctgcgaaaaccgaaaattttgaaccactga

SEQ ID NO: 62001 - DNA, 1176 bp, Arabidopsis thaliana landsberg
aacggtcgttttgcaaattttccattaatttaaccaatttcttatccatttcgtaggccaaagtttctctttttccttcataggcatggatgggcctgatcattattaatatctcatatattagatgagataatctctttgatcctcaaaacaagaaaatattttttcgtttgtgaaaacaagaaggtgagcagttacaaactcataaacataatgatctacatgtctttaaataaacaagaatatacgagattttcctaaagtttttatgaggaatttaaataaattatgcaaagggaaatatcaaactagacacaaaattgaagtaaaataagatagaagtagaagttattatcctcttcactgaaaatttaccaagacacataatcatggtcctttaaggtggcagagaacttgaacatggaataatgagccaccgttttcgagatagtattctgtcatggtccaaccactggcttgtctctcacctttgacgtagaaacttagacttcttcccaatcactgcaccggtatcttccaacacgacatcactcaacttcccatggcctttccaacatccatcaaccgtctctcctttgactttgcggctgatgcgtttttccagtaacgttttcagagagatgattcactttcacgaactagaaccattcattaggttcaaaaaagttagtctcggtgtgagacaaccgccacggctctttggcatagatgtcaaacttgtcttctaattcaaattctttatttgatcttttggtaaccttaggcccgatataacggatgatgagttcttgggcagaaggatgaaaccaaaacccaacatgttcctttttatcgtagtacttaaccatcgacatattcttttcttgttctatgagacaaagaaaacgcaaatcagacaaaaagttaaggatctatatattatagcaataatccaaggggaacaacaaatgatctttagagcaaaactgaaaaacaataataaacgcgttgaagacttgaaactttcaggtagacaaatagaaaaggtgatttcgtatatatatgtggattttaaggattttaatatattaggaaaacgattctttaaaaaggaaatatatccatgtaattcaaagccaatattcttaaaattagataagtaagccaatatcacat

SEQ ID NO: 62002 - DNA, 273 bp, Arabidopsis thaliana landsberg
acccaccttgatactgatttgctccttcaggatcttcagaaagctccatcatctatttctggttacttcatttcattttagttccagtctattcttcttaagatttttaactaaatacacctactaaaatttatttcaaagaaaagctccatagtaatactaatcaatttaccaacaaaagaagaaaaaaataattgaaaagcaaaccatcttatatcacccgttattacgatgaatataataaaaaaaagcaaacatatatagtttcaacat

SEQ ID NO: 62003 - DNA, 670 bp, Arabidopsis thaliana landsberg
gcaacagcctgcggctgcgacagcatcggcacgtgactgctgtcggcgtgtgccacggtggcgttcatgcgagcggccatgcgctcctgctccacacgaggaatcgcatgatcttggtttccgatgaagtagtacgtcggccggctgcgccatgccgcttcggtcagcgtgccgccgagtgcggaggcatgcagcggaccttgcgtggcgtagaccaaagctttctcggtgtcgtccaggtcctgcgcgaacagcttgaaaataccgtcccgggtgagcttcagatggccctgtgcatcagggcggatttcgtcattgagcggtgcggtctcgaacttctcgaacaacgtacccgccgactcgcccgcgtccggtgcgaacgcgttgatgtagaccatgcgggccaccttcgggtcgttgcccgcttcgccgatcaccgcgccggcatagctgtggccgaccaggaccacgtcgccttctgccagcgcgatggcacgctgcacggcggccacgtcggcctcgaagccagtcaacgggagctgcacagcggttgcggtgagcccgttgcgggccagcagcgggattaccttcgaccaggtcgagccatcggcccaggcgccatggaccagaatcacatttgggatggaagtgttcatcgattttctccgtc

SEQ ID NO: 62004 - DNA, 921 bp, Arabidopsis thaliana landsberg
atcaaaaagtcctatactatataagattatttttttttcagttaaggaatatgttaaaattttaagttgagatgactaacacatttgaattattgccttaccttaaaatcacatactttaccaatggttgttttgttatgtttttttttttttttctgttatgttaagtgcatatatattttctatggtactagtttccgtgtcaagcccgataactaatctggaggtaagtagaccccatatgagttttccgcaagctcacttcagatataaaaaactcatgcaaaggtcgtccaagagtccaagttgaattgaatccggatcttcatcaaccatccaagatcaccaaatgcgtgtttcctccaaaatatttacatagaaaataattacaactctgtgacttttgaaagatcgccgttggcatctttgcttattcattatcttggaataactttcaacaatcaatccttagtgccttactgcctttggagtatgcaccatccatcaatcgacatatgatctagaacaagttctctcatggacaaattaacaattatctttcatcgagtaacttagctccaattatttcgaagtggtgtcacgtatccgaaaacatatatagtaagcgtcatcttatatatcgatcaaatttatccgttcagacttcaaagtaagttttacgtttatgtatttttcgtgttttaaaattacatgcattttctttaaaaggctttgattggcgcctattgttaggatttggctggctgatttgcttttaattacggtggccagtttttagagttttaattaatagacatgatgatacaattaaaagaatttcataaatttacagtagaaaaaacagtcagcgaataaatgatataaacagtgctcgaaaatattggcagagacaaatgcccc

SEQ ID NO: 62005 - DNA, 442 bp, Arabidopsis thaliana landsberg
  unsure (1)..(442): unsure at all n locations
ttaccaaagtgaagacgtgcttgtgtgattttacatccattttacacataaattctgtaataagcgcgagtcaatgcacgatcaaaatgaagacttatcttaccatatacaggggattgaatatcatttcttgctgctgtgtcaatgtatccatattcattaaaggcaatggatcgaccgatgcagcattgtgcatcactagaacaacatacgacaacttgatcgggactgagacatgcctcgaatgcaaggggggtatgtctgggtttagcaaattcagggagagggcatttataaggtacacattcctaacacttttacaaattaaaacaatatcttgtggggggcagcacggcttttgaggtctcttggagggacaacattgtttcttgggctttttagtgaccggtacacaatagcaagcattgnttttctttgagca

SEQ ID NO: 62006 - DNA, 347 bp, Arabidopsis thaliana landsberg
  unsure (1)..(347): unsure at all n locations
ctaaaaaaggccttaacatttttatatncgatatcgaagaacaaataacgcgtttcattatgtgagaattccacacaatctaagaaattccatctgtccaattataatatagagcgaaggagtacaaaaactatacaaacagatctattcttgagcatcgataagaaaagcttactctgtgtgaaaaatgaactattcaaaaaaactttgcatatcgcaatcccataagtgcaggactagtcgtatatagagagagccttttcatttgaatcgaggccaaaacctttagaaaaaaaacgaggacaaaccaaatgcttaccaagggagaatagggaaactcccgagag

SEQ ID NO: 62007 - DNA, 547 bp, Arabidopsis thaliana landsberg
  unsure (1)..(547): unsure at all n locations
cggcgtgaagatcacaagcaaggacacggtctgcaccagactgtgtattcttattggccacaagcttggctgcaatagattcacgtccttgagtctgcaagaatatgtacaacgaaagagtcaaatgaaaaactctcaactagaaactaagtgaagccagaggaatgagacaatcgataaacccaaatcagcttcatacagataactaagctgccaatttgattacttgattacttccaaatactaactaccatagatctgacttaaactgacaatcgattactcttggagacaaatcattgtgcatgttttcacaggacgattgaatccaagacagattctatagttatagaaaaagacttgcctttctatcagctcgtgcataaccaaagtaaggaatcacagccgtgatagttttggctgatgctctccgacaggcatcaatcataacgagcaattccataaggttttcatttgcaggtgggcatgtaggctgtacaaggaacacatcacatncccttacactctcttgagcttgacatagatc

SEQ ID NO: 62008 - DNA, 441 bp, Arabidopsis thaliana landsberg
tttgagtttatttttaacttcacggttgttaaatccgttatttatattggcaataagcggtgagatcaaccttccttatatactactaaagtccttttccatctttctaatatgtgattcttctccaatgttaagttttatggagtattaattcaaaatcaattgacaaaaagtagaaaagcacatgttccttatatactactcaaatcatttcccatctttcgaacgtcggatttttctcaaatgttaagattcataaacttccaactcaaaatcaactaacaatgtcttgaaagttacacgtttcttataaactactcaagtcccttcccatccttccaatgtgggatttttctccatacatccccattcccctcgaaataatggcttttctagccactaatctcgacataatccatcataccttttgagataatgctc

SEQ ID NO: 62009 - DNA, 2138 bp, Arabidopsis thaliana landsberg
cctgtccatggcgaagaagaatcacaatactcattagttctagaaaccgaaaccgtttcagaccgaatcgaaaagttttctatttccatttggttcttctatgttatttgccaaaaacaattagacaccaaaatttctagaaaattagatgatgaactaaggaaaagtatagaaaaactcacttcgacaagtgctaactgaaccttgagtagtcttattctaagaggagacaagattgagctacgcaagataaagccagtatctcctcttctcaaattatccccgagttgagccacttgctcagcaaaacacaactcaccaacatctggaccagcatgcatctgaccgcaactaggacagcaaatatctccgacaaagtatagttccgcacagattctgcatatgcgaaaaagcggactgctttgcttagcaccatacttaaatgcagataaagcactaggatgcagcatattatcccacatccacttctcgaaactatggaagcgttgcaatacgctgtatctctcaacggcgttactatcccctagctcgatcttaaacgtcgtggagatttccgcagtatcggaatccaagctagaagatatggaacacaccccgggatttgctgccacattcctccttaatgcttccttgaaggatgcttcgatcttcagcaacataaagtgtaaatgtgattctcttacaccgcgaacatctagtgacttcaccaaatagtcaaaagcctgaaaaaaacaagtagcaaagaaggttcgatgattgttataaacacaaatgtttgcatttcaattccagatttaagtcttttcatatatacctcttcggaatcaatgagcctcccggtccgtcctgaagttccacgaatattctaccacaaccaggatcatttcgagaggcggatgctgaaaaccgccaatagcgattgcgtcttcgatcttgacctagcggaagcgacctatatacatatagctcttcagctttatacccaacatacgcttttaactgtgcacgcagcctttcccggtccgctgtgtacccctgttgctgctgatactgcaaattctccactccaggtacattttcttgcaattgcaagcttggtccagcaatcacgttattcacatcgatctgtggaagactcaccgggtcctgtgaggagattggagtcacatccgctgatgaactttcttgatttccagatgcaggggttgcgatattaagccccggctttgctgttgggtatgagaggtaatttgctcgaatcaaagactcttctttccagcgtttgtcgagttgcacttcaccccacatctgattctttaatgcacttgctacctccaaccgttcctgcacacaacacacagaatctgattatggtaaaaaactaaagagaatgtaagtcaagattatttttaggataagaatcatatatacctcaagggcgattcggattgtgtttccttcggtggcaataccaatcagagcaacaagtgcgtttaaacgttcctcgcagctaagattcgagtgggctcggtctacaagtccttgaacccactgttccccaagtttgctctcgtcaaaacaagcactatcttcaccgtttgctaccgcatcctctagagattggtccgctaaagtgtcatctcttttctcatctttcatttcctcggggagagagggagtaagaggcagtcccagttcagttttcatgggcacggtatccagtttcccattttccaacaatggttcgactccaattaagttttctaccttcagaggattgggatcttcctttttaaggttcaaatcaacctctgggtcttctccgacatcgctttcagagtcttcatctctctcagcgtcatcaacatcttctacatcagtgatgccgctcttgaatgcacgtattctctctctcgcttcagcaaatatagtctcagcatcacctgcatcttttctataggaagcacgtacacaatacgtagaaggagctaccctctcaaagagttttgtatctcgagacaacgcagcagcaaccgaggcttcaggtgtcctactcgtcgttagatccctcaatcctgatttttatgatcaataaaaaagaaaaggagaatgaaata

SEQ ID NO: 62010 - DNA, 342 bp, Arabidopsis thaliana landsberg
  unsure (1)..(342): unsure at all n locations
aaaaaaaaaaaaaaaaaaaaataaaaaaaaaaaaaaaaaagaaaaaaaaaaaaaaaaaaaagaataaaaaaaaaaaaaaaaagagaactatagaacaaaanataaaaaaaaaaaaaaaaaaaaaaaaaaaaaaaaaaaaaaaaattaaaaacaaaaaaaaaaaaaaaaaagaaaaaaaaaaaaaaaaaaaaaaaaaaaaaaaaaaaaaaaaaaaaaaaaaaaaaaaaaaaaaaaaaaaaggaaaaaaaaaaaaaaaaaaaagaaaaaaaaaaaaaaaaaaaaaaagaaaaaaataaagaaaaaaaaaaaaaagtaataagaatataaaaaaaaaaagtaaaa

SEQ ID NO: 62011 - DNA, 681 bp, Arabidopsis thaliana landsberg
accttgaattcggcgacatcgaagtgctccggcgttcctacgccagccagaatcgtctgcgctgcgcctgtcgtgcggtgaacattgaagccgagctcaaccatccgctcgatcacgcgctgtatgtgttcctctgttgcatggtcctgcatggctacgatcatgttttcgcttcgctctctttatctaaatagctggattcgttgtctttttataactagatttaattgttttttaattgaattcgatctcaatcaggccgtctacaagtcccgccgctgcaggctccgcatcacgtcgataatgcgctcataaacgtgctgtatctcggcatcggccaatgggccgggattcgctgcgcgaacatggtcgaagacattctgctcacgcttcggctcatagaccggaaggtccgatagccgcttgagttcgccaatcgcctgtgcggcctcagcgcgctgactgatgaggcgaacaatctgctcatccagttcgtcgatcttttgccgccagtccgaaatatccatgcatcagcctcatgttgcagcggtagtcgtccagagcttaattcgcctggcgtcacccgctgcggaaaattgttgtacacacaatgataaacgggtgcgtccgtaccgaatgccttatctgtaccagcagccctcatgcccgtaaccccgcgat

SEQ ID NO: 62012 - DNA, 511 bp, Arabidopsis thaliana landsberg
  unsure (1)..(511): unsure at all n locations
cattagtgagattgatctctgccttttttatctttcttgtaaatgatagttgattttgtttatttactgtgttatggggtcttttctttttggtattaaacgacaacaaagaagcatcatgatgacttgtctggaactgtacttggcgatgatgttccctttgacaaagctgacgatcttggtggagtttgtcaaagtcaacttgaagcagaagccacagaggaagttaacaggtattaaaattcaacaatatgtggtttttcttccttctggttgtattataatggcgttaggttgttggacccaaactaagttaaaccaacttttaacaaaagaattaacaaccttatcttctgcaatataaatagtcattgatcagaactatgttgatctcattaatatgtgttaactaagcactgattagcaaccttgtgtgccaatacttgatatgactacangcagagttgttttggcacaactttaaacgtttagagtgtctgtaatggtcttg

SEQ ID NO: 62013 - DNA, 498 bp, Arabidopsis thaliana landsberg
gtttcgtctaatactaagattagctgtttaatattacaagtcttctgattgtgtttgattttgtatatctattagacatcacatttgatggaacaaaggaattatatcatataaagacttacaactaatgtcttccacactatttaacacctaaagtgaaaaaggcttacacactacttctaaagggtggtccaagcctctgcgtttatgattttgtagatacctgtaaaaaataaattttctatatccttgttaaacatttcaaaaattacaaaaatgtttctttcgatgtagtgagtatatttcttataattaaaaaaagaaagagagagaactcaatcattcataatagattcatttaaaagtaataacaaaaatcatatttaaataaaaatgactacaattaacactatttaacacctaacgctaaaaaagcgtacacacttctctaaagggtggaccaaatttcagtataagcaatttggtgcatacctgcag

SEQ ID NO: 62014 - DNA, 1650 bp, Arabidopsis thaliana landsberg
  unsure (1)..(1650): unsure at all n locations
tatattgtgatttaattctggtttttggcattgttgctcattaggtgaattttgtaattggaatagcttacagtttagagcagatctattagcgcttggattggctgtcaccaatctattgaccggtttagtctggttatcgattcgacctaagaccattacaccagtaagatttctaatccaagtttatgaatcgaaactttggatgatttggcaatgcaaatgtgattcttggttttgtttgatatcaggtaaatcctgaaggtgtggaatgcaaagttttagaatctgatcttcctgcatcgatggtttccgaattgttatggtaatgctcttctttgtatctcttattagaatgtttcttatggaaagataagtagaaatagaatctaacttttgtctattctcttagggcatgggaatctcttaaggtagcaacatgttgtaagtctctggttgttgtctacaatggaatttgccttattcaaattgggatggtagctgaatcttcagaagataagaaaggagtcacagtaaacactgataagctgatgcaaggatcggtttacagaggagttatgaaatccaaagcacgtaagtagtacggatttttgtttatgttttttgtgtgaaattataaatttatctaagaaaagaacaatgattgtttgtcagagagttacttggccaatctttctctttatcctgngagatcagagctgccatttctacctgcaaatacacaggtttgttgagagtttgagtgttagtcttttgagtgagggaatgatgaaaccgtgtgatgaatacttgtttttttttttctctactaggcgggtgatttggcagccgcttgtagataaaggaatcgcagtcattggtggaaatacgattagaggcttgacgtcttcagaccaggttaggagatctttaacttctctatgttggttgtgacttataaaagttaataagacaagtcaaagtgtaagtttgctcatcatatctaggcttggatttcttcaattggggagaagctagatgcgacactggggagatattttgttgattctgatgagatttccagagtaacagtttgaaagccaccagaccagaaaaaggatataatcatattgcgaaaacacattacatgcattgatcactaaaggtaactgttcattgtgtgatcatgtggttatataaagttcaaatgaattcattgtgtgatcatgtagttacataaagttgaaatgaattcaatgtgtcatcatgtggttacattaagttgaaatgaattgtaaaaatagcttcagaaaacaattatacatcagcttagaatttatgaattccaagataaaccaatgaatcttcttcacatgctaaattttgaagtgaattgtgttaggtacaatgagctttcagatttttcagttctgtcgacaggcgtttcgtttgtggtttccattttgtgttatgctgcgagagactagtaaatcagtggagattacgctgaaggatgtttctagaccacgtactcgtctctctagagattgcataccgtttctgcgagctctccatgaacttctgcaattttaagtccaagaaaacatttaaaagtcagcacattacagtttgttggatgttttaaaagtt

SEQ ID NO: 62015 - DNA, 1239 bp, Arabidopsis thaliana landsberg
  unsure (1)..(1239): unsure at all n locations
ttgatgagatcattttgtatgatgaattcacagacttaatacctcaagcgtggaacagccggtgaacaattatgggtgaaatgtgtcacatcgatggaacttcttgaaatgtggatgaagttcttgtaagggccaatgtctctggtgactcctccgctcgagtctggcaatacgtgataaggatcaagattcattgcattttgataataactatatgtgtttgatttccggctacaagaagatggccttcttgagagcgagacatcccctttggtctttgatgaaacatgattgagttccaagtaaatgcctataagacagttgatgagttgttctgatacttcgtttgggtcgtctttggtctttgcttcaacaagtcgaagcccttttcttactctacccatctgcatcctcgtgactccatcaaattcgtctgctcaccaaaaccatgactttgagtgtaatgtgaggcttagagaaaacattcggaataagcaactactttacctgtgaagccacctgaagaagtggcatccaagaaatcaggagcgtaagagaaagagagtcttgaatgagtagttgaggcagtgtctagtgtagaacgttggtaacaatgagacaaagatcgttgatgaagatcatgtcttagtggcagagtactctgtctcacatggctctgtcttgccaatgtcctcttctgctcggtcatctgcaattgtatctcttgcgtttgtctctgttcggaatacagtttaagctttagctcctcgatttttcggtctagacagagaatctctgcctccacgatggctagttcttgtatgagctcagaaaactgttgaacaataaaatctcatcattgtttgatcattaagaaataattaacattatgtgaggttatgtttattggtattgcctgaggtggaagaaacaatgaggagagacttgggagagaaacaatagagccatcaaaagcaactcgtaaagttctagtcactgcttcttcttcctctagtctctctttaagatgcatcacctacataaacacaaacattcaaattattggtatagagattttgagtgaggaacagaggtgcttactccttcctctaagtcatgtctcttgttactatgtagctgtgatgaatcttccatgagtcgttcctcgnattaaaagagtatataagaagcataagaagaaggaaccgggtctaagtagagaaagagaatgattggagt

SEQ ID NO: 62016 - DNA, 388 bp, Arabidopsis thaliana landsberg
cagattgaagatggagaaaagatccttgtacgctttcttggctttggagggaatgagtattttatgtttttgacttatgaggctcattcgtatgctgcttttgcactggaggtgcgggggacacaactgtaccttatggttctatgagacttgggtgttgcagtgaggctgcggggacgttcttaagtgaaatctctcattgagggaccatgagtatagaggagggcacttggggcattcccgtatgccttacggatcgacggctctgggctcggggtctacggctatgctcaccgtattgccgattgaatggaccgattcgcactgccatatccgccctccaagcgtaccgggatgtaggtgctacaggcgatcagacctctggatc

SEQ ID NO: 62017 - DNA, 1545 bp, Arabidopsis thaliana landsberg
tttctgatcatcaagagaacgattgtagaaccaaccagtcttcaatcttaagaatccattaatagatatgaatattaaactatcaacaaagttaatcagttgaataatttaatcaccggtatgcatagtaaagaaaccaaaaagagaattagtaaaccatattaattctctttagctccatccttcattcaaaactcccaaaaacaactaaataaacaaaaggggcaccgtttacaaagaggtattaaacggcagcgtattttgcttaattatctctgaatccaattgaaaaataaaaacacaattacaataaccaaaaaaaacttttttttttgtttctctgttcttgatgaaaaagtttcaaagaagacaaacttcttgatcttcagcgataaccatacgactaagaggactaggtccaagcttcttcttcctcctcatctgatttctcttcctcacaatctccatttgatctctctttctattctccattatcgcttcttcttctgccaccacgaatctcctcatcaacgcgttttccctcaacgacttccctctaaatatcctcctccctgaatccacactcatcctggccgtcgccaccgccaccgccgtctccataggaagaggcttcgacggaggatagcttgaacttcttctcggcgggacgtgattccgaaaaacgtcgtcgtatggaccaatcggagcgcagaggcaaaccctagtgaacgaattcgcagctacctttagagacgagcattttctcagctggtgataaatttggttatgattggatgacttgctgttgacgctagggtttcgagacggacgaaaattctctggttgttgtgacgatgatttagggattgttctccaattcgttgcgaatctggcgaccgccatagctctctggtaccaaggttttctgtttgccataaccttttttatgtcacactcacacatctcttttctaacgatgatgattgagtactaaaaatttaacataaaatgaatcatcatcaccacttttgttaaagcgcgtaagagaattgaaatgggagagaagctagctaatttgctttcaacttctaaaaatggggtgattagaggttccaagtttgggtttaggataaaaggaaacaagaaaaactattaattttgactttaacaaggaaactaaatattaatttgttttaggatttttatttatttaccaattatggattagtaattatttgagacagttgtgttatatgatccataaaacctatacataaataaagaatctgaaatctatgaatcccatttaaaccaaagcatctttattatggtacatgtcctttttgtattcgatacgtatctagtaatatttatggccgttttaaaggatcaaccaacgataagaagaaaaagaatcgaacaattgataatattgggcagaacggttgagattaagcccaataggcccaaactaagatacagttttttttttgggtgttaaattacaaagtctatctgatcaccattgataacaaagatgcctat

SEQ ID NO: 62018 - DNA, 1649 bp, Arabidopsis thaliana landsberg
aatcacttgacctaaaactctagcagtttcttcactttttatctcgatagctttgaagcttctccttttcgagattctgaagctttatgatctcctcataaggcaaatctccagtttcaatcatctgatcaaaagcccaaaacacacctttctcttgaatcaaaccataaacttccttaactctagccacaaaccctatctctctatctccaccaatcactaccattgacttatcagagaacccatttccaggtaaatcaatagcaacactatggatcccttttgatccaagagattgaatcatttccttaaaagcaaacgaacttagacctaacccatgaacgattacaacagtctctgtatgaatcgaacctgattcagctacaaagacttcaattggtgactcgtttgagtttacttggactttgattgttcgtccatttgagtaatgttgacgaagagctggtgggagtgagagaaaccaagatcttggatcgttttgagaagagaacagagagagagatatgaagatgattgtggctagtgagacgactactgtaaagtagaaccaaaatgggaaagggttttgagattggggtttagggttcttcatagttgattcagatttcgtaaagtcagagactttaggtttgttcttcggtggatttagggtttttggatcctcttcttcttctgtgataatcgccattaaagaaagcttggaacttgagagaatgtgagagaagtgtggtgatgtcttttaggacaaaaggcattataataatagtaataataaaagagcagacttttctgcaaaagtggacaagagaaacatcattcaaggagcgtgtttaaagatgacacaaacagagaaacaaattttgattttgttcctagtcttttgccaattgtggggtatagtttttcactaatgaattccaaaacctatggaaaccataactctgttttcactacacattacaaggtatatgaaagaacagggtacaacaaaaagactaggatattaaaggtttgacaccaatagaagatagtggatgaaagggtcaacgatgtaaaaccaagctctgctccaaaatccaaatggttttgtgacaaattctatttcagtacggcccttgccaaatagtccacactccacaggatctaacacaagcaaggatttgaactatgtactgatgatattttatgacgcagtggacagccccggcccaaacaattataactataagagccttggggcaacaaatatttttaagagttttttcttatcaaatattctaatgttttgggttctgattcatactaatttgttttgggccttattttaatatttttcaaaaataaatgggtttttaatctatgagtttttaaacatttggatgagctttaggcatgtgcacctctgccttatccacttgggccggatggtagtggagttttgttcaggatcataagtagtgaagacatcacaaagactgtaaccaatctcataattatgaaaatatgattcatccactttcctcccaccatactgctgatacaagatgctatgaatccattgttagcaagatccaaaaagtggatgttccttagatcacacaactggtgaggaatatgacatgttaaat

SEQ ID NO: 62019 - DNA, 1271 bp, Arabidopsis thaliana landsberg
tggagggagcccattatggactcggcccatattatcaccccttttttttttttttttggaaacgttaatgatatatggttttaaaaataaagtcgtacgtgcaaaggaattcgtcaatttttttttatttgttgttttttttgtgcaaacgctcttttattgttttactcggtttattaacttttagaaagtggaaagtctgtaaatcaacaacttatttagactattaacttcactagatagctataatagtattgatgtttttttcctggtctaaaaatataaattataaacttttcttttagataatattctacttgtataattatttactaatttcattctatgagaataagaggtgagaaaaaatgttgaacattctaagatacatgacaggagtaggtttttcaataaagcaaagccattgaatttgtcaacgaacgtcgccgttggacccccaaactaaatgtacttagtaattgcgacgactagttggggctagctaggcaccatacctaattgctatttgtgaaattctgacgtgtcggattgctatttgtgcctcgaggccggtgcagaaccaggtgtcctgccgtttcaacttgcaaattattgttttttttccgtcctcagtaggtaagatttttgcgtattttagttaaggtccatatgtagcagtcaaaacaaaacaaacaaaaagttaggccccctctttaatttatttttatgcaacgataatcctgtaattgtcggtttttgactctataatgttttttaaatatgccatgggaacgttaagatctatgccaataccaaagtgatgtatcgggcggtccacgcgggacgaagtcacagtcaaatgacctcacgtgtttcaagcacaaaaatcttaacaagacaacaatttcctctcttacatatttgtacaataaaataaattttcaaattaagccaaaaaaataacggaaagtgtttgattggttagtgcttcttataactgtcgaatttcagacaaaaaataaaatagaataggaacaaaaataaaaaacgtaggatttttgtcattagttgtgaataatactaagaatctaactgagacccacttgcaattcttcaagaatttaatatgattagtttcaaaagtaatgctaaacctcttgcgaatcacatcacgctttttatcctcttgagttttttttaaaaaatagaatgaaactactataacgtatgctttaaatatgttaaaaaatatgacgtcattttgaagatgt

SEQ ID NO: 62020 - DNA, 1510 bp, Arabidopsis thaliana landsberg
accgattttcaatttataatttgaaatcagtgaagtaagttgttaagtttagggagaaacaaagaaaaacttgcatcagtgctgaagcaaaaatatggaccaatattgcagtaatgaatagttttgtcgtagaatacaaccaactttatcagtgctcagtaatatcagcattaaatttagtaaacctactagttgtactttttagatttcccgcataaattacgaacgtatctttacccttttaatgattacagttattataaactgattaacatgagttagtgatccatcagaaattccaccaaaccgggaaatgtaaagactcttttcagtatctcggttttttaccaaccactgccgtggaaagtacacatcaaaattcaaaatctacagagatcaataaacgagaacgaatacaagaagttggaaccctagaaattttgaaaaaaagaacatgaactctgcagggaaagaaaactgaaccggaagtaaccggtatgtatcctaacagaactcatctaatccactaggctccaccaacacataaagcggcttccctttgagcttgagttgcccctaaaaacaattcaaaattttcacaaactcaatgagcaaatttgagttgagattataacaaaaaaactaactctatcactacattttagaaatcatttcaaaagaacaaaaccagagataacttcttagacaagtaagataaatgtgactcaccttgacttcaggcaagccaataacacaagcacactcaacaacttcagctccttggctctctgtaaaacgtcaaactgtatcacattacaattcaagaccaaaaaattctctttaaaaactgaaaaagaaaacaagaagaaagaaagaaacccaataggctcattgcggcagaaagagtgccgccagtagcaacaagatcatcaatgataatgacgcgttcgcgtggctcaacagcgccaacatgcatctctaaacggtcatgcccatactcgagctcataagactccgatatcactttccctatattttatagtttcgccaatttttcagaatctcaagagcttctctatcacaataaccaaaacagataatgcagtaaaaaaacctggtaattttcctggtttacgcaaagggataaactttgcgccgatggctaatgcaatggaaggaccaaacaagaaacctcttgcttcaactcctatattatacatctggatgtaaacaaacatattaatttcttaatgaagaaaaagacaattcttgtttctcctttttttaattgtcttttgtttgcttatatgatgtaaacccattttagaaagacacatagtttttggcgttacttaacaaacttgatgacgaaacactggagtaaagaaatgagaggataaggaagaaccaagggttaaaaacagaggagtcttaccagcaacgacagagatttgcatgtctttgtaacgatctacgaagatatcaattgtgtggttaaacgccttgggat

SEQ ID NO: 62021 - DNA, 107 bp, Arabidopsis thaliana landsberg
cattttttttgttaacaaaaattatataactggattttaccatctttttatttcaataacattaacatcattgtgttcatgttgtgtgaggcagaacttttacattt

SEQ ID NO: 62022 - DNA, 1084 bp, Arabidopsis thaliana landsberg
cgttctcataggtaaatctttgtttataccagtgcttaattcaagctttaaaattttcctatgatcatataatagtcgttgaactgctgtgtgttctactgcagtgtattaactgttcacgtccaaggaaaagaattggcctcaggatccattttaagaggctgccttcatttagtggatttggctggaagtgaaagagtagaaaaatccgaagctgtaggcgagagactcaaagaagctcaacacataaacaaatcgttgtctgcattaggagatgtcatttatgcacttgcacaaaagagttcccacgttccctacagaaatagcaagcttacacaagttctgcaggactccttaggtaaacgaacacaaaaactaagttttgcaagccattttatttccccgtgctttgttgtagcttcatctctcatctatgaaactatgtgcaggtggacaagcaaaaactttaatgtttgtacatattaaccctgaagttaatgcggtaggggagactatcagcacccttaagtttgcccaaagggttgcatccattgagcttggagcagctcgatcaaacaaggaaaccggtgaaattcgagatcttaaggatgaggtacatatggcatcagtttcattttcgttgtgcaaatcttaataaatatgttgtaacaatctttcttccacatatttagatatccagccttaaatcggccatggagaagaaggaagcagagctggaacaattgcgatcaggtagcattcggaacacaactgaatgtcagagagcaagagcagtttctcctttccatctcccaagaactggtaacggtgctggaacaaaggctgaggcaagtccacagccaaacgacggtaccagaagctacgaggtaaatcactcagagactagatttttctttttttattgatctgttggtaaaagagacttttatctaatcagtttggtgaatgccatttgcagaccagaagttgctcaactggcaagcagagaaagtcagggtttccgcctgcactgataaattgagatgcaagcccgaggatgcctgaatttagcacaagagaggcc

SEQ ID NO: 62023 - DNA, 181 bp, Arabidopsis thaliana landsberg
ccgggggaagaggaccaagacggcccgtgcgaacaggcctgatgcacaagcccccaacaaccccaagagcgaaacgcagcaaaaggaaggaaaaaacagggaccgaccccaccgaccccaccccgcaagaaccacgagaccaccccaaggacgcccccggtaaccaggggacgcggaccga

SEQ ID NO: 62024 - DNA, 426 bp, Arabidopsis thaliana landsberg
  unsure (1)..(426): unsure at all n locations
nnnnnnnnnnnnnnnnnnnnnnnnnnnnnnnnnnnnnnnnnnnnnnnnnnnnnnnnnnnnnnnnnnnnnnnnnnnnnnnnnnnnnnnnnnnnnnnnnnnnnnnnnnnnnnnnnnnnnnnnnnnnnnnnngtgtaggcagtcaccgctccactgaaggtgccacctgttattgtacccggaactgtgaggctgcccaatacaccgtttgtactgctcaaagagttggaggtgatattacccaccactgtcaatgcatctgtcgtttctcgagaggctgttactgctccgctgaaggtgccacctgagatcgtgcccggaacagagaggctacccaacactgccgctgtactgattaaagatgcagatgtgataatgactgttaatgtgatattaactgtatggatgcgattggttacagtcagaaca

SEQ ID NO: 62025 - DNA, 1703 bp, Arabidopsis thaliana landsberg
aaccactgaatcatctggaaaaggtaaggtgcagagaacgagcttaaacagagattaaaccttagctgtaaccattccaatgccaggcaattgtttcagcaaatatggactgtcgtcccagagcttttgatagagtgattttgcaagaagagttgagctaagagttcctttataattctttttgtatataaagtactctttcatgcatctggctattctggatccgttcgagcaaatagagttagcatcctgagacaaaagttcaaatgttcatatgcagagctaagaagtaaccgtgatcaagtgataggagtcatgaatataatactgatggacctgagtcatggataaatcatggactgaaggatccccagtcaaccaatcatttgcaagcacaaagagtttctcttctctggtttggatacgttttttccgctttcctttattatcgttgatgtggaatctgagccgcccttctttatctgcatttacatcatttaaggtcttcttctcattgcgtctgagctgtatcccttcatttttcaagataaacataaattagtatatccgtcaagtaacaacgagttatgtaccaaagcagatttgacatacaagatatctcttcagcatgacatacaatatgaagagcctcatccaagctatagctcgttggcgtattaataatgtacttcattgcttcaaactttagataatactttgtcatcagccttccgggctctacacaaaagaacgagagtgcattataatttgaaactgaagatatgaaatcataaatctcaataccttctggtttcaaaacaaaaccgtctgtgtcagtccagatcatctgatattgtgaaagctcattgatcttctgaaggcaaagctctggtaggacataggacacatgagaactccaagaaggaaaaatgagtaaactaactaagttagtaggcaccttgcaaatgcttctctacccgatctttaggaattccttttttaatagcataattctccggattctgtccatacaaacttccaagttagctatactatttatgataataaagaagttctccgacaaatcattgagagacatatgaacgtacctttttcattctgacatacaggtatgagcacttcatccactcaattgcccgtgtaatgtcagagatagtaagttgcactatttctgcggttaggtgctctattaagcatggcagcaatctggaacaaaataaatagaagaatatttcttgaagccaacatagcttttaaaagaatgttaaagaaagcaatgggttccaaaaaaagaagtttattgggcaatacttactgtgactcaacaacttcgcatccattcaagagattctcatatagatggacctgtaatcgtttataaattacaatcagagaacatacgagaaaagtaaaattaaagtgagatatttagccacatagaaaagtttcagtaaataaccgtctctcttctcgtcataataataaccattcccgtgtcatcaaatggaggccgaccagccctgccagacatctagaaaagaaagattacttatcctgctagaaatatatttaaagcacattccagttgattgtgcaaataatcagactgcaatataacatttaggatacacatgctcgaataatttacctgtaagagagtggaacgatcatattccatgtag

SEQ ID NO: 62026 - DNA, 128 bp, Arabidopsis thaliana landsberg
acacgtggaggtacgtgagtggtgagaagctaccgggggagaagatgcggcgtcctttcgccgtgacgggagctgttgatcgtgtgtttgaggcggccagagtgattaacgtagcggaagggagagtg

SEQ ID NO: 62027 - DNA, 488 bp, Arabidopsis thaliana landsberg
gcgatgggatgatagagagaagctactagagcttatggtccttacaaagaggggccattaaagagagaaagtagggagatatgaatagaatgatgtgattgtcattatcacttagtactgattgtgaaatcttccatgaccacgttttggaccttttggtttttgtgggtttggttggtttcattaggaaactgatgagccaaggatcgtttctgaaaatatgtcccctcttcaaattttttcattggtttggcaaatgatagcgatataagatcaaccccaagtaacttttgtgttatgattgtttttttgcaagtaactctcataattcatggtgatttatggtccaaaaaatcattatgtaagttaagagagatttctcaatctgatttttgtcatttttaataatggtccgactcagaactgttccaattttatgcctagggctaaacaatcattattcaaattaatacttttctttttctttt

SEQ ID NO: 62028 - DNA, 112 bp, Arabidopsis thaliana landsberg
ggtttggcttccggagctggcgggttctctatgaagggactatggttattaacattgaagtgatttactataatgatcgagccgtccccaaatctaagtttttatgatacct

SEQ ID NO: 62029 - DNA, 599 bp, Arabidopsis thaliana landsberg
gaaacagtatttcacccccgttctgcaatatagctacgccggtgatcacctggtggcggttgccgtttaatttaccgagtatgcgaatggcttctgaacggtcggtaggtttaccgatcacttctccattaagtaccacaatggtatcggcagcaagtatggtgcgtttggccagttgtccatgataggcttcctgcacatgcgcatgcactgtcttcgccttgttgtatgcaatatgaatggcgatatcgggaaagtccagtcctggcgggtaggattcatccgtattcttcacgatcacatcaaacggtatctctgcccattcaagcagcattttgcggcggggcgattgggatgcgaggataatatcttgcataatcaataacttctctgatcctgtattcaggaataatatattccgaaaaacaccatggacaatatgcctgtaagcataaccatcttcaccatactgcttagtgtatggaactgtgcctgtgtttgcgctttgaacagcctggccagtatcagcaccagtggcgccacgatcagcagcatgcaatacaccacgctgtgccaccaggcaaatggcaatacataca

SEQ ID NO: 62030 - DNA, 1150 bp, Arabidopsis thaliana landsberg
tataatgttgatgaaagcaagtcaaaagtggttatttaatagttattcagtcttcctggttaattagaagtgtatatgattgctgctaaatatttccacttcggtatctcactcggtgattttgcagacaatagcgacttccagtctgttcctcgcttgcaaagctgaagatgagccatgtcaactgtccagtgtcgttgtagcgtcttatgaaataatttatgagtgggatccttctgcctcaattagaatccatcaaactgtaagtgtatacatacatctatgtattggtaaattcgcactgtgcattttgctaatttattacatgttgctctgcctgtaggagtgttatcatgaatttaaagaaattattttgtccggggaaagtcttctgctgagcacaagtgctttccatttagacattgaacttccctacaaacctctggctgcggctttgaatagactgaacgcttggcctgaccttgcaacagctgcatggaattttgtgcatgactggtaaagacccttgttaataatatctgcccgatttttcccctacattgagttggaatcttattatgcattgtgtgtaggattcgaaccacactatgcttgcagtacaaaccccatgttattgcaacagccactgtgcacctagctgctacgtttcagaatgcgaaagtaggcagcaggagagattggtggttggagttcggagttacaactaagctattaaaaggtttgctgttcaaactctattttttcctctggtattattgcagtcatttgatcaagtgagatgtagtgtttctataatgttagcgctaggaatatgtggtactgtagctccagctcatgttaggttcttaccctgtgcacatattgagtttggaattaggtagtggcctgaacgaagagatgtgctgctattgattttagcggttgattaaaaataattggatgttttcattatggtgacagaggtaatccaggagatgtgcacactgatagaagtggacagaaggaggaatatgccaccttcaccttcacctccaaaaagagaatttagttggggcattccctgcagcccgtaaagcccggtccatttggctttgaggctttatcctttttcacaggttacccttttgca

SEQ ID NO: 62031 - DNA, 1063 bp, Arabidopsis thaliana landsberg
aaccttgatcatgcgactccaggagtaagtgattggccttggtatcccttttcttgttgaagccattaatatggaggaagaatgttaatttattaagagaagttgatgcctaagatacatccaagtccttttagcgtagttataagttgacaagcaatgtgctggttttatatctctactggattgatgtaacttgacgtccattttcagtttttcgtttctggtgactcaacccattcattgtctcaggatgtaaggagagggctgaactctattcgacggatttgtgcagactatagaatcaatggagtttttggtccacttgttgagttggttgattgcgatgaaaagtttttcactgcagttgaagtcactgctggaaacaggtatgcaggaaacctactgagtttacctcacacctacaattactgtgaatctactttttatcttatgatctactcttgtcatctcttgttctacgaccagcctgtttaacgtggtagttgagaatgatgatatttcaaccaagataattagacacctgaattctctcaagggtggacgtgtgaccttcctacctctgaatcggataaaggcgcctcgcgtcaactatccaaaagattctgatgcaatacctctgctcaaaaagttaaagttcgattcaaagtttgaaccagcattgggtcaggtgttccttttgttccctgtccaccacttttatgcccatcaatttattgtcactttctgagctttttatgtggctttctattctcatgtatgacactttatattgtaatgtgtcttgatgtaggtttttggtagaacagtagtatgccgtgatctgaatgtggcaacaagagttgctaagaatgatgacctcgattgtataactatggaaggttggaactgttattgcatttgtattcactttaaattccatttcaacatgtatttggtacgtgaaggctctgttgtactatgacaggtgaccaggtgagcagaaagggtggtatgaccggtggattctatgaccacaggcggtcaaaattgagattcatgaata

SEQ ID NO: 62032 - DNA, 496 bp, Arabidopsis thaliana landsberg
gggacattgatgacccattgagcaacgccttagttatgttgagcacttggttttctaggcaacatgatgggaaagtttagaagtgaaacaagagcttgtcaagaagaggaaacagctttgtttttggcagttctgatttcctcactctgattcagttgtattaaaacggtctatagaagttggatcttcgatgtcgagataaaacggtcgggatcgatgaatcctcatctactgattgatcagtgacataataaatgagattcggatacagaatgcagtgatcatacaagtgcaaagtaactaatcattgaaacattcaaaacatgggtattgcccacaacacacatgaatataaaagtattaccacatagggcattgatagtcaccacactcctttcaaggaagctaaattgattatgtgttccagaacatcaacttcttcctcaacgaccactttgctacacctagccacaatggtaccaacttcctcgaattt

SEQ ID NO: 62033 - DNA, 438 bp, Arabidopsis thaliana landsberg
ccttcctatatattccaatatgtatctgttcgctgttgattggtttcttctttggcttttatctataatagggttggttaattggtttgttatttgacaaggatcattgatcaccctcttgagaacatctcgagctttcccagatctatctgagctcctgggtttataaatcgcttccttcacatatcgatggggtgcgtttcttcttccgatttctgtttttgactttatgcagaatgttttggtatttgattgatttggatttgagattctgtttgatgggctttgttcctgcgttatgtgctgcttgggattcatgttcatgatagataaaccctaattttattgctggggaatggtgcttataaggttgcaacacgcaaatgagatagctatctctgaaagttcactagagaatgttttgctaaggaacactgg

SEQ ID NO: 62034 - DNA, 1435 bp, Arabidopsis thaliana landsberg
aatattgtttaaataaaattcctgttttttggttaaatacatagattaaatgcccaaaaaatgaaattaatgatgtgaacaaaatgaaatgatacgatgagttgatatgaagtgtataaaacgataacctttcaaaatctggtccataatctcaagttctcaattaaccacttgtgtgtataggttgtgccctaaatattgtgcccatcccctattaacaatggcgtttgcaagcctaagttaattgggctgcttaaagactttgagaacacggtaatatagccacaccagttgtctgcattggaagccaaattatcaaaaaaaattcgcctaaactaactgactcttcaaactatccaagtgttgtcagaaacttttattccaatacattgttaaattttggcatataatattgaaatcctcgagatctcgaaagaatgtagtaatttagagagttgaatcatgctaattattgataagaaaataatcttaactcctagtgacatatataaatatgattcatgagacagattcactaatggcttcctctttctttgtaatgcctcgaactgtccatataaacctatgagtttgctatgcaattgcaagcattttgatccaaaggccgccaaaacgtcttaatgttttctcacacacattcagacgttttgacggcctcatgtgtcacatcaccaactatattggttatacaatgttctaagagatttagagaattgtgttgaagtgatataaatttagaacttgttgccaaatgagcaaatcgaaaaatgaagaactatgacgagttttaaagtattccggcaaagtctaaccactctttatgacttctcagtgatcttagctcctttagggaagttagcatgatcataatctcaaaataattggctaaacctcaaccaaccggtccataaaacggatgaatcgatttttcgtctcaaaggtaaccttgaatctaaccaaataaaatcaaaccaatctcccaaaagccgacataagagaagcaaaacccaaggatcaaaccaggtaaaaatgagaattagacaggataaattaaaccggatgatttcccagtttattctgtccactggtttatttagttgaatttcttcgtcaacgtcattcttcttccttaaaccctaatcaaaaatctcttcttcgagctatggcggcctttgaagacagagcagatgaaaacgatgaaattgccttcaaagatggcaacactgatatctcccaacagcttatggaccgttacggcaagtcctcagccgctcagcaccgtcatctcgtcgccaccgccgtcgtatgcgctctattctcacctcagagtctcttccaccatctccttcagctttcttcgcagctgctatatcttctgtcgattcttcaactgaagatcccgtggccgtttctg

SEQ ID NO: 62035 - DNA, 1221 bp, Arabidopsis thaliana landsberg
cacgcacagaacagaagacctccgccgagccctatcatcactctgagctcaaaatcatcttcctcctttctcaatccaaatcttcttcttaccaattctttttcttttcaaattttcataaacagattacaccaaatcccaattctccgtgacaaagctttctccttttttgggaatcatttgttaactttcccggagaaaaaaaatcaatacttgcatgctcttaagactctgaaatgcaatcatcgcatcgaattttgtctcgcctccttcattctcctagaaaaggttacatcagagcaagtgtcggtggctctgttcactttttggcgctattcgacgagaaagacaatggatttgtagatactactcatcggagttttagttctcttatccgttccagttctcacgtaagagggcttatctccaccaattgtttaaataaaggtcttggtgtgcgatgttctgtttcgcttgatagggaaacacctttaattgatacctactcctctcaccggagtatgtcttcttttcgttgacctaatgttttcaccttttttgtatattgtgttgtttattggtttagtgattgatacttagtttggagaaatgtcaatgtgtttgctcgtttacagatttcttcactcgggcgaaacaagtgaagagaattgagatcaatgatcaacacaggtaatgttctagtttgtgttttcttgtaatgtgagtagtattatcgtctgatcattttgtttatgtgtggtttaacaagttcttttgagttgccgtttgctaaatacattttgtttactggttgtttgggttccaaaattgggtaattttatctgttcttgtatactcatgaagattggtatctttttttggtagaatacagtgttagctagcttctgttttggcctttgttgtggttttattagttttgtagcttggtgaagttcattgagttagccaagggaggtcatgagaagagaaattcttccatgtacttggtgtcttatcttgtgaagcccttgagctatatttttattgtgagtttttcctaacttctgagttatgctttcgtgaacattttgcagtcaaagagctgtcactactgcactatggtgcaacttcctcgtgttttcactcaagtttggggtttggtggacaagttctagccatgtcataatggctgaagtagttcactccgtagctgattttgct

SEQ ID NO: 62036 - DNA, 235 bp, Arabidopsis thaliana landsberg
ttttgtttggtttctccaccaaattgtatagagagataccaaactttttttatttacttacagaaaacagaacactgcctagatagttagaaaaaagaaagtatagagagttttggattgataaggcttcatcacactattttttcgaaatgacttgcaaaaaaaaaaaaaaaaataactcgaagaaaaaagagtaattcgaattgaataggaatcatggaaatgtggtggtgag

SEQ ID NO: 62037 - DNA, 363 bp, Arabidopsis thaliana landsberg
  unsure (1)..(363): unsure at all n locations
ggttcatcctacggattgaacaatgctttttccnnnnnnnnnnnnnnnnnntatctagccgatacttgcgcctttcagaaaagacccatctctcgcaccatctcaccgtatcgtgtcttcagcatgatctcaaatattcctccttctttatcaatgcaggcccaatcggatctctcgacttcgactgtaatgtgaccagacgaatatgtaactgaacaactctntggagctggacattcggtttacaacatcttcttgacctggtcttaaatcacaccacaaaccagttaccaatcaatacctaggaaaacctattcaaactcatacgtatgatacaactctctagtaaggggatagattaca

SEQ ID NO: 62038 - DNA, 522 bp, Arabidopsis thaliana landsberg
aattgattgatgagcatacccatttcttctataatatttgtttgctctaagatagtttcacctattctcttcttcataaagttagatgctatatttattttgagactgaaattcaaagaagagaaaaaatccatttgttttccaaagtcctttccaagtgcttccaagaatgaaataatatcaaattaagatcatgaaaagcctcaatttgatttgcgctaaccttaaaactcttttgcaatcgtctatgatttttgtcccaaccattgtatgaatgaatatttcttctaacttgatgacaatgcaatgaaaatcatatcatatctttattggaaagtcactgtctttatttatttttatcacaactcattgacatctttctttcatcaatgtatttgattttgaagttgccatcatgtttacaatttatcgtgtttcataagtttattctatgttgctaactaaacacacatttattaaatcttaaacatgtaatacaaaaaagtaccaaccatggtggat

SEQ ID NO: 62039 - DNA, 1112 bp, Arabidopsis thaliana landsberg
tgaagctaaactatcgtcaacaacatcccgttttcgttgcacatgccgggtttggattaaagtatggaaatgttgatctacagactcttccagaatgttatcaagtacagctttatcaaagaagtatggggtatacctggtaaaggtaaataaaattaggtactaaaaagttataacaatcccaggatttttcatacaaatggtaaatgctcgaagaatttttttgcacaactatcaaattaaaatacaggcaagtcagcaagaaaattgaaaagccatgtgttctgatagtataacttggagggagttgattacacgaagctaaaatattttcatgtcctaacaaattcacactgctttacatcagttaaactcaccacttaattccatctgcagttgcaacagcaatgtccaggttttgagcaccgaaaacagggacaccctccaccttttgtgttttaccattctgtggcattgacttgagaagtttgttggcagccttcacctgcgaatcagaaatcatttcagttagaagtaagttaatcaaaggagcaaacaaatccaagtcacagtgtcacactgacctgtctctcatttggaacaaactgaaataagtgaggtttctcctgaggaaaatgaaacaattaaaactcagcctctcgtacaattcaaatgtagtatataacaagatactagttccaatcaaggcataccttgaaatgctcatatgccaaatcaagtcgacaagccccaaccactccacttggaatatttagttttttaacatatgaaactgagaaaacaaacaacacgtcaggacccaaaaattggcaatctggtttgcagtttcaggatctccattgcaattcattttagattatttcagccttattcaaaaccagaaggctcttatacaagcaagtagtatctagactaagttactgtaaactgctaaaatagcttacaaagagaagtgtcaatgcacctgcatcatcaagatccatgaaaaaacggaacacagggccattcctctcgctcttagtgatagtaaaaaacattttctttagccactcaggtgttctgtatataaacaaggaccgggcttggctttt

SEQ ID NO: 62040 - DNA, 422 bp, Arabidopsis thaliana landsberg
tgtgttcggtttgatgcaacagacaacttcttgatcaaactgttaagaaagatgacatggatgggtttgtattgcatcttcagaatgaacagaaagaatctattatgagagtggaagaagctggtctgcatctttactcaaatagagatgtagatatgtaagtgctttttgaccatgtttcttcttactttgcattagctttaaacagattttgtttttgaagatatagagatttggttttttggttcaggcttttggatggggtgccacaagatcccgaaaagattgtttctactcctacaaacaagtctcatcggttacatccggatccggttgatgcgattagtatatcatgagattatggctattctactgcaaaggcactagcacctggtacccctttttggtgaatagtccggatg

SEQ ID NO: 62041 - DNA, 390 bp, Arabidopsis thaliana landsberg
gggacaatggcgacataaaagacaaagtgagaagaaaacgtggagaaagtagagtggtctttaggttcggaatattataagttgggttttgggttcggaaagtccaaaacctcgctactcactagtctctagctgaaagttcgagacaaaaagataacaacctaagccgttttgtgcctgggtagaggtgtcaagtaagtcggcttgtgtgtacttggaccgatctacaatgtgcacttatttttgtaagaccgcaacgtatcggtccgctcggactacacgcaaaaattatatgtggagaacccctctgctatgaccaaccggctagcatgccgtcccgcaagtttatctgctattcttatcagaagcgaaaaggccgactaacaattt

SEQ ID NO: 62042 - DNA, 1465 bp, Arabidopsis thaliana landsberg
aaagattcgacgattggtcttgctgtatttaaagaatgaggcacacgcccacaatttgatttagaattcacaaacattaaacaacgtacctagagctagctcgttttatccttgattctctaaagaatggtgaaaagttgagagagctagagaaagactcgacgtacctgaagcaaagagagagaagaagaagaagagcctttggggtggggttaatttttgtttgccccacttatttctagggtttggacaaggaataatataatctatatacgtattgaaatttttatttagtgagatagttatttaaatttaattttgtattctgtttacagagataatgatcatcccttattttttggttattttgccagtaactttcatcatattttaccggcactgaactttgatgactagataggttcacctctaggctctagtttattttatgtgcattcaattgctctttctcgtttctttgttcataatcatatatatacataccaagactaaagtttaaagtataacctaaaaatattaataaaaagattcagatttaaataattcagaaataaataactcaataagccattatcaaaacactgcattgtattgtctttgaatcaaatggtagatatataattgtcttttctaaagcagaatttagttaacaggagagtatttggtgctagaaacaactgcaaattcaatctctatgttcaaagaaccctcattgtccaagtacttctctcgcactttatctaaagacgcaaaagtaggccaaccatagccttggtttttatttgtatttgtgcgccagaagttgcctgcaacaacagaggaagaaatataagcatgcatattgattataagtcaaatataattacaacttataatttaaaatagtaaacgagggacgaaaaagagcaccaaatgaaacattatgtttcatcaaccagtgaagtaaaacaactataagatgatatgatatacttattgttttggaaacttacattgcccggcttggtgaatggatccaaacggatctaaaactctaagatgtactcgcgtgtagattttctcctctgcattgagtgtttcactttcacttaaatacacataaatggataacgagttgtctcgtgctttaacacccttaggatgcacctttagaaacctacagaacaattttgcacttgttaacatagcatatgtaatatgaaaaagcaaaacaagttttttttagactcctcaccattgccttcctcctactaaaaacttgtctgagttgtataactcctcttttaactctttaaatttcttgcgagaccacgagaacttgggatcaaggattgtctgattaaaggacacgacttcccatttagtcagggatggagcaaccagaacatcaacatcaaattcacattgatctccctcaaagatatatcaggttttagagtcgttg

SEQ ID NO: 62043 - DNA, 1226 bp, Arabidopsis thaliana landsberg
taaaggtgttttttaaagataaaatattagcaactcgcgaagaaaattgtgagcgaattaaaaaataattggcattgcggtaagcaatgaccaaaaaacttcgtcatatttcataaatcaggagcctagggaaacatgaatatcatttgattattaatgcacatatatacacacaacctatacgtataaatttgcatggcatcgattgtattttatactattaagtatgagattggtttaaagtttaaactttatatatatacataaaaaaattgatgctcataactccaaaagtgttgatttgttttgttcgcacttcaaaaccacgtgattttgcacttgtcataaaggtccacccaactttaatcaccctttgcatctaacaaaataatattctctgtagctctataattatattttctattccatttcatgtaaaacaatcttcattgcaaaaactgaaaaagttatgaacatcatgaaatacatttaacacaataaactacttaaccaagaaatcgtaactaagtggtcgcgacgtaaaaaaaattgtcgtctcatttggtttggatgtccgagtttgaggtcttgtttaaactgtgcaactacaatcactggcaaatgtgacactttaccactaaaccaatcgactcctaatacatgttgttcaacgctttttggcttctgcgtttggcctaagaagagcactaattttgccacaaaagtttatagttagagactcttaacaccgaatattaaaaaatgactgtaatggctcagttcttagtcatttctgcagtagctttcttcagcgcctggtcgtggttgagcattgcgtttacactcttctccacaaacataaactgaaataaatacagtcaaaatcttaaacccgtaaacaacgaaccaaactactaagataagacccttaaaagctaaataacaagccttttggttgatatttcacgactcaatgaggtcgaaaatagatccaaggttttaggcttttaacctgaaagcacgcatagcccatagcatttccgaagtagaagtttgcatttccagttccctgtaaatccaaaaatatcaaatgggttctggtttcttttaagttttattgtgattgaatggagttgagtttgaagctttacccttcatatccagaaattgtgaatcacagggctgagagcgaaaatccgatatatccacagatgataaagaacgag

SEQ ID NO: 62044 - DNA, 1027 bp, Arabidopsis thaliana landsberg
atctttctctttgttatcgccaactagagtatcttcccgaggcatttatctcaactctctgtaactctcctccttagagtgttctccattaccggctcaatttcaagtggtccaaacatatcagacacaaacagtaaactctcacatacatcatgagtcatttcgtgaagtaactgcctcattgttcttctgtctccaattaatttaacacacatggctcttctaataatggttttgattttggttaattttgtagatatccaagatatggatgtgaaagttgaaacacaggttgaccatagtgagttgatatgcttggtattattaactgtggatcaaaaacaatgagaaggaagttgaccaaaaaaaaaataaaaaaaagtgagaaggattgttcatagttttttataaaaacaatctgggcctttttatgggcatttattttttcatgaaaaatgcttctaagcccaagtaggtgtcgcacccctgcccaccccatgtgggccgtacctaggtgtgtcttagatgaagctaaaccatttttcatagactcatccataaaaagtatgcaagttaaaacaaaaaaaatactggttttggtaaaatttgcaactcctgtcacaattactaaggcttgaacctttcttcacatagatgtagcacaactacaatttttttttatatgcaaattagttgctggaaacgtgaactcgatagaagcaaaatgaaaaaaagaagtcaattctgttttcaactgaatccttttgatttcacacacgattcatttcctaaactgagaaaaagcaagaaaagatacagtatctaccaaatcataatgtacccatttctttcttataacctttaagagctttcacacaacttggccaaaataaaaataaaaaagaagctttcatttcacacaccaacacatatctctaaacacataaatctctggaatttacttccttatacgtctctattctttatcagcatatttatacaagagagccaaatgagaactcactca

SEQ ID NO: 62045 - DNA, 1360 bp, Arabidopsis thaliana landsberg
  unsure (1)..(1360): unsure at all n locations
tttagcatgatttattaattttcagctgctagagcagacttcctaaatgcaaattcctaaggacaattgaaatatttcttataaagaaaaaaggaggaggaatgataggtctgatgtttggaagtgtatatgcttattggctaatctaatttaccttttttacgttattgttaggttttggtgtggtggcaggttggggaccatattatctgcctcttcctatttgaatttcaaaaagtttacactaatttgggtatgcatgatacatttcaaataaaattgttttttttagtggaggctaatgtttttagaaattagtatttcttcctacatattttagctctttgaatgatgattttaaaaatgatttacctaaaacaaaattgccagttttccaagtaaaagtgagactacattctgtggtcagtgtaaatgacagtagaaaaaagactggaccccagacacggctatatgctaggctaatcgattcgaccctgatgctcttctccgcctacccctcttctgcctgattctccatatgcttagtagcactagaactcctacaacacaacccgaaaaagtttgatgacctactttggaaacaagaatcatactgatcatgcaatgaaaggttaagcaagagactaaatatcttccaaaagttttcgagtatattaccactagctacaacaccagcaagtacgatccagcgagtaggaacaagaaatggcatgtcaatctgtaaattgagagcaaaatattagaaaattatttggtccctccaaaattaattagaaaaactagaagattacatgaattacctcgtctctattgaaaaggcctcccagagacttgctcctggaagaactaagctcacctccttccttggctgatctccaacgcgttggtcttttactctccactgtgaaattcaagcctctacccaaatcaatgccatgataaccgggtaatctacgattccttcctctgacatgtaagttatatcctttagtcccccatacttcaaatctggagtcactctcacagattagctcctttccgatcacagaagagtatgttgaaaaatttacatcagttcttcgggatggcagttgcttctcgtctatgattactggtgaatatctcttagcaaattttgagaaaagtacagggtctttgatatttgaactgctaaaatctagcattttcttcaggagccagtagcagttggtgaccatgtggctactatccaaacaatttgagtctccatatacaccaacccgaccttcaccaatctccaaaagcccaagaacagcagggtcttcctgtanacacagccacattatcacaaacaaatcac

SEQ ID NO: 62046 - DNA, 557 bp, Arabidopsis thaliana landsberg
  unsure (1)..(557): unsure at all n locations
tggccaccaaacgtaattacacttgtggaggcattattgactttatttcaatacggattgcttctagttcatgcgtacgcccaagacaagcgatggccttacttgtctttaccaatgtgggtttcttctccagacaataatattagttccttcaaaatggatttctactaaagattgtatctttgtgtttgtatttgatacttgcaggtctagaggtgataggccagaggagtgggttccagaggagattgatacatccaaagatgacaatgacaatgatgttcatgatgtgtattcggatgctgctcaagatgctgttgaatcgggaagcagaaacattgntgatatcttctctattcattcagctaacaatgatacaggtactaagtatgattaggctgtctattctattgatataagatcagttttagcgtatttgcttatttccaaatctatgtgattcccatatttatctctggtagtatattgttataaatcaaactttccctgtaacaaacacttttgcagggatcacttatcatactgtggcagatact

SEQ ID NO: 62047 - DNA, 403 bp, Arabidopsis thaliana landsberg
acactttttctttttattcatcaaatgatctgtttttttaacaaaatgctaaagttttgacactttcaaacttaaaatctcaaatcaagaacgtgtgatatttgaagatttgttttgatttgttcgattagttaaaaggattcgtattgatcgagttccaataaaatccttgtggttctcttttgacttctatagaccttttaaatgacgaatatatctagctcttcttgaatctaacacgtgatgattattagtctaggtttcggcctgaaattaatctcggttattatagggaccttaaggtttttagtactaagttgaaagatctgtttttggttacagaccggtgattcttcctgaaggtttagaagaagattaaaaaataccagactgctttaaaaat

SEQ ID NO: 62048 - DNA, 913 bp, Arabidopsis thaliana landsberg
acatcaatcgaatcgaggagtctttgaaaagagttataaacaatacaaacactgagtgctgctgagtgagtctctctattgctacctgaaaaaaaggaaagcgtttgcgcgaaaaaaaaaaacagcaggtagttgcactgttgtaacaatattttcacatggtcccgggaaattcaataaattatttattttagatacaagatggttgatatttgcacgtcgttaggacattggactcgtccagtgtctgaaaagccgtcttttatccaacttccccggggattcccaatcctttttatctttcttatcaaatagaattgtcaaccaacagagagaaagagagctttgactttagatccaatcatggagacaactacaactcctctgctccccggtgatcgcagcagatgcgggtggctccgtcgccgtctccgcctcaaaaaccctctttcttctgaactctccggcgctgtcggtgatctcggcaccttcatccccatcgtccttacactaactctagtctccaatcttgatctctccaccactctcatcttcactggtttctacaacatcgccaccggtctcctctttgacatccctatgcccgtccagcccatgaaatccatcgccgctgtcgctgtctccgaatccccgcatctaactccttctcagattgccgccgctggtgcatccactgccgccacgctcctcctccttggcgccaccggagctatgtctttcctctacaacatcatccctctcccagttgtacgcggcgtccagctttctcaaggtcttcagttcgccttcaccgccatcaaatacgtcaggtttaattacgatactgccactctcaaaccctcttcttctcctcgtatttggcttagctcgacggccttatcttggctctagc

SEQ ID NO: 62049 - DNA, 344 bp, Arabidopsis thaliana landsberg
  unsure (1)..(344): unsure at all n locations
aagaagaacctttgttgaaacccccacagcacgaaggagaccgagcaaaagaaaggcaagacgccgaaaaccccggggaagnaagaacaaccacaacacacgaaaccccccacgaacaacgcgaacaagcccaaaccaaaaacaaacgaaagaaaacacgagacaaagcccagagaaaagaaggagaggaggaggcaggaaccaaaagggaacaggcgaacaccggagacacaagaaagaacacacacacgcgcagggcgcaggancagacaacagaaaagcccccacaacgacaaggcacagggacgacccacaaatagaccgaggaccaggagaaggcgcac

SEQ ID NO: 62050 - DNA, 774 bp, Arabidopsis thaliana landsberg
cgcctgattttgtcttcacatctgaaattcagtctccgaggctcaaaattcgaaaggtttcttacttcttcttcttctggctatgatttacttgcttggtcttgatacatggaattccttactcgttaggttcttttggattgtggggctgtacaagctgatgcattgaccgttgatcgtcttgcctcgttagaaaaggttttactcatatgatcacttttatgattcttgtccattttggcgtatttttggctttgttaacatttcgatactggtttggtttagtatgtggaaacagctgtggttcctcgagctgaaatattggaaactgaagtggagtggcttcattctatcaaagctgattttgtggtaattttgattttgttcatacaacaatctcagcacttttatcagaaacgcattcatctagaagacttttgctttgtactccatcattttcataccaagagataaactttagttgaaaacaggtgtctgatgttgtccctgtcgcatgccgtgctgcggctgatgctgggatacgttctgtttgtgtcaccaatttcaggtgacatttttatacttctactatccatttttgtgcgtcttgtttggcctgatttctactcctggtattagtccttgttcacggcctgtaactctgtctctattcaaaaactcctgtatttgttactagagggagatggttttagtgaaaaaaaatgttaaaaacttttattttaaaatttgattgttccttttagctggggattt

SEQ ID NO: 62051 - DNA, 429 bp, Arabidopsis thaliana landsberg
gcgaacagcaagggaagagtaatgtggaaggagatggagataaagggaaagctgacctagaagaagaaaagaagcaagatgaagtttaagcagagaaatcgaaatcagatgaagttgtcgagggagtgaagaagccagatgataaaagcaaagtagaaaagaaaggagatggagacaaagaaaatgctgatttagatgaaggaaagaaacgagatgaggtagaagcaagaaaatcggaatcaggcaaagttgtggagggagatgagaaggcaagtccaccacaagaatctatagacacgatccagaacatgacagatgatcaaaccaaagtggaaaaggaaggagatagagacaaagggaaagttgatccataagaaggaaagaagcatgatgaggtagaaggaggtattctcgaaatcagacattggt

SEQ ID NO: 62052 - DNA, 1229 bp, Arabidopsis thaliana landsberg
aaacctgattgagaagaatagaagctgccattgacgagtatttaagataaaaagagaactgagtagtcgcttgaggcatgatagaaggcaaagactccaactttgcaagaaaagattcaaaatccaatcgatctaataagttctacacatagaacacaatacaaaaacactaaaatcgattctagatctgtactacattaccttcttctcggcggttgatgaagcaagaacgattggaagggaaaactagagagcgaggttgtaaccggtgaaccattccgacaaaagttaagcaagagcgtcgacgaaatcaaaggcttggagagcgaggtcgtaactggtgatgatgattgaatcgttgatggaggtatatgggattggggagaagaaaatttggtgatattagggtttctggaaaaagagatgctggtgaatggaagggaggcggacgatatgagcttatggagagagtgagagtgagaataaatatttttagggttttccttaaaaattttggagcccaattttttactaaggcggacaatgagaatatttttagaattttgttaattttacaataacgttttataagtttttttttttttcgactgaataatttcattagattaagaactgtttaagaatacaagttcaccaaaaaataggatcggagacaatcaccatcagagaaaacaaaaaacgcattacaattaagtaacacacatctcttccgtgaacaaatccttcaaccaaaaggggtagcctgaagccacataagattgtcttcgatcctcatttgttacgcttttcgcgatcaagttagctcctttgttagctttcctatcttctgagcataatttccagttagagataggttgaagcgccctccataaaatctcagactgaaacttaaaagaaggccaagctgctggacgaagaaccgcctgcatcaagtctttggattccaccgcaaggcaaacattcctgaccttgagactgctcatactttcaattgaccagagccagcaatgtagttctgcctcgttttttgaggccatattagcaaaagacgttcggctgtgaagtaggaccgaaccatgagagagcctaaggacccaagcagcacctgcctgcttttttacactatcccaagaagaggccaagttgcattctaaccgaggttcttctggtggtctccagaggggtctagatatctgagaagacaaaga

SEQ ID NO: 62053 - DNA, 1346 bp, Arabidopsis thaliana landsberg
cattaggaataggtttgaggtcatattagaaacctaaggaatcgtttctatagctcttataacctgatgactgagcgcgaggtttaaaaagagaggttttaggagacgaagagaataaaacaaagcagagatttttagagatgggtctcgagattcttccgcctcgggttataatcggcgtagcttgtcgaagaagataaacgccgactgaacggaagcagaggagactcaccattgacgctgcaacctaaactcagggataacgccgacgaagagataaaatcaaaacgcagcgtttttagtttttcacaaagaaatgggtcattgtgaataaacatggtttgggcttttatccgatcgataaagcccaataactaaaaaggacttgtaaaatcgcagtgcattgcgctagtagacaagttaagagaaaaaggaagctacagtgttactccactcataaatgaatcttgctttgtttttggtccacgttcatatcaaattgatttagtgctctaaggataggatcatcttttcatttttcaacatatggataaagatcatatctaatctactaaaaatatcaatgcattttaaactccaacttgtcacattattgagttcccatttggtttaaccaatctatttccagagatatatagatctctacattggatacattttggggttttaaacttcatttcatagaaaaatcttaatttataaaaagtagtcaactttacacttgaccccttggtgtgatagaagaatcataaagaaagggtccaaagaaatacaatcactttcttaactctactgttacaacatttaaaagagcatatctttcttcttcttcgtcattatcttcattttcttcttcttcttctttcttgtaaatttcagacctcgttggagagttttggacagcaagcctcgacggcatcagccaccgttagatagatattgtcttgtcctaacatgtcggcaaagtgcgacaagtgtagcttgcctatcaccaacggtccaggattcgccagaatcaactgtttatcatcacaaaacacagagtcaggtaaatcttcttcaactaattcactttgagtgcttagattataatccttaaagaattcagtatgtgtgtatatatgtatgtacctgaatgtctcttttctggagagacttgtataagtcttctaatgcgtgaataccacttgtatcgatgtccgtaacagctgaaaaataatggtgttcgttaatctttgtgttatgagaaaaaaattaagaaggaatatatatagaaattgggagtgaagtttaacttacgtgacatttcgatgatgagaaactga

SEQ ID NO: 62054 - DNA, 557 bp, Arabidopsis thaliana landsberg
ttttattattacttagaacaaaacttgcgtatatatatatgctctattcggcatgatgatttccataatgtgtaatgtcggatattacattggttacattttcaatgaaccagaattgggaacgtccatgggtaaatatttgaatccacagaagaaattgatgaagtttccatgactgtgatatttgttgattcctagttgattataagtcgactttagatatgtcgatgtttagtaagagttgaaccacaatgagggaactaagttaaaaaggcgttcaaataaaaagtcacatgactcgattggttttaaagggaaaagaaggaagctctcttttacgtcattgtttagaggtttactttgaaaaaataaaatatatacgaagttatagtaatgttgaattaaaaaaaaaaaaaaattgaaatcttatgttcaaagcttagaaaaattctcccaagattaatcttctagaccctagagataatttggcatttacattctgggttcaaaagaataaaaatactacataacgggctaacggctcatgtagacccaca

SEQ ID NO: 62055 - DNA, 449 bp, Arabidopsis thaliana landsberg
aaaggaatagagaagcggagtaagtatagatttgtatggtcagcgcctttaaccaacaatgaagctactgaacctacatctattattcggatcatatgggccttgggagcactaagcaaacacaattataggattattcttctgtagaagatcatcatagtcagatcttgtcatcataaaacccgagataataccttgctcctaacaattgtgaaatcatccagccattcgaactctacgagtgatcacaggatgtggagcttctgggtttgggaagtctaaggggaaacaatcagtctgtatcattaacgccctttcacagcaaaaccggggacgagaatttagcattgcactcatggtatatgacagctatttatggatatgagcaggtggtaaaactgctagaaagagaaggagttaggcattgtgaagagaacagagggacactg

SEQ ID NO: 62056 - DNA, 509 bp, Arabidopsis thaliana landsberg
  unsure (1)..(509): unsure at all n locations
atatttgttcatcgcggaagcaatatcagctgttcctcatttttctatattnctaatcatggtatatataatatcataaaagatgatttatatacatatcaccagtgaaaatttagataaaataataatacgttgaaaaagtaatataattacagcgacgatggccacaaacataattcacgggtgatgatggtcaaagtcgtccgtcaaattatttgaataaaagtcggggtttctttttttcacgtcaagctaataaattaaccttttttcaaaaaaactgtctataatgattagggcaattctatagtcatcatttatgtggttcctaagtctatagaaaaaaatgtggtaggtgtggttaaatatagcgtgaaattctttttttttttttttttttttgttcaaaacttttatttttgttacgatcaatcacatttgtagttatttaaaattttgaataattactggacactggttgtaaaaaaaaaaacaggtaaaaaactttg

SEQ ID NO: 62057 - DNA, 1022 bp, Arabidopsis thaliana landsberg
gaaatgctttactaaaagttgaatcttgaatcgtttttggtagattctgaatatcccattagcttattcgtaaactcgtcgtaaaacccaacagattttcaagtttcatttgtctaggaaattgataatttgtaatcatcaaacttacagatacagccaatgattctgttaattatttatttcagagatacaaatcctaaagagtattgagaaaatctcacaaatgaattctcttttaactgttactaaaaaacaatgcggtatcgttaatctgatctaaagacagattcgtaggcttatgtgattgtttgttttctcacttgggaaccaataaatcgacagctaagtaatagcttcctacgatcacagtcgatgcaacagagcttcgagccatcctcatcccaatacctcggaacaagagatttctgtctgtaggatggattcctgtccatctctctaatctcttccctggtttattccattttagaaacttcctctcctttgctgtattctgtaagtaaaacaatagaaaccaaacagagaaaatgagtttcatatctctttgtaagataaagtggaaagccatgagtggagtttctttaaacctttggcaatattacacactgtgcacgtgttcttgctgtgtcaaagctatgtgatgctgcagctgcaacggcaccagatatcccagcagcaaggctactggctaccggagataaaggtccaacttcttcttcagaactgaattcatcaagtttccgcataatcattttaacaatcaacaatccaagttcaagtgaattgagaattcagtgtcaattgagagttttaagtacctgggcagaggattcatcccaacagctttccaaccgaccattgcctcgtgaagaaactgccatgttgaaaagaatactccaccgtcacatacaatctcttataagacctgaacgtagattcctccataaagctatatatccttcaagtgatgcaccatcgagcggtctcttaacatccatggctgg

SEQ ID NO: 62058 - DNA, 580 bp, Arabidopsis thaliana landsberg
tatgtatataccataatgttacaaaaattccgagcaaaaaaaataattattaaaatttaaagagacctggaaaggtgtggctgaagtgatcccaaatagttggcgattttccaccttcgcttgttgcaccttcgctctacataatggataaattactagctaaattaattcatagacaaattagagaatattttatatgcctacataaaaaaaggtggagaagcaaatcagctagagaacttaatatcacatcttagttaattttttttcaaattttgttctttctgttaattggaaatttcggattggagccaacctatgatcatatctaagcttatgaagctacatggtcgatccaaaattcaatctcgtttagagggacccactaaaagtccaaaacgccaccagtcctactagactcatttgttttttctttgaatattcagacatcgaaacggaactgataattatatacggctacaaagaatgtcgtattacatttcaacgtctcacaactattaactctataagaaagtgaaggatcaattgtatcagtctaggctgaacaaaacatcaaaac

SEQ ID NO: 62059 - DNA, 371 bp, Arabidopsis thaliana landsberg
  unsure (1)..(371): unsure at all n locations
aaaccccccacaaacaaaaagaaagagaaagagaaagatagagacagagaccggcggggcaacgggaagaagaagncgacgaagaggnggngaacagaagcaacgacgaacgnagggacagaacacaaacgggccgcacggagaagagcagcgagaccggncacgacaaccaaacacnncncgacacggacacanaaggcgaccccaccagcagaacacgaaaaagaccaccccncacgacgcgggcaaaacacgcacgccccagcacccaccaaccccccaaggaggaaaaaaccccaaagcccccaaaaaacacaccaaaacacgagacacgcccacccaaacaaaagcccaaaacccgaccaaagaaa

SEQ ID NO: 62060 - DNA, 601 bp, Arabidopsis thaliana landsberg
acggcaccggtgaagatcatcagacttctaaaagaaaagaagacaacagaccgaccaatcagctggtgggcggaacagcggaatggatagatcgaactttattgacttttggtcaaatttctctttgggggcaaatctccttctcggccgagtttaagagatagggtgaagccaatgtccaacatttggcatttaacatttgatcaagaccattaatcccttgatgcataggatgaagactagtctttattagagtactttaactaactttgtgaaatcgataacttttgttagagtagtttaattatcttttacgaacttgatgactataccacaattgaacttatagcagaatgattttgttttcagttgaagtataaataactaagatcatttttctttccgtactattttaacatcatttgacaatatatagtaacacttttgatggctccatatagattgtaaatgtgtatacctaatagcttgacaaaccccatatatgagatctggaaacaaagaaacagaaggttcatccaacactaaataaagaaacaactattcttcatctttcggtttaaatgcaacatatataatcttg

SEQ ID NO: 62061 - DNA, 971 bp, Arabidopsis thaliana landsberg
taaaaatttagtattaaataccaatcacaaatgttaccataatcttagtaaaattaaataaataaaagttgactatataattaaatgtaacatcctctcatgctgaagatcaaaacatttaatatggtttgttcctaagtatcactcgaaccatagaccctaagatattttaccaattgagctattaacgcttggttattacaatatttttgacgttatacaagtttttcatcatattttcatattaactttcaaaaatacaataacaataattgaaaaccaccatttttttgttgacaattttgaaacctttgaagtgtaacccgacttcaatccaaagtaccatgttggaatggctctctaatggcgggttgggttgggttggattttccgtgttaatacggaggtaacgactactattcctatccatgagatttgcggttcaataacacgcactcatgtagtcatgtcaacattgcactaaaagcaaaaacttagacaactatgggcgctctgtctcaagcgcattcttacggcatcaaggagatatgtgctcaccgactgtcaaattttagtcaacttgttgaactcttgggcactctacactcaacttgttgatcataattttatcaaagtttatgaaaattaagataaacatcagtgaagcatacgacagattttcatatataggcatgaaacttttataaaattatgagtcggcattaccgatttatgtcatctcttgcttttgaatacctaaaacaacattttacgtcataattaacgaagtcgatagcaaaatgatgttttttgttatttttcacattaaactatcaaagacaaagacaataacaataaatgaaaagtcaacgtattatattgcacttgcgtaacaaaacaaaatatgaattggaatctccgaccaaagtagcatttaattctgtactaccagagaggatccatagatatga

SEQ ID NO: 62062 - DNA, 754 bp, Arabidopsis thaliana landsberg
gtggcagaattgatatattgcttcattttttttttgtaataaatatatttcataattcctttactataaactatacactgttgcatgtaacaaaatatttatacattattcaattgtatgcgtatatttttgaaagaggtataatttaatagagaaacactaaacatatatagtcgtcaactttttggatgcatagttcgattcgtttatcagtgttgtgtgttgttacatatttattcgtttttggttctcctagacatagaatgacactgataagaagtcattaaaattatataatattaataactattcaaaggtattttgttgttgtcaaaaacaaaaaacatttgaaagatttcttaccaaaaaatatgttaattcttgaaagggtcaacattttgttttcctcactcctattaaatccaagttcaaaccaaattatatttaagtatttaactaatgtcgtaagattactatttgtttttttttaatgagtaattacggtaggccgccgcatatggaaattagaaaacaaacttggtgcagttcaattcaacaaatgattcatcatcaatggcgtcacgttacgtgtccactgtccaatgatttaatttccatgactaatttttaacacatataaccaaagcttgactatgaaaacgtatcaaattagtaaaccaatctccgactaattaactacctttatataattatagtttaacccccaaaactaatcagatattaagactaaccc

SEQ ID NO: 62063 - DNA, 500 bp, Arabidopsis thaliana landsberg
  unsure (1)..(500): unsure at all n locations
ctataatattatcacacttggagagaaaaaccccctttaacaatctgagaaacgagcacataccttgcgtcctgtagatctcgttgcttcatcaagagaagaccgtaagcaaagagaatactagcttcctctcgaacaccagatagtgaattcgtcattccattgagtggtccaattaaatcaagtgcctaaagacaaatcagaggattgaaagcaatcttcttaagctccggcaataaagtaaatcaagtataaacatccagttaactgcatgaaaatgtcaaaccttagatgatgattcagcatctccaatagtaaggtaagaaacagctgcaaaagcttgacacgaagcttgcattgaaatactctctgtcaactgaaataacatttcatatgagaaatcgccatgggcagcaaaaaggcatacatgttgaccaatattacataggcacataagacacctcattccanaacgaagcaactatctatcatacacatat

SEQ ID NO: 62064 - DNA, 1353 bp, Arabidopsis thaliana landsberg
aaatatcatgtagtggtcgagtattatgttatttattgtgtagctaccaatctttattctttaaatctgacataaaatgctacaaactttttacctcgtctatagccccaaaaaacctaaccacggttctaaaaccacacacagtgattttggttgacgacaatgcctctccttcctcaaaacgatttatttacattttttaaatcaaatgttacattttataccataattaagtctttttacagaatacttagatggaagagatgtataaaaaaggaggaaattgtaaaaaacatatttcgatcaattaaaccaggattcataaaaatataagtatatatataaatgatgtttcgtttagcgatgaacttcactcatatgataatacttaacaatataagtacataaaaaataaaataaaattaattgtttacgaaaagtctacaaatactgcatgtataattaatgttctctttatttatttatttataccttaccaagatatatctataaccgcatagaaatagaaggcgaagagataatttccaaaaacaagaaaaacctctaagctcaaaagatgttgttgagaacgatggcggcgacttccccgcggccaccaccgtcaacatccctaacatctcagcagccaccatcacccccctcacagcttcccctccgtacaatgccgggatcgtacggctggccgttggttggaccattatcggaccgtttagattacttctggttccaaggacccgataagtttttccggacaagagctgagaagtataagagcactgtgttccgtacaaatattcctccgacgtttcctttcttcggcaacgttaaccctaacatcgtcgccgttcttgacgtcaagtcttttagccatctttttgacatggatctagttgataaaagagatgttctcatcggagacttccggcctagccttgggttctacggcggcgttcgtgttggagtttatctcgacactactgagccaaagcacgccaaggttcgtacatacgttgctttgctactattacgtacgagtatataattaattaatacggtaacaacaaagtaaccaaatctttggtttgactggtatctagaataaattttaatcaaaggtccgacactttctagaccaaaaaaacaatacgtatatagattgtaccataaataattaaaccatagtaagagatgtactttaagagaatttttttgaagttttcaaaattaatcgaaccaaacctaactagttagttattatgagtgtggctttttagtgactggatttgatgtccagtgattttactataaattgatcttaaattggtttggaaa

SEQ ID NO: 62065 - DNA, 450 bp, Arabidopsis thaliana landsberg
  unsure (1)..(450): unsure at all n locations
agaagtagaaaagaaaaaatattctaaaatctaagtgtttttagaatatatatatatatatatatatatatatggtgtatcatcaatcattggcctaaaacgtgagaaaatagcaaaaagaaattggcctagctagacccaaaaaaaaacattcatagttactaaacgtcattggagggtgcagtatttcacaaaatagagtaaaaaatcagataagcattagtctatagtctataggctataagatataaataattggaatatagttatcaatatattgagaaaacagagtccaacagaagaaatatatacacccaatgacccaaaggtgtagggatagtagaaaaagacgagtagagattctagagactccagtgagtaatattggtggaagacattaatacgactttnnnnnnnnnnnnnnnnnnnnngctgttttccaaatgtgga

SEQ ID NO: 62066 - DNA, 1253 bp, Arabidopsis thaliana landsberg
tagtatttataaaagactaagatagtcacagaaaacagataaaatagtcatccaataaagccaaaaaattgagaaatactcataacatgtggatatataagggggtatatatctgcattaagatcccataatctttggtgagaacttaagagccaaactagctatgtaacaaaatatcaagtttgaaagtaataaactacttgaataagcttcaagttaactacatggtttagaaaggtttgaaatctattactttcaattacgcttgcattgtgtaccaatcaatcacacaaagtatgcaatcgtactaatcaatccaacaacgaatgcactcacaccggtaacatcacaaattcacaatttcatgttacaaaacaattcatgttgcagtgttctattgaaattttatatagcgaactagaatactatatatggagaatgatcaaatgttgcatatcttttcatatccacgaaaatgagtacacaacattcgatcatactccatgacagttttctagttcatacttgatactactcctcacgatttcatggtggtgacactacactaaaccctagattcccctaaagtttttgcgaacaaagcatatattcgattttagggttttacttctatcattgattaagaaacctatttttatactacttatcgttaacctaataattttaacctacgaaacctatctctatatgggcctgactttatataatgacccaatgggcctttcttctttaatgatgactttcttcgttcactctccttcttctagacttctactttcgatggtattaaatttgacggaaaaagtaaaacggtgtcgtctgggtgaaacgcagagctctttgcttctgaatattattattttcttaaattcttccgtttttttttaatccaaccacaaggaacaataacgaaatcatcagatcgccagaaaaaaaaaacaattgcgaaatggagaatctgagctgcgagagatctgcgtcaatctccatctagatgttgctacttcttcttctccacagaaccatattttcatcagatctcgcttgattaatcatccccatttggatctgattcaaaactcctagggaagaacatggcaggagcggcctcggctctgtttctgctcgatatcaagggtcgtgttctcgtctggcgtgattatcgtggcgatgtctccgctgctcaagccgagcgattcttcactaagctcatcgagaaagaggtttgttcg

SEQ ID NO: 62067 - DNA, 443 bp, Arabidopsis thaliana landsberg
  unsure (1)..(443): unsure at all n locations
ccacanaaggacatccccctccacaaagagaaattgtcgaacctatacaaggaacggctcacgccggtacatatgacacctaataacatgctatcaaaaannnnnnnnnnnnnnnnnnnnnnnnnnnnnnnnnnnnnnnnnnnnnnnnnnnnnnnnnnnnnnnnnnnnnnnnnnnnnnnnnnnnnnnnnnnnnnnnnnnnnnnnnnnnnnnnnnnnnnnnnnnnnnnnnnnnnnnnnnnnnnnnnnnnnnnnnnnnnnnnnnnnnnnnnnnnnnnnnnnnnnnnnnnnnnnnnnnnnnnnnnnnnnnnnnnnnnnnnnnnnnnnnnnnnnnnnnnnnnnnnnnnnnnnnnnnnnnnnnnnnnnnnnnnnnnnnnnnnnnnnnnnnnnnnnnnnnnnnnnnnnnnnnnnnnnnnnnnnnnnnnnnnnnnnnnnnnnnnnnnnnn

SEQ ID NO: 62068 - DNA, 144 bp, Arabidopsis thaliana landsberg
aaaaaccccaaccgggcgggggccacaccccaccagagacaccgcacacaaaagacccaccaacgaaagcgaaggggcaccaaaaacaacaaaacacacaagaacgcgaaagaggggccgcaaaaacaccaaacaccgaccaca

SEQ ID NO: 62069 - DNA, 1142 bp, Arabidopsis thaliana landsberg
acgcggtggcatagcttatgcccaaacttggaatggtgcccacccataatgtgaagaaatcaacaacatctacaaccgctgtgaagaatgctacatattttggtgttcaaaggagttttgccatcattgttaacaagtacaatcgcatctattggtattgacgtctatctattcaagttgatgcaatctcctactgtttgttagatcctggctgttctatctttttaaagtctttgtattatatttcaattatcaatcatcggcaacctaaatttaactttcatgtgggatgaaatgtggaaaaaaaacatgggctgtagtagaagacataggaataatacaggagtgtggagactaaaaaaacattcacaaactaataagcacataactcaaccttcttctgcaccgtggatcgcaatattaaaaaaaaaaaacggttatgagatagaccacaccgtatacggatataaaacaataaaataataaagagatataagatatttccgaatgaaagcaacagttatgaaataggccacaccgtgtactatacggatacaaaacattaaaataccagtgacacacaaaaatattagcgaatgaaagcaaaacacataactaatctacatcaacatttgcactattttaacaaaacatgtattctagatacaccacttgtgttactaccacataacatagagttgaaaaagttcatatattacaagagaaaagcctgacaagctagacgatgttgtagacagacttaaacatgcccatttgctagctcgtaagcagcaaccatgtatttctttgccgcgctgaacacatcaacaagcttcacaagtttgcaagccataataccaccattagcatgagattcaattaaatgggcagccatgactcctgaatgcctaacaaaacaagcttgcggtatctctttctccctatatatcccaaacggctgcaaactacctttctttttcccaccttgtttggaagcaattcaaaacaggtatggtaacatctctgcaaatggataaagtgttgtcttaagcttcgattcccgccataaacccacagtagcagtcgatcacactcatattgcaactattcgaccaaacccagaggccaacccgatgctgctt

SEQ ID NO: 62070 - DNA, 375 bp, Arabidopsis thaliana landsberg
aaaaaaaaaaaaaaaaacaaaaaaaaaaaaaaaaaaaaaaaaaaaaaaaaaaaaaaaaaaaaaaaaaaaaaaaaaaaacaaaaaaaaaaaaaaaaaaaaaaaacaaaaaaaaaaaaaaaaaaaaaaaaaaaaaaaaataaaaaaaaaaaaacaaaaaaaaaaaaaaaaaaaaaaaaaaaaaaaaaaaaaaaaaaaaaaaaaaaaaaaaaaataaaaaaaacaaaaaaaaaaacaaaaaaaaaaaaaaaaaaaaaaaaaaaaaaaaaaaaaaaaaaaaaaaaaaacaaaaaaaaaaaaaaaaaaaaaaaaaaaaaaacaaaaaaaaaaaaaaaaaaaaaaaaaaaaaaaaaaaaaaaaaaaaaaaaaaaaaaaaaa

SEQ ID NO: 62071 - DNA, 1417 bp, Arabidopsis thaliana landsberg
cacttggagtttctttcactgtttatgggttagtatatcttttaagtgttctctgctgaaaaaatatttgggtataaaacaatctgcgcaaattttgagaaatctactggcaacagcttttgctggctacagtatgtttccagcaagtgctaagtattgctgttaacataaagatatatcaattatcttccgcactccattttgcctaaaagtttagtacgatcggaaattatgcagttaatatttctccacctaaaacatttttccttcatactgactattattgtatgcttcatttcttctaggagtggtgtggatttcttaggccctcttcttcctgctgttgcagaaatatgttcagattttgatcctactatggatgtggaaccttcacttttgaagttgtttcgcaatctctggttttatatagccctctttggcttagcacctcctattgtgaaaactccgacaccaccactgaagtcaacctccaattcagtgaacagtgtgggaagtatgagtgcaactgctttgcaagctgtgggcggtccttacatgtgggacaatcagtgggctctagctgttcagcgaattgctcaaggcactcctccccttgtaagtcaatctggtcgtcttcagagtttaatttgtggttcaccgtattattagcctactaaaactgaatctcacatctcccaggagataattgttcggtagtttaattttatctaattgagcattgctctttgtaggtcgtcagttctgtaaaatggcttgaagacgaattttaactcaacgcacttcacaatcctggtagccgccgaggaaatggaaatgagaaagtagcttcaacccagagacttgctctttcaactgccttaggtggcagagttgacgttgcagcaatgaacactatctcaggttaacagatggggagttatttacaatatctgctagatggacttcgatgtgatattttagatacttaggaatcactttcttcaattcttttaggggtgaaggctacctatttgcttgctgtggcttttttggagatcatacgttttattagcaacgggggtatccttaatggtgaatcaagcgtttctgcctctagaagtgccttcagttgtgtgttcgaatatctgaaaactccaaatcttactcctgctgtttcccagtgtttgacggcaattgtgcatagagcctttgaaacagcagtctcatggctggtatggaattacctggtcatagtatctaaattgtttttgtcaaagaccttttagtggcaactctagcacaatcattctgtccctttgtatatgcaatttggtctttttttcctttttcctgcttcttcatttacacagtatatatatgttacagaaactttcttttggtttcaggaagatcggat

SEQ ID NO: 62072 - DNA, 502 bp, Arabidopsis thaliana landsberg
ccggtagctgattgaagaaaatcgaccgccgcattcttcgccacctgcccacatgggttcaagaggcactcgagcgtctcgaacacattcgtgcggcggtcgccagtctgggcgacgaaacggtcagcgaggccgtgcgggtcgttgtcgcgccagtcctggaggagatggtcagcaacctggcgtcactggaaaccaggatgatcagctggcggcaccgatgaccaccactgacccgcaagacgatgggtccccctcgacgcttcgagacgtggccgaggccgcgttccagcggcacgcacccacctctgggtaccaacttgccgagctcgctctcaaggccggctaccagctcaccttcaccacgatcaactcgatccgggctggcacctaccgcagtcgtccgaagcgggcgacgctcgccgagctgtcctacctgtccggtgtcccactgtcgcgggtgctggaggtggccggggtcgaggtcggtggccccgccgtt

SEQ ID NO: 62073 - DNA, 1688 bp, Arabidopsis thaliana landsberg
aacttgcaataatttagttctttatcttttaatgatttgttcaaatctatcttttgtggctcacaaaatcacaagtccaactcatagagttgactcatgacccttacctatctccaaattttaccccttcactactatccaaactcctaaaacgcaaaacgataaaagcatcaaatataaagtattgcttcaaaaacaaaacaaaatgctattaataaaagataggtttcacattaaagagatatataaaagtgtttacaaaatacttgaccatcttttgttatctagtatctttaacaatcatctactaaatagtttaccctccttttcctattactttgcctttaacatcatccttgtcttccttagccacgatagatctggctacagccggcgctgccatctccatctcggcagctaacgctttttctctaaactttttgtagatatcactcttgtaaaacttcttggtccggatcaccaaaactatcgagaccaatacaccgaacaaagttaccgcggtaattattataaaagacaacttaaaacaagacgtgcctatgcaattcaaatcttgcccttctactctcgttttccctaatgccttatattgcttacccgcctccacgtcgtacaaataccctgcgacccgaacgtttagcaagtaagacccgatcgggctcgcaactgacccgaagttatacaatgtcgagtagtacttaagcccgaaaatctcacatattatagcaaatagaagcggccattgcgcaccaaaacaaaaccctatgatgactgatgcaacatacagtccaccggggacattaaaggcgatgaggaggtgacccgcgcaagacaagaggaggaccattgtgagcattagaggtcttggaaatttgtatttgatcaagaagatcttagagaccacacctgaaaccacacgaccatagtaattccatatgcttacgagtgacacaaacgtgcttacgcttctctttgggtaacccaacgagtctccgatttgacccaaattgtctatcgccgtcaaagtccctcctacgccacatatcgttgctaagaacaaaatcaacatgtctacactaaacaacgcttgcaagattgtatagtcatctcctctctccggtggattaaacacagtcgtccaacacgacggtgttttcaccttctccactacctcctttgactcttcaccatcatcatctttgaactctgatgaatctaacttgggtttctcagttacgacattgatgggtgctggatcgtttaaggcgacttgtttctccttccaaagcttcttctcttccaagatgacgactataatgggcaaaagaagcaagacgatcactaccgcggcgctacctccaaactcgctttgtgtaaagcccgagagtttgttgatgatgatgaccaccatgagaaacgtcgcaagcccgagcgatatgtagaggaagttatagaacacctttagttcgtttgtctgtctcttcactttcattattcttatcgttctcaaaaacgcaaacgagactattgcgggcaaccaacctacaaatacaatcactcatacaattagtatgtgtttcgatccacgatttactctgttttgctctgttttagaactgtataactctgttttttgtcattaaccatatagtctcatgaatagtttt

SEQ ID NO: 62074 - DNA, 495 bp, Arabidopsis thaliana landsberg
aattgagtatttataattactttattttggactaaaacgttttactagatttgaggggagagaggttctttgctgactaaacacattaaagcagtacttttcagttgcaaggaagcctactcattagtccctctcatcgggactttctcaaagatggcaatatcttgtcgagaaattaaactttatataataagattaatggaaaaataagaaaataaataaggtataccatatcataaagataaaaacactttcatataatatttgggttttcgtttgtataacaatggctttaaaaggaaaaaaaaatcatggacacaaaatagggaacaattaagtatagcccgtgttaaaaaaaccgcggaatctatataatattgcttttaaaattgcattaaacaagattttatacaaattacgaataaaaattggacgctttgaattttagatccaaaaaaaaaataaaatggggtaggtgccgtctagacggctata

SEQ ID NO: 62075 - DNA, 357 bp, Arabidopsis thaliana landsberg
aaaataaaaaaaaacataaaaaaaaataaaaaaaaaaaataatcacacaaaaaaaaaacaaacaaaaataattataaaaaaaaaaaatcaaaaaaaaaaaaataaaaataaaaaataaaaacaaaaaaaaaaaaaacaaataaaacaaaaaactaaaaaaaaaaacatataataaaaaaaacaaaaaataaaaaaaacaaaaacaataaaaaaaaaaaaaaaaaaaaaaaaaaacaaacaaaaaataataaaaaataaaaaataaaatgtaaaaaccaatacaaaaaaaaatactaaaaaaaaaaaaataacatacaataattataacaaaaaaaaaaaataacaaaaaaaaaatat

SEQ ID NO: 62076 - DNA, 578 bp, Arabidopsis thaliana landsberg
  unsure (1)..(578): unsure at all n locations
tataacttatatctatgggaaaaagttaaaaatgtttaatatcgttataacgtgttttatcgtcttataaatgctttatcttagacgtatcgcgtttgacgttttataaaagattaaattagtgaacataatatttgtatagtttaattaagacattttaagctcatgtcttgttttataaagtatagatcacacattttcttaagaataccctcttattataaccatgacttgcgacgtatttgaaaagcgaacactcttttcgttaggctctcttttagctttacgtatgatgaatgtgatatgttattgagtggcgtttgttcttcttgtttgtttgtgtgatattcagtggttgatctagtagttaagaatcaagatctattcctatccgtggaagaacctcaagttttcaataagcaaggcaagtggacttctccctctgcatactctatttgatcccaaacatacatntaataaagtttattcttttggatatatatgcataatttgacgggttacctatttagataaccttgtcaccttattccttgatcaaaccctgggattatacttta

SEQ ID NO: 62077 - DNA, 325 bp, Arabidopsis thaliana landsberg
gcagaatctgattggatgcaagtggatttttaaattaaagccaggcataccaggagttgagaaatagattttcaaggctagacttgttgctaaaggtttctcgcagcaagaaggtattgattataatgaagtgttttctccagtggtgaagcatgtctccatcacgttaatgttgtcacttgtggttaacatggattatgagctggagcaaatggactttaaaacagcctttctgcatggtaatctagaggaaaggatcctaatgagtcagtctgaaggattcatacaagacggaaacgaagataatgattgaatgttgaggaaa

SEQ ID NO: 62078 - DNA, 1822 bp, Arabidopsis thaliana landsberg
cccactcaaaaatatatatacctttttttaaagacggatactaaatggataacggatcaaatacttgtaactggtatatcagtgcccagcagtctagcactagtttagttgtagccatatatttgacagctgaataggttgggtcaaattgtgaccacggcattccgtaaagggaggcataaacagggtggagtttctgatacagaaaacgtcttgattctttattctcagtacaaaacaacacgcagttactattcctatcagattattgttttcttcttcatcaacactcgctctgcgctgcgttcgaatccagaactctctgaccatcccaaagcaaaagcttcaccgatcttcctcgtttggtctcgaatattaaggtaagttccattttattgtatggatcctagaaacttaacctagatctagattaagaacccaatttgtggaaatcaatgcgtcgatttgatagaaaccctaatttctgggtgatttccatggttaagcttttggcttgcattaagtaaataacgagatggttttagaaatttaggtcacagagtccaatttatggattcaatgcttcgatttgattttaaaaaaccaatcttcgggttaaattgaatgtgagaagtgtgtgtttttgagtttgcagtgaaatatgggtttcataatggaattcgcggagaatttggtgttaaggttaatggagaatccagaggaacgagacaggaaagcgagggaacacatatatgagatgcatgagaggtgcaagaagattaaggagatgtgggcattgcctattcgtccttatggattctggacatttgagcgtcacaatgctcagcttcgttgggatcctcagatcagtcaggttgctggtcgaagggatccttatgatgatcttctcgaggacaactacactcctccttcttcctcttcctcatcttcagactaatcaaacaatggtgagtttttaattgtatggaaccattttgattcagcatttgaatatggcttttctatactagattactctatagctgtttttgtctctgtcattagagaatttgcgttggtctagatagtcagtagaggaacttgctttggtcgatatgtgatgattttgtctctgtcagtagaggaatttgggttggtcgatatatgatttaacctttttgggtcggacggaatgttctgaacattagtgtttgcgcttgcgtctaagctacatattgatatgtgatcagtagtgaatactttgttcgttacccgcattgtggcttggagctgacgagtttgtacatctcttttccttaacatatgtgcttggaatctacagtctttcttcctagttttctacagtttcagcttcatttaagcataactatcgtagcttcctataggaaatgagacttgtatgtttttgtttgttgcagaaagaagatgtgttatgctgtctggatggatgcatgtttgttttcaagctatttttctcggagtttgtcctcttctgtttctatttgttcttaaggtgtctgggagcttggtacaaaactcaaataataacttcaaacttgtttacgaacgagaaagaaataatgctcattggttcttagtaaagttgttttgattctccatctcctccatttttgatactgatacaatttctcaaaatgtgataattttttcatgttcttcgaagttatgtagctaacactacccatccttgtttaaaaagatcgaaacacacgtagtacatttgcacagcaccaagagataaacactagttcaaagttctgtgatagaagaaaaaaggaga

SEQ ID NO: 62079 - DNA, 1214 bp, Arabidopsis thaliana landsberg
cctagtcttacgtccctattggattaaactaaaaaataaaaaaataatttatttcgtaaacgaatttttttttaaaacaaataacaaaagataaaaagaaaacatgatggtatactagtttggtggggctaaggacacgttcctttgatcaaataactaataagtacaacttacaataatggaagctcatgttataatcaacttactcgagattgaacaactctctcttatatgtttgcactctaccgttgtattgtaacatgaccttcaataaattagtcaaggtttcaaatccaacaaacatgtagaacatgacattttattgtgaaaccgaacccaacttttttttttcacttaccctagttcgtcaaaatttattatattttggaattaaattaaaattaattctttgtacatacataaccatacattagttattttgtttggaataaataactacgaaaaaatgtttttgacaacaagtattatttacttttcactgtcttcactcttctcttctgtagtattagtattatggattggattaaataccaaatgagaaatttaagtcccttgtgtggcagatctggtgggttaatgataccaacgttctaccgtaaaagcccatccgaaattaacgcatacttaaccacaacacaacacacacacacatcaaagtgcgtgtatcctgattcttacttgctacctttcttcttccttcttcatcattcatcattcatcattcatcattcatcattctcatatctctcttcttttactggggatcacaatatctatctagttgtaaattgtgaatgatagatcctgagccttcttgccgccacctcttgaacttaatgtacttgaaaccagtctccacatagcgatagagagagagatctgttatgtgtgtattcatcaagttctctttttttgggctcaaagtgtaaaaggagacattttcaattctgagttcttttgttttcttataataaaatctgggttttctgagattttcttcacatcgtccgaaacgtggacacattttgatcttttgggtgtcactgtgtcaataaaggttgaaactttgattacatttctctcaaaaagataatttttatttctctatctgggtgagatttggattaattggtgaggaatcggaagaaactggcgagattacaagcgattgtgaaatatcagaatctaataag

SEQ ID NO: 62080 - DNA, 493 bp, Arabidopsis thaliana landsberg
tttggtggagattgaagggttaatggggtcctgttatgggtctgttctgtctactacctggacgagaataatttctccgggaggattctgactgagtaaaattaggagcacacagtccaaggactggcaggttgtttgggggtaaagatggcagacattctgcgccatgatgatgttggcttagaagatctggtttaggatctgaagaactggcttttcttttctgtgcatcacattgctggctagctttgctatcgtccaagtccattgatgtagggctttcttcgtcctgattagctacttcagttacctgatccacattgccgctaggaagagactcttcaacagaattccttctcgcaatcaggtatctttgcctctcttgcagtttggtactgttttgcagaacataaagatacagttattcaaattcttaatcaaaaatgatgaggagctaaaggttttaattcaccaaccaaattatatgacaaaa

SEQ ID NO: 62081 - DNA, 324 bp, Arabidopsis thaliana landsberg
  unsure (1)..(324): unsure at all n locations
atttccatcagcgctctatccatagtcgacgacatcactngtactgaagggaactgagaacaacttctttttcgagactctatagcaactagaaccggcgaaaaatatagcacaaacttgactgagaaatcgaaaactagggagggcagcagagaaaagctgctgatggaaagagggaaatccggctctaaggggaactctagcctgctgaaggacacctaaggagaaagagggatctaagcccaccttcagaagaaaggaggggacacgtttccaccgttgaagtggaccggacgtattactatttagaggatgatcaatggg

SEQ ID NO: 62082 - DNA, 553 bp, Arabidopsis thaliana landsberg
tcactttcagctggtctaccgtctggctgctgatgatcgctcctttgtcttaaaactgttctgcgccagcaggaaggaattctgtgtgcggttgttgaaattgatatcgctgttgagcgagatcgtacgtcccgctttcttgaacttcttgcgccagaatatattgttgttcatggtggtgttatcatcatcaccattggtggtcctgttgctttcgttcacaatattcccgtcctggtccagcgactggccaaggtatttgctcacggaattgccttttacattcgatgcgcgcacagtcagcttcaatgagctggaagaatctatctgccactcatagatgctggtgagtttatgtcttgttttatcactcacctggtcctgcgtggtcttgctgttaaagctgttgctgcccggcagcaggttgcgcatatcggtgacggtggtgctctttacattcagcttgttgaactggtaggtgttgttgcttgtgtgcttatcctggttccatttattactgaaatgcaagccgctgtataagagtggataaccg

SEQ ID NO: 62083 - DNA, 557 bp, Arabidopsis thaliana landsberg
ctctttttgatatgttgagtctccgtttctcttaacttgtgatctgagactgtccgttttgatcctgcatgggctctacacgaatcagcgtctctccttttttggtctacgcgagagatataccacgcgtcacagataaattttcatattcttgtaagctattgcttttggacaccttgatatatctcctccaaatattacagagcctgatggatcgagcattctcttgctttctaaacttgcgagattgagaagttgtacctacgcgtctcctatgtatgtcaacgtaaccatacagaaagttggcgaagaagcagaaacacatctcgcagtttacattgggaaggtacatagaaactcttatatataatacaacataaaaatatcagcccattaggtaattaagtgcaactcaaaataactcaatattaagtcattatcacatggacatcgaagctttcataatattaacaatctcctttcatatccatataaaatcccatatcatacgccaattcaacctctagagcaatcgtgaagatgaaatttttcttact

SEQ ID NO: 62084 - DNA, 769 bp, Arabidopsis thaliana landsberg
atatctaaatataggggttttaccatggcgacctgtcaaattgtgaacagttttatgacaaacttggacgtacagcacagggtagatatcatctacacaagagtttttactttttgagcttttttgtggttcttgtcttttgagtatggtttctatgttttttcaggttaatattatttgtgggaactgtagtgatggacggtgtaaaggtgtgtttgcttctggttcttttttgtttgttttgcttcatcaacatccaaaatgcttccaattcttggaaagctattcatttttattctttcttttcctatatcaggtggacttggatgcatatgtagtgtcacccaagattcaacttgtaggtctgtctgctactattgtctattgtctcttggtatagtcgattgttcttacaacgaattcctgctctttcccactggtccagagttactgtcgacttggctattccatgtgagaaacctggtccgcgggtgtttaagggatttacagtcggtttgcatcctcgctcatgggaaattgtaagaaacgaacaatcccaattttctggttacagctttttcttcaaactgaacataaacttaaaattggatttttcacctgcagatctataatgggatgacacagtttggatttgataagccccgtcgtgagtttaggtatgaaatcaagaactttgtttgttcatgtttgagttgctgtgtatttacatcctgaagtgtttctgatttgtagcttcaagaccgagccg

SEQ ID NO: 62085 - DNA, 464 bp, Arabidopsis thaliana landsberg
  unsure (1)..(464): unsure at all n locations
atgcagtgtgggcacaatgtgagccattcttgggtaaactgaggcagggaccgctggcagcagccacatgcacttgatgcacccatctacaactgcaagagacagtcccacagcgtctgctttgacaaaccgtgctaaacgtccatcagataaaaccgaccattttcaggtcaacaatttcaagcccttgtgatactcatgagattgtgtgtcctatctgctggttctgaaatgtttttaatctctccagctgtaaaccctgtctcatgagcaatcactcgctagccggctgcaacccactccagcccctgagactgcttcccatcttgtagggcttcctgcggttcctgtctttgcctgtggtgagtcttcagtccggcgcctcacacacacgctccacctntgagttacatccctagccctctctttcctttcttaaacttttaagagagaccattactacc

SEQ ID NO: 62086 - DNA, 516 bp, Arabidopsis thaliana landsberg
ttcacatattaaatacgatcccatattgcgctcaagaacttgctccttcaacgagctccgtctcgattaaaggtgtatcggttcagaaaaaatagcattgagtagaaaagcaagaaataagcatacctttacgaaagatgacaaattatataaacatcatcgtaaaaatcaagatatatcacctataaatgtttttaaactacatgcagtactcgctcttcggttcgattctgacaattggagcaatgatcggcgcagctatgagtggacgaatcgccgatatgataggcagacgagctgtaaaatttgttcttctttctttccatgacaagcgaatatttacatttttgcgtcaaactggtaaataaatcatttatttgtgtgtgtgtgggtgaatagactatgggcttctcggagatgttttgcattctcggctggttagcaatctacccttctaaggttagcctaagattctcccatataaccctctggattcctcataactatatttcttca

SEQ ID NO: 62087 - DNA, 549 bp, Arabidopsis thaliana landsberg
  unsure (1)..(549): unsure at all n locations
gcggaatatcgtggtccaggccgtctaaaatcgtgcgcgcgtttaattgcgtggtcaggccacgcgcgctcaccatgggcgttgcttgcgattgcatcgttggagtggtcatgcgccgcacacaataactaaacccgcaagtttaaggaaccggcaaacgtcacatcatccgcaaatgccgtcaggcatccggannnnnnnnnnnnnnnnnnnnnnnnnnnnnnnnnnnnnnnnnnnnnnnnnnnnnnnnnnnnnnnnnnnnnnnnnnnnnnnnnnnnnnnnnnnnnnnnnnnnnnnnnnnnnnnnnnnnnnnnnnnnnnnnnnnnnnnnnnnnnnnnnnnnnnnnnnnnnnnnnnnnnnnnnnnnnnnnnnnnnnnnnnnnnnnnnnnnnnnnnnnnnnnnnnnnnnnnnnnnnnnnnnnnnnnnnnnnnnnnnnnnnnnnnnnnnnnnnnnnnnnnnnnnnnnnnnnnnnnnnnnnnnnnnnnnnnnnnnnnnnnnnnnnnnnnnnnnnnnnnnnnnnncggcctttcttgagcagcggcgccaccg

SEQ ID NO: 62088 - DNA, 1065 bp, Arabidopsis thaliana landsberg
caaagtatcatcatcaattacacaacataggaagaagtaatgctgtaataaaattgtacatttaagtgtctgcgtcgctatttatttatgtaattaatattacaccctctttctaataattacgagtatcaaatcccgatgctccctcatgtcttttaccgcccaaatccacaggttcgctacttttctatgactgttgtatattcattatgggtagtaaagaatcattgtggggaaaaaaatattactagttcaagtagtgtatttttttgtcgcactataattgtagtcctttgtttgaattagtttgtctcactgaattagttttgtcacttacaactagcatgtataatgattgatttgaagatggattgtgatattaatataaataacaaactaataaaacgccataataataaactatttaccattaaaaaacacacatgtctaagtggctcgcagatttggagataatacatgaaatggttgccatatctatcaacatgcttttaggtgactaaacacttgcaatcaaaatagtactgtggtatacacatgatccacacatccataagacatccatttttcatttgatatctgacatagtgacatgtgcgaatcaagtcttgtcttatctggcgtctttccacaatcataactaatgattaacacttgccgtactgaatcatctttacacacgatgatccattcttccataacacgatcatgatcataccgtaccattgatcatatatatttcctaatctgaccgtgcataattattgattaattacacatattaaccacgaattaattacacatattattatgaattcgaataataaatcttgtggcatattgctagagtttctctttatgtggttataattctcaatgaatgaatgtaatattctattggtatgccccatggtagattgctattttggaatttgccacactaaacacaccggcatacttaatgttccttactaatatactagcacactttcaagtatacagcattcagtccgacattggcaattaaggattatattaccagacttg

SEQ ID NO: 62089 - DNA, 1848 bp, Arabidopsis thaliana landsberg
tttttgggcagtttgcccctgttaacttgttcaataattccttttctaccgagcaagttcaggccttttattcgctaggcccaagctgtatgtatgcattcttgaagaatgagatacagggtcccttttctgataccccattgcctagtggcattctttatgaaaacatgggcttccttctaaggtttcctttggcctgaatgcacaggtcatccaccctttttgccacttctttgctatcatttgatgccgtctttactcaaacattctttttccaattaaccaaaatatattttcctccttataggcgagcgatggtaggagattgtttaatgtgtctcgggtgtcagatcatctacaagaaaggctcgcatttgaggccgatattatggttggtactcagctatgctcgcggcgcttgcttcagcagataatttactgtgtcggagggatatctgttttctttcctttgataacacaatctgatagatgtgaaagtgaaacactgaacgaggaaacttcagctatgcctacaaaagagcgtatgacagcagaagttattgaactgattgcttctgtcttggatgaaaatccagcaaatcagcaacagatgcatcttctcgctggattccccatactaggatttttattacagtctattcaaccgaagcaactcaatctagagacactttcgtctttgaaacacctcttcaacgttatttcaagctctggtacgtgttgtgagtgcctcatactaatacttcatttctggtaccatatattgcggttgtggtttgtggtctggtacatgaagaagaacgtttttctgattgtggtgtgtgttggaatatttttatttgtttcatatggttggatcgtaaactattttctgtagctagtacattcagtcagatttcttgcctttaaacgtttgtctgattgtgctatgtgttggaatattaaagttgtttgtagatcacgagctgcattatgttaacttctgtaagtgtatattctattacgctttacactatccagcgtttgctgagcagcttgtggaggatgctatatctagcattttccttaatcctcacatttggctccatgcggcctataatgtacagcgtgaactttacatgtttctcatccaacagctagataatgatccacgacttctcggaagcctttgtcgactccccagagttattgacattgtatggaacttttattgggaatctgaaagatactgtaaaggaagcaagcctcttatgcatccaacaaggactattgcagaaagaccaagtagagatgaaattcacaaaattcgtctccttttgctgagcctaggtgaaatgagtctgaggcatgtcatccactgtaaaaatacagcttttctggcttctatattttatgatgtaatatttttggaaacttgaactcaagtccttgtattcagttttattcaaaaaattgttccgtttttcaggcagaatatctcatcaggggacgtaaaagctttgacagcattttttgagacatgccaggatgtagcatgtatcgaagatgttctgcatatggttatccgtgccatttctcaaacatcggtccttgtttcgtttcttgaacaagtcaatcttatcggtggatgtcacattttcgtcgatcttctccagaggtaaatttttgttatgataccatctttttcctgtacattatgagtcaaaacacaatctcactcacatatcttcacaatttcacgtttggcagggattacgagcctataaggttactcagcttgcagttccttggaaggcttctttatgatgtaccttctgagagaaaagaacc

SEQ ID NO: 62090 - DNA, 319 bp, Arabidopsis thaliana landsberg
  unsure (1)..(319): unsure at all n locations
acgcaacggcaggagggacaggaagggaaaaaaaacgaaaagaaaaggggggacacgaaanaaccanaggggacgcaacgaaaggacgcgaagaaaaaggaaaaaacacccagaggccaaaaacaacaggaaacagagggcgaaaccaanaaacacgagcaaccaaaaacgagcaaaacaaaagggggaggaaaaggacagggggaagcggaaacagaacaccaagaaccagaacggggccaaggaacacacggaacaagaaggaccggaaggaaaggcacaaaaacacacgggccaaaaaaagaaaaagcgcgagaag

SEQ ID NO: 62091 - DNA, 251 bp, Arabidopsis thaliana landsberg
acaacagggacagaacccacgcagggccaaacgacaaggggagagcggccgaaaacacagagaaacaaaccaggaaaaacccgcggagcacaccaaaaccacaacaacacaacggacacccaaaaaaaggacgcgaacaaccaacccgggccagaaaccacccgggccacgaccacccaaacggcaaacaaacaaggacccagaaagaacaagaacaaaaaaaaaagaagccgggaaccaaaaaaaaaaaa

SEQ ID NO: 62092 - DNA, 377 bp, Arabidopsis thaliana landsberg
  unsure (1)..(377): unsure at all n locations
acaaaaaaanacaaggangacaacaacaaacaaagaagtttagataaacaaaaccgacaacagaagaacggaacgggacaaagagaaangcacagccaaaccaacacccangcagaaccaaccaccggaaacacacaccacccggcgacccacccaaccaccccgccaaccgcaaacacaccaacccacaacacgcagacagacaaaaaccaccgcaaaagacacagcacaaacacaacgggnaggaacccacgaaaaaagaaaagaaaacccangccaaaagaaaagaaaaaaaaccanacacccccggcgcaaccgcacaccgaaaaaagacaaaaaaaaaacaaaaaaaacgacacgcgcacaaagaaacagac

SEQ ID NO: 62093 - DNA, 482 bp, Arabidopsis thaliana landsberg
gcttgaatatacatatcgagctaagaggctttcagttctgtctttctaactccttgatatagtgtttttaggaccatgtcaatttgaaagatactgtgtaccgtagagatgctttgctaaatcatactgaagcgaaatcataagagaaaaaacaagtggtctccgagtttctaacgcattgttgtaaagaacacaaacaatagtaattattttttctaaaaccaaaaaaaaaaaaaatagtaattattttttcttttttgattatatgaacattgttacataggatatattaaaattcgacgtcatgtccatagctatctatctttttttctaaacaaaaatcagtgatgaattttaaatgatatacgaaattttgatataattaattgaagtcatgaaaatattatacaaatttatattctttcatatatgagtttaatattgatgaaaattacatatataaatatatatatatatatata

SEQ ID NO: 62094 - DNA, 1007 bp, Arabidopsis thaliana landsberg
ttcatgaactgctcatgaaccttcttggtcttctcctttaggtacatctcaagactcatctgtttcttcttcttcttgatatccggtaaggcaaagaaaccgtctaggaggtcacgagccttctcaaaagatggccacaccattggctcaacctcatgagggctgaacataatgatacaagccttaacagcacacaatataatatagttagttcttctacctttttcattaaccatacccttattttcttcaatttttttgctcttgacttgttgttctctacccatgcaagtcttagtttgtttatcgccatgctcactctttgatttgatctctcgtttttgagttttagttttttgttggatatctgaataaagattaacgtaagaatttatataaatagagtttaacactggtgccagtcaaaagaaatagataaggtagatgattgattaagatgtaagattaattactatttgtttaatattgttgaaaggttattgtggcgattaagataaaccaaacttttcaatctaaactaagtcaaacatatcaatccaacaattaaaaaatttcctttattgttggttaaaatagttatttttcaaatatcagcaaacatccttatgcgattttgaaccaaaatgaaatatagaaataaaaataaaacatttttctaaaaagagttaatatcattttcttaagaattcgatataaacaaacaaaaaaaagctaccaaactaatatattagatttggtttatatttatattatatttcaaaattaaaccaatagaccaaaatttaaacccaaattaaaccgaaatgttataatctttttgtggtcatcttgttccatggaattgaactctttgcatatcaaaattgaatttacttccaaacataattctatcattagttaatggtaataattatattgacccacaaaattttccattattgtgcaatatattaattggtattgtttacaaatgttttggaaaaagt

SEQ ID NO: 62095 - DNA, 513 bp, Arabidopsis thaliana landsberg
cgcaagcccagcagcaggctgctgtacaggccgctgccaacgcgcccgcggcagtcagccagaacatcaccgccgcaccggcgtcggccgtgcaggcacctgccggcaacggctacctgctgcaagtgggcgcattcccggccgccgccgacgcggaaacgctgaaagccaagctcgccctgcagggcttcgtcgccaacgtgcagtccgtcaacgtgggcggccagacctaccatcgcgtgcgcctcggcccctatcactccgccaccgctctggaagcggtgaagcagcggttgaccgccgccggcatcaaggccatcgcgctgaaagaaggcaaataaccggacgcatgtcgttcgcgtgcaaggggccgcaaatgcggcccctttgttgtccgccttacgcattaccccgcttccgcgcgcgtgtcgacgtcgcggctgcaacctcaccgacgccagcgctacacttttacgcatgacaaccaagacaagatggattaccggtgccacc

SEQ ID NO: 62096 - DNA, 660 bp, Arabidopsis thaliana landsberg
caccgtcggtgtcctggaaactgcgcggatagatctggtagatgacggctccgcgccaccacgatgtttcagtcattgaacgtgtccccacgagcacactcgggtacccgtcgttgaatgtcggtcagcttagccgcagccccatgacgaccagcacggatgtgcatacgtattcattcgtgctgcgggtgcgtcatgcgcgcgcaactcgcgatcgaatgcgacctgcgcgccatgcatcgatccctagccacagcacgatccgcgccaccagaaagcgtttcgcaaacacgcaatgttgcattgcgatgaatgcgatatggcgcctgtcatgaatacgtatgcaggaaatgcttcgctgcggaaagcccggcctaccatgcgatcacgcggccgaaaacgatttggcagcgcacctgccgacggtcgtcgccgacggaagcgcgggggaatccagccaacaagatcgacggcgacacactttttgcgggaggggaacacatggttctgaaacataaggtgctggcactggctgtcgcttcggtctgcctcggcatgtgcgccgtggccaatgccggaaccgcgccactggccggccaacagcaggacacgcaggcgcagccttcagtcgtcgaacaccaagacccgttaaaacggcaa

SEQ ID NO: 62097 - DNA, 882 bp, Arabidopsis thaliana landsberg
cagatcgaaggatctaaacattgagatttgtgcttatcaaattttactagagactaaaacttgatgagggagcggggcagagcaatctcacaaagcaactgaaattcactaatgcatcaagaacttgttgcaaaggacctgactttacacacagatcctaacgaatcactgagaaatctataaaagacatcatcttgaccacattcccacaacttaacggagaaaaattcatagcttcctcatcaaagcattcatatttctgaaacaacttacaggccaagccgagttctgctgagcattcatatctaaagtataatacggcgtcgtatccacagtcacatatgatgtcgtcgcaatcacagccgccgtagaatcaacaactccaggcggtggtggaattgcaatagctgaggattcataagtttggagatcggagatggaactagggtttggatttgcgtagtaaccataataggaagcgtaatacgcatcaaccgccgtcgactgattcatttccggtggctgtatcgccggtgccggcggttgttgccactgactgttgtaatccatggaaaacaaaatcaaagttttgatcttttcttagttcttgcagttctattgaaaaccggacaaaagaccagaccggtcggaccggtttgatcgaaaaaatctgtccttttggattaagtggaccaataaataatcaatttcactttggattggacaaaataccagaccggtcggaccggtttaatcgaaaaaattgtccttttggattaagtggacccataaacaatcaatttcactttggattggttatgtatctcagacctgaaggtggaattgagactgagctcaatgatagtttcagactaataacaa

SEQ ID NO: 62098 - DNA, 504 bp, Arabidopsis thaliana landsberg
  unsure (1)..(504): unsure at all n locations
aaacaaaccagccacaaacgaacgcgggacgcggttgttttaagaccaccccccaaaaactgaacgcgaccgcgaaaacggcgagcgcaagaccaaggacacaccctaacacgggacacgggcgannnnnnnnnnnnnnnnnnnnnnnnnnnnnnnnnnnnnnnnnnnnnnnnnnnnnnnnnnnnnnnnnnnnnnnnnnnnnnnnnnnnnnnnnnnnnnnnnnnnnnnnnnnnnnnnnnnnnnnnnnnnnnnnnnnnnnnnnnnnnnnnnnnnnnnnnnnnnnnnnnnnnnnnnnnnnnnnnnnnnnnnnnnnnnnnnnnnnnnnnnnnnnnnnnnnnnnnnnnnnnnnnnnnnnnnnnnnnnnnnnnnnnnnnnnnnnnnnnnnnnnnnnnnnnnnnnnnnnnnnnnnnnnnnnnnnnnnnnnnnnnnnnnnnnnnnnnnnnnnnnnnnnnnnnnnnnnnnnnnnnnnnnnnnnnnnnnnnnnnnnnnnnnnnnnnnnnnnnc

SEQ ID NO: 62099 - DNA, 99 bp, Arabidopsis thaliana landsberg
ggagaagaagaaagagagggggacaagaaaagaccagaggggacaaagaaaccaacaacacgaagagggaaaagaacaaaacgacaacgggggcagaga

SEQ ID NO: 62100 - DNA, 508 bp, Arabidopsis thaliana landsberg
  unsure (1)..(508): unsure at all n locations
gacagatttctttcaatctagtgtaaggaagtatataggcttcatgattatttacgaagacaatctactgaaaaggctagtgtgtggggattttcagatattaagctactaactgttgttggcaggcacacgaggaatatatacgttaatctttnnnnnnnnnnnnnnnnnnnnnnnnnnnnnnnnnnnnnnnnnnnnnnnnnnnnnnnnnnnnnnnnnnnnnnnnnnnnnnnnnnnnnnnnnnnnnnnnnnnnnnnnnnnnnnnnnnnnnnnnnnnnnnnnnnnnnnnnnnnnnnnnnnnnnnnnnnnnnnnnnnnnnnnnnnnnnnnnnnnnnnnnnnnnnnnnnnnnnnnnnnnnnnnnnnnnnnnnnnnnnnnnnnnnnnnnnnnnnnnnnnnnnnnnnnnnnnnnnnnnnnnnnnnnnnnnnnnnnnnnnnnnnnnnnnnnnnnnnnnnnnnnnnnnnnnnnnnnnnnnnnnnnnnnnnnnnnnnnnnnnnnnnnnnnnnnnn

SEQ ID NO: 62101 - DNA, 596 bp, Arabidopsis thaliana landsberg
acaccggcaatgagatgtggtgcgaatggtatagggtccattgtgacttccaagctggccaattaccctctgtcctcaagctgctgaaattgatcgacgaattgccgcgggtacatagcagctatcatccgctatcatcatacaatgcaaatatgcatcccatgataggtgaagaagtgagcgtggttgaaaagaaagaagaatcaacgtcaacagcctcttcatcttcctcatcctctttaagtactcctgcagtggttgcagccccagttaatgccaagaaggataatagggccgccaaatataaccaacagggccaccgaggaaagagggtttccccaaaagagaaaaccccccttcccccccccgaggagggaatccccgggaggggcttttttgggaaaaaaaaaacccccccccccccccaaaaaaaaaccccccggggggaggggcgcccccccccccaaatggggaacaaaaatttttttttataaaaaaaaaggggcctttttttttgcccccctttttttttttttaaaaacccccacaaaaaaaaaatttttttttttttttctcacaaaaaaaaaaaaaaaagg

SEQ ID NO: 62102 - DNA, 246 bp, Arabidopsis thaliana landsberg
aaaaaaaaaaaaaaaagaacacacccaaaaaaaagaaaaaaaaaaaaaagaagaaaaaaaaaaaaaaaaaagaaaaaaaaaaaaaaaagaaaaaaaaataaaacaaaaagaaaaaaagaatagaaaaaaaaaaaaaaaaaaaaaaaaaaaaaaaaaaagaataaaaacaaaaaaaaaaaactaaaaaaaaaagaaataaaaataaaaaaaattaaaataaaaataaaaaataaaaacacaaataac

SEQ ID NO: 62103 - DNA, 740 bp, Arabidopsis thaliana landsberg
cattcaacattttatatttcacaaaaaaaaaagaagtttttatttttgatcagtgttcaacttatctagtaacactagtatatgtaaagtgagatcaatgtccaaattttcatttattaagaaatttcatggatgttaaatcatggatgttatataacatcgatcgatcaatgtctcacctaatttcaaaggttttctggagtctatgtggagagacgtggacatgaacaggcatcaagtggatccatcaagtgaactaaacctagtgattgtgtcccacggactgacatctcgagtgtttctaacaaaatggttcaagtggacggtggcagagttcgagcggttgaataactttgggaactgcgagttcagagtgatggagttgggtgcgagcggagagtacactttcgcgatacaccacagtgaagaagagatgttagattggggcatgtctaaagatatgattgatgatcaaaaggatcgtgttgatgggtgtcgtgtaacaacatcaaacgattcttgttcattgcatctcaatgagtattttgatttgttagatgtcactgatgatgaagaatgaccactaaatttatatcgctatactttgttttgcgtattgaaagtttataatatttatttcatttgtttgttggttttgttaaataccgagtttgttatccaagatcgaattgaaattcacatttggatatcggtttattctggtttacccgattggtgta

SEQ ID NO: 62104 - DNA, 548 bp, Arabidopsis thaliana landsberg
agctagagtttaaaaatatccacgcgtatcgtgggttcataacctagagaaagtttggcaattttttcaattagaacaagcaaagcatcattcgtttcaggaggtagaatactcgactcgaagaagtttagcacaaaacggataaccgaactccccaccgtatcccaacaattttgatagaaaaccggctgatatccatcgggccctggggctttgtattgtcccatgcttctaatcgaaatttccacctcacttgctgagaaaggttccttgagattcaacacctcctcccgtgtcactttctcaaacccaacatgaggcaacctgtcggaggactggtaaacattatccaaagagtagagatttgtgtaataaacaaccgccaagctctccaactcgttaggatacgtaacccatgtatcatcgtcattctttaaactttcaataagtttatttttccttcgaataaccgtacttgtataaaaaatacttcgtgttcctctcccccaagctatccatttttctcttgagttttggtaccaaaggac

SEQ ID NO: 62105 - DNA, 1590 bp, Arabidopsis thaliana landsberg
attgctctgaactctaaagaaagcaccttcataatagcctaattagatttttaagaacgtcatagcgtttggaaatttgtataaatatatacatactttatattctagggtttattctcacgttgttatacgaaaaagatttttcatatacttcacaagaattcaagttagactcatatatgccaaaaaggcaaaaatgaagtcctaatttcgtaatagcactctacacactttctcttagatattgattaaataggtaatgatgatagtaactcaataactacatatatcaatcaaaattaaatccgagtcaatacgtatacactctacatatatatatagatgtgtgtttttttaatgtaaagataaatgggtagcaaccaagatgtcaagaattaataactatggatcataaaggtgatggaattaactttaaataatttgaactagtactagtacccgtaccattcataagattccttttcttcttcttcttcttatacaaactcctctggccctttgcctgtgaatctcttactgccctaagaaaaccttaagcggcaaagaactgagatactgattatagagtgaaggcagactattttttgtaaggattatagaatgagacatacatgcaagcgacagttatttgtttgcctagttaaacttgaatggtaagacttgggttcgaaccataaccatatttgttatatttaaacgcagtgcaaccaatgacagcctataatttgtaatgtctccgcaatctcaaaatcatcatcatacgatgaaaacgatctttaaaatcgtatccccaaccacatgtgcgacgtcgtatagtacggcttaagaaatttacacgagcatacaaattttcatatagaatataaacattaatttagaattaactataaattaattaatccgttttgacttctttatttcttattttaaattttgcattatatacacatctgtttgatccctttatttgtttctatcaagaccttgaaaaaatggcattagcatcacatattcttattcttctttctctttttcttctgatttccctcgtccgaccacaagttcctccaatggagcaattccggttccttaacaacggcgactttggagaatccacggtggagtacggtgcaagttacagagatttaggtgtaatacgtaaccaatttcgtctatgtttcttcaacaccacgccaaacgcattcacactcgctatcgggatggggacaggaagttctgattcaatcattcgttgggtttggcaagctaacccacaaaaaccagttcaagaagaggcttctctttcgtttggaccggagggaaaccttgtcctcccccagccagatggcagagtcgtatggcagaccatgacagaaaataaaggtgttataggcttgaccatgaacgaaaatggaaatcttgtgttgtttgatgatggaggatggcccgtgtggcagagctttgaattcccaacggatacactcttggtcggtcagtctttaacactcgatgggtcgaagaacaagctcgtaagccgcaacaatgggtcttatagtcttatcttagagc

SEQ ID NO: 62106 - DNA, 1378 bp, Arabidopsis thaliana landsberg
ttctcgaactgcaaatgttatagcgaacaatttgataagaaaaattcatactgaaccgttatttactatttatgaaaataatttatttaaaaattggcttttctaatttttaaagaaaaatttgatgatgaaaaaaaaagttacaaatccgaaattaattatgaagaaaaagaaaagagtccgaaaataatcaacagattttactctatctataagataagtcaacttaaggaaaaaaaacaaattatatttcaaatcgaacaaactagtcgaataaaaaagaaaattcaactacaaaaaagactagacaatgatggaattttgttataatttgctttgaaaactttacttaaaaattactataataataataataattaaaaaatgacatcaaagtcgacgactactctataatccttgcgacgaccgttcaacacgtctgacttacatattgtctctctgcaacttttcattggcagatacacaaaatctttaattcttaatccaaacccagaaacaacctctgaaaccacttcatcatccatgaaagagatcggctcaaaaccaagaaagttacttcctttatgcttcatcatcttcctctgtttttgttcctctgttatggctgcagatgaagacgacataagatgcttaagaggactcaaagcatctctcacagatcctcaaaacgcgttgaaatcatggaacttcgacaacacaactcttgggtttctctgtaacttcgttggtgtgtcttgttggaacaatcaggagaatagggttatcaatcttgagcttcgtgatatgggtttatctggtaaaatcccagattctcttcaatactgtgcgagtttacaaaaacttgatctttctagtaatcgattgtctggtaatatccctacagagttgtgtaattggttaccttttttggtatctcttgatttgtcaaacaatgaattgaatggtgagattcctcctgatttagctaagtgtagctttgtgaattctttggttttgtctgataaccggctttcgggtcaaatcccggttcagttctcggctttagggaggttagggaggttctctgttgctaataatgatctctcaggtcgcattcctgtgttctttagctcaccgagttattcctctgatgattttagtgggaataaaggtctttgtggtcgtcctttatcttcgagttgtggtggtttaagtaagaagaatcttgggataataattgcagctggtgtgtttggtgctgctgcatcaatgttgttagcttttgggatttggtggtattatcatttgaagtggacaaggagacgaagaagcggtttaaccgaagtaggagtttagcggttagcgcagagacttcgta

SEQ ID NO: 62107 - DNA, 714 bp, Arabidopsis thaliana landsberg
caacactttttctcattttatcaaacccctctgatagaatagaccgctaaaacaatctgcttgattggtctttcttacaacgactaagttacaaatgtgactgaaagttaccgatcaaacccatgaaaaaaacttgagcccatataccttgctatggatttggcacacagaccaagctttcgaagcaactgtttggttgattcggaattgttttctgataataaataatctttatattattcgttatgtgattgagataggataactcggaacataagcaactttaacttgtggcgatgcgagaaccaatgtgaaataggcatgcgagagaccacattgtcccacagcttttgtcctcttcacccccgcaattatattaccattaattaatcacatagttatcgttttccaaatcgaaatatacatatcgcagttgttcatctttaatctattttcggtcatctaacaaaaagagagatatctcgtagtgaaaaaacgaatatcagtgctttatatgcaaccattatgacattaggtatcgttactcaaagttaaatgaatacaatctacacgacgcttaataaacgaatatatgatgggagtcacgaccctacactagaattaccatggaatataggcaatttgcgaatttattcaaccaaaccacaaatcgacagtgttatttagtcaaaccctctaagaaaaagtgaccca

SEQ ID NO: 62108 - DNA, 923 bp, Arabidopsis thaliana landsberg
tgttactagtggtcctcaaaatgttagggcacacaggggtatgtgattccacctcgtgtttactttacacattcacctctcttttatgtgactatcgataaatgaaacttaccaagcagggcttgctaagctaaggaaggagtggattgatcgtcgggagaagctaggaacaccaagatacactcaaatgtactacgctaagcaagggatcataactgaggaaatgctctactgtgctactagggagaagctagaccctgagtttgtaagatcagaagttgcacgaggacgggcgattatcccttccaacaagaagcatttggagctggaaccgatgattgttggtagaaagttcttggtcaaggtcaatgcgaatatcggaaactctgctgttgccagctctattgaagaggaagtctacaaggttcagtgggcaaccatgtggggagctgatacaatcatggatctctcaactggtcgtcacatccatgagacacgtgagtggatcctaaggaattcagctgtgcctgttggtacggtgcctatttatcaagcacttgagaaagtggatggaattgctgagaatcttaactgggaggttttcagagagactctgattgaacaagctgagcaaggtgtagactatttcacaatccatgctggagttttgctgcgttacattcccttaactgccaagcgtatgaccgggatcgtttcgcgtggaggatccattcatgctaaatggtgcttagcttaccacaaggagaactttgcttacgagcactgggatgacattctagacatctgtaaccagtatgatgtggctctttccattggagatggtctgagacctggctccatttatgatgctaacgacactgctcatttgcaactcttatcaaggaactactcccaacggggaa

SEQ ID NO: 62109 - DNA, 1103 bp, Arabidopsis thaliana landsberg
acttcatggttggcattggaaatggccttgttaatatgtatgctaagtgcggctcaatagctgacgctagacgtgttttctatttcatgaccgataaagattctgtctcctggaactccatgatcactggtcttgaccaaaacggctgtttcatagaagcagttgaacgctacaaaagtatgagacgacatgacatcttgcctggaagtttcacactgattagttcactaagctcatgcgcgagcttgaaatgggcaaaattaggacaacagattcatggagaaagcctcaagttggggattgatttgaatgtttcagtttcaaatgcgcttatgacactgtatgcagagaccggctatctcaatgaatgccgtaagatattttcctcaatgccagagcatgatcaggtgtcttggaattctataataggagctttagctagttcagaacggtcattacctgaagccgtggtatgtttcttgaatgcacaacgagcaggacagaaacttaatagaataaccttttcaagcgttctttcagccgtttcatccctttcatttggtgaactgggcaagcagatacacggactagctttaaagaacaatattgcagatgaagcaaccactgaaaatgcgcttatagcttgttatgggaagtgtggggagatggatgggtgtgagaagatattttctagaatggcagagagaagagataatgtaacttggaactcaatgatctcggggtatatacataacgagctccttgccaaggccttggatttggtctggtttatgttgcagacgggtcagagattggatagtttcatgtatgcgactgttcttagcgcgtttgcttctgttgcaacgctagagcgtggtatggaagtgcatgcttgttcggtgagagcttgtttagaatctgacgtggtagttgggagtgcacttgttgacatgtattccaaatgtggaagactagattatgctttgaggttttttaacacaatgcctgtaagaaattcatattcttggaactctatgatttcgggctatgcacgacatgggcaaggagaagaagctttaagctttttgaactatgaagctcga

SEQ ID NO: 62110 - DNA, 750 bp, Arabidopsis thaliana landsberg
caataatgtaaatgcataactctaaaatgtagaagaaacttttaagcaccaaagcaagtttctaataacttcaggggtaagagtataaataactaaaaaacagagacaatcttcaaaagcctctctcagtgttttactcttctgctctgtgtaaactactaaacgtaggaacccaaatcgaaaaaactctccctaagagatttacccaaaagcaaaaggcaacagaagcatcatcaagcttctagcattacatacgggaaaacagaagaaccagaagtttcagacaaacattctttacatgtctgtgaggagcagaaatatatataaaacttgtagctacggttaatgcatttgatgtcgcgggatagcacgggaacgaaccggtgtctttgatggactcaccctgcaaaatccaaccaccaaagtacgatcaatgttcagattcatgatcaatttagagagaatgttaaagagtaagtgttggtttgttcttggaccttatcggtaaagaaccaagaaggacaccactgcagttgagagccgctatcgcgctttcagcctgcggaagagtgaaaagatcatacttaactaatgaaaatgcataagcgttatagttgacaaatggaaggttggaagaaagagagataacagaagtatttgcttaccatgacaaactccacgaagcccatgcgagttggatgatgataatcgcccagtagcctcagacggtacacctcgccacacacagac

SEQ ID NO: 62111 - DNA, 1351 bp, Arabidopsis thaliana landsberg
gtcttttttgaatacttaaagttacactctcagtttctgcttctgctatggtctctaaagagtgctgtcgtatcgaaatacgtgcggctattcgacaacttagcgaccgctgtttatactccgccgcaaagtggttcgttttctcaaaaccctaatcttattcaacctctcccattgttgcaatctctagctcgctactgctctggttcgattaaaaatcgtttttttcactatcctttatgggttttactaatttttttgtatcctgggctaattgtaaacaaatttggttaagcagattcgttgattcgaattcacttttgttgcgaatttggtgttggatacattccaattcagatgattcgacatgtgggttttgtgttatgatatgtttgagctcgacactaattgaaaaaatgtgttctttcgatgggaacttctgatctccggttcaatctttcgatatgtttgagctcgacactaatttgtgaattatgagttaaagtttcagtttttagtactcgtattgtagttcaatggtggtgaactattagtcagttccatatttgatatctcctttgctttcatcattgcagggcaggagagcaggttgtggggatagagcaagacccgtctaattttacacctgcgaatacgaggtttcagcgaggaagctctagcatccggagaaggttcagcaccaatgaatctatttcaacaccgttaccttccgttggcttctctcaagcagctactcctctcccggaagaagatgaagcgattgatggtgacatttaccttttagcaaagtcctattttgattgtcgagagtatagacgggcctcccatatgcttcgtgaccaagtgagcaagaaatcactgttcttgcgttactatgcgctttatctggtatgttctgtttctctatctcctattttctatttagctagagcttttatatcttatcagaatagggtgatggaatgaactttttaaaagttggctccaaaatgcttttgagtgttcttttagcctcggccagtaggctgccttcaaataaatgcaatatatagacgttattacaaacttataggactgagcctctgattcactattttgttgatgtccagtcacagttatgttctatgatacaagagccatccgggtatgcaactgatatacaaaagtaaataaatgagtgaaacttaattggaattgttcgtcctgtttaaagactattctgtaaacctttatggcaattacttactgagagcttgctttttactcccgcttatttacaccaaaagagatagttctctataatatgtcattaacttttttatcccttcaa

SEQ ID NO: 62112 - DNA, 819 bp, Arabidopsis thaliana landsberg
  unsure (1)..(819): unsure at all n locations
agttattacataaggaaaatcttaaactggtttgtttactttcagagcatatcgtctattgactggcatcgtaaaggagactatctctcaacagtgatggcatccggggaaacacggggagtggtattgcaccaactgtcaaaacagaaaacacaaaggctcccatttaagattcgtggacttccagtctgtacactttttcatcccagcctttcttacttcttcgttgcgacaagaaaggacgtgcgtgtttacaatcttttgaagccaggcgaggccaccaaaaagcttgagacaggattgagagaaatctcatcaatggcgattcatcctggtggtgataatctgatagtaggaagcaaagaagggaagatgtgttggtttgacatggatctatcttcgaaaccatacaagactctcaagaatcatcctaaagacattacaaatgtggcagttcatcgatcatatccgttatttgcttcgtgctcggaggattcaacagcttatgttttccatggaatggtgtataatgatctgaaccagaatcctctgattgtgccattggagattctaagaggtcattcttcaaaaggaggtcagtttttacagtgtatttgattcttacaagaatacactatcgcatattaacttgtaagatcgtttatattaatgtgttttgattattttttatgactgcaggagtcttggactgcaagtttcatccgagacaaccatggctattcactgcaggcgctgactctattatcaaactctattgccactagattggtcgcanaccatattttgacaattttcatc

SEQ ID NO: 62113 - DNA, 1086 bp, Arabidopsis thaliana landsberg
  unsure (1)..(1086): unsure at all n locations
atcgaatccctgccttaaacaaaaaatgaggagagaaaagctttcttttttgtaagaattaagatcacttttacgcttgtggacaaaattagaagtttatttcttattgtctctgtaacctaaccatagaaagtcaggacttgcatggatgaacaagaagcaaaaaccttgcaagaaaaaaaaaacaaggtacacactcttttttcttttctattttctcgttttgtctagtttttttttgtttgtaattatgaggttactggtgtttttctcattttccgtcgttctgtctgaaagagaaacaaaattagttagaaaaattcgtggtggagaggattacccgaacaagctatgtttagcatatagttagagaaactgaaaagacttttgttctttgactacaacatgaaaattcatgtaatctaaatatagaattcttagaccatattgtttcaataacattattacaaacttttgaaagtttgacttgatagagatagactacgacatgttttgaaactcttttcttagaatggtcaaggatctaaacaaagaaagtccctaaagatctggatgaatcaatcgtcaaattttaagcaatggaagaaaatagctttttgacttttatccattacatagatcaatggtggaaactagtttgttattctccattaaagcactaagagtctcttcaaagtttatctggtcgggttgggaaaaatccaactagagaagagcataaaagtagacatctgatcaacccgacccataataacctttttttgttggccgcgtaatatgttcgagcgcggccatcacactaagaacattcataaaaaaaaatccacaggattcaaagcccttaagctttgatcatagtctcttaaagaggtagtaaaaccataaactagagccccaatttgcattcacaagccacctaacacattagcttctggtcatttctgctttatatacacantcaagtaaaaaatggtgagaagaagagaaggtcttacattgccaatcataaaaccggcgcttccgaggncagatcagnannnacaacgccggtggcctcacagaaac

SEQ ID NO: 62114 - DNA, 347 bp, Arabidopsis thaliana landsberg
gaaccagacatgctaccgcaatcatgatatttctgaaccaaacaagtctcttaggtgttttgctgaaatatctcttgattatgtcaacactgattgaacttttcattttgttttgggtttatagtgaatgaataatttatatccgtaattgcctccaacctgggcccacatttggccacctggtgaggggttagacactgattggatgacaatatattttcctgctattcattgcagatcggaactgcatgcaagaccatttcttgtggcattgaactggtttctatattcccacatatatttacaatgcggctatttctgcctgtagtcatattgtggcctcccag

SEQ ID NO: 62115 - DNA, 1366 bp, Arabidopsis thaliana landsberg
tcctaagtttgacaattcggtttggtgttgatttttatttataaaatgaaactttaatttataaatatagttggttctaggtttaattttggttaatcataacccagtcggaccaattttcacaccccaaaaaggttgaaaactttgtctctttaccatgtaaatttcaaaaacctaagaatattcaaatattcggttttggacacccatataagtggagaaagtgtggggtataaaatttgattaccatttagagagactatatttcgcttttattaattaattggaattttctagttattttctccttcgttaatctaacctaatcttttttgaactttataatataaacacaaacgaattaaaaaaatataccgtaatttaactgattaaaagtctatataagtttgtgtttatatgacgtatatttcattttgctacgtactactgtatgtatacattcatgttgtatgatggagcatgcctcttttgcacaagaaaagtactgaaatctctttatttgaaggagtccacatccacctcgaaggcgatgtgcgcagtggttcgattgctatacccgagattgatttaccggcgattgatgtcgcatcatctgctgcgtcggtggtggcggaagagttaggtaaatcaaatctcacataaatgattctctgttctattctccattcttcgtttttctaattgtttttttagatttttggtggttagatgtttgcgccagacgattcagaatttataaggtgtaaagtgtgttcatattagactgcatgcaaacattatcattgcacatcttaacttttaaataaaggactactacagatgtttggatggactactacagaagtaatgttcatttaaatatggataaatatcgacgctcacgattcaacaagcaaatccagtttgatatgaattagcaatatgcaaaaagtgataaggatttgaaaagttgaaaagcaacaaagaaaatataacaacttaaaatataaatgagatataattcttaattgacttggtatcaaaacatttgtgtcctgttttgatattgttgtcaatactcaatactatatataagtacttttagtatctacgattctacatcgacatttaacatataatcttatagaatcaatgatgaggaacaagtcctaaccacattcaagaatacgaaccgagggggtctaaatcttacaagatgaatcggctaagagactggttaaccaaaccgaatccttttcaaccgacacatcatcgtcgttcctgtgccattcccaacgtgcatgagtcgcattctcgaccaccaattgaccatgcccgaaacttgcttctctaaacaatgatattt

SEQ ID NO: 62116 - DNA, 413 bp, Arabidopsis thaliana landsberg
cggtagtggccagcgcaaacaacttaccgtaattggaacgtgttgtcaaaaaaatagagcgaccgcgaaaagaatcctctgcattctcgtatttcctgaaacactcgctggagcggacatcgtcctggaaaaaagcttcgcctttccagacgaagagacatctgaatccccaaatgattgatggcataacgtgctaacgggctgttgccgacaccgatctagagaatggcctgggccagggtaatgcaggccggaatacccgcatgttacatctgcaaaacggactcatctatccaacgttccacgtattctatgcgcgagtacctgcgctcggtcggtagagcggaaaccgctcgaacaagacaaaacaatgccagtgccaggatggcaaatattttctgtaacatagtaca

SEQ ID NO: 62117 - DNA, 1331 bp, Arabidopsis thaliana landsberg
gaggagttttagtagaatcagacgccaaatgccaacccatttgcctccttaacatctttcctcacagtagtattttttcttaagaaatcgagagagacctcatctaccaccataaggaaacagaagagattcatagaacgcttgcttatgtttgatggctggtggggttcatcatatgcatcgaaaatccccgtggcaacaacaaatctgcacttctttacgtattctttatccagagatgacatttcagcaccaccacgtggcatgaatccgcaatggacctgaaacgtttagggttgtaatgaaataaataatttagaaattattcgtgggaagaatggtagaagaggtttagccattgccttaaaacaagccttttaccttcatctcaggtttcagtttgaagctttcttctcgttcagaccagcttatgtttccgccaaatagaggaaactgagacttagaggattcatcctctgttacgtaggtcaaatttctgacaattgtatctgcggttttatcacttggtaggagcaccttatcagggtcataagcaacgggaatggggcatcctagaaaagaagagttgctaagcgtagctctagaataagcagaagctaaacagagtgatataaaaatcttacggtgctggggtttaggtacaaatccaatagtgtccaacatgacatagagtctgccttctttgttgcaaatagctgcaacgaaattacaaagaacatgagattactgtgatagaatctgcggtgaatgcagaagatggttggagtaactagtacaataacaacatcttctattgagtgtatgacaaatgatagatatagtgaagaatggcaagtgtaaagaagttggaggaaacctgagaagaaagaaagggaagattgacaggaccaaacatgaaacaagagggcaaatagaatgagtagcatccagacaatgccgccaacaagaagcaagcgaaggaagcctgccttccaaatttttttcaaagtgtaatcagcatgcaatctggtgggagagaagaagccagccacagcatctgcatcattggagacaaagtaatagaatccattagggattcattacgaagacataatcattcattacgcattagattcttctatagtggaaacaaaacactataacgggggtcatcttcaaattttcatgtgtaaaccactatacctaaaagaaagtgatgatcattagttcaaaaagagttgggttgagacctttagattgtgagtaatgattgcttctctcaccccggcggctcaatcgcacagaaagtgatcgctgagagtcactcatca

SEQ ID NO: 62118 - DNA, 1607 bp, Arabidopsis thaliana landsberg
tgatcggaaggttttgcatgaaagaagaattacagtgctagacattttatgaatccagaagtttcaagtgttccattctttttcaatccacgagattttgaacaatttttagtgcccctgagtttcgtatatcatcagttatagtggaaatacataatgagtctgaataagtaattgcctggaaactgtaagaaaactgtcaaaaacatagatagagaatagtcttacatcctgattaattggtatacggtggtatgtcctcataaagcctgcaattagactgcagaatcttttgctgccagctggaggttcaaacgggaaataggagctatttttcaagacactagcaagataggctaggaatggaatcttctcatcagcaacagtttcatcttcgaaagataaatccagagaattactgatttcttggaatccatttttcaagaagtcaaagattatcttaacctgtcaatcacaaccaacttaattgattactttgttgttcatggtaagaaaaacacattaactaaatgaaagcttctttatctacccaccagatttggttggcgaatctgacaactataaaccgataaagcatgggagattcggccaccagccttcccataggcccatgctgttcgagcacaaattggttggtctccagaaagtcccataaagaactcaaaacgatgagggctgctcctctcaatttcaactaatgctgagatatcagtatctgcagcctgtgaaaacacatgtcaagtggccattgtggaggagcatgaactttcagactttaaagatgaaattcttacctgaagtattttagtctgccacatctgtgtaacacggactcctcgccgctcaaacaagcgtctacagacaccttgcccaggacgaccacccatgttgaatatcataacccctgcaggtttgatgacagatattccttcttcaaccgctctggcaatcaaacctaagccaaactgatcttcaacaaaaccctgaatatggatacaaatttcatcaggcacaggtagagcatccactttaacaaagtttccagtacctggtctatcattcacaccttatagagtaaattaagcaagagaatgtgtcattgctggcaacagaaaacagagaggatgctatggattttacagaggagaaaaaatattcttatgtaaatactcatcacaaacatgcaacatttaggttgaaaatgcgataggcatgcatatgactggctcaatcatactcgcaaaaagctcaatgtgagatttcacatgatgtttgatagagaaggaagaaaagaggtatcatggattagacaattgaatgatataacatgaaattgggacgcaccagaagagttctaggaactagcttgctaacatactaatgataccttcagagtatatttgctgggaaaaaaattcccttacctgaagggcacaatagttactcagcgaatggagaaattcctcacttgcattttctgtgatcagcttagacatagcttctgggtttggattaagaatctgccacaagaacataagatacaaggaagcatgcataaaaggaaaacgtcagtttttcgaagattg

SEQ ID NO: 62119 - DNA, 637 bp, Arabidopsis thaliana landsberg
  unsure (1)..(637): unsure at all n locations
aatcgattgtcaggtttcgatgccataccggttgagattcaacgagaactcaggagttncctacgcaaataaagcagcccaacaccggnaaaagcaaaggcgagggttctacttcaagcattgctcattattctccaccattgaatagatagatctaagctcctttgtctctgttgttgactgtatatagtgtagtaaccttagatttggtcttgtatcttgagtactacagatatattatgcttaaatcctattaaaaatatatcatttttgagcaatagaaaaactatatatatatatatatatatcgnctttaaaatccatcgagacctcttgttttttacggtatgcacagtgatagaaggtttatcagaagtttgtatatctttgttcaaccacgtaatctcatgaaatattcaaacatcctacctaattgctctagtttctctagtatgagttcttttttgatcaattctgtaccaaacgataacattttatttccaaaagtcaaatgtaaatcgaaatgttaattacaacttcgcctaaatatgacctttttcttaactaacctnattttcatcctactttctacaatagaattctcctatattaattgacctaacataagtcttttttt

SEQ ID NO: 62120 - DNA, 1592 bp, Arabidopsis thaliana landsberg
tgggggaaaatgaaaaataattgcaataagatgttccgggatcccgccaaattaacccaaaaaacccctaaatgagggaaacatacaatagtagggacctgtttccgtagactacggtgcctctcctcttccatgcatgaacaatcttcaatatatataaataaaattgtacaaatttatagaaaaataaaataaaaatagagatccatgcagtagtggaaatacgtatgggcaatgatcgaatcggacggtgagaaatgatggtggaatgggacccaaagtgacctatcagccacgttaatttgccgaaagggtaataacagtaacccaaatggtcattggtcactcagacagccacagacatagccatcttggtcaggctgtcaaaaaccctaaactcgaaactaaagcccacttgaagtcttccaattcatcaatcatcattgttcattatcacacatacaattgcatgtgattcgtagagtggtccatttcgtgaaatcactatgccacgatctcgattgtagtatataatttgtgattaataaaattaccgaaaaaaatgattaattaatcggctcaaaggttcccactgtatgaagaaaaatgtaggggtatatttgttatttttcttgtaaccggtgggtggtatgtataatttatcttctttttatttgtattttagttcaacatagataataaaagacttgtgtaactatgcaatcccaatcaacaatgataatttaaaagtattatgtggagtaattagtccatgcacattaatgagaaaaaagacaaagagaaatgagagatcacgtcaatgtcgagtatcgatggctacaaacgagagtttgcaaaagctaagctgtcgaaaacacgtgcatagtatccagttggcacttacaaacattgcatagtgtcggcctaaaaacatttaacaataccccccaactcttaggaacacacacacacacacattgcattattagcctcataaatgtcaatatcgtatacaaatctttggcaatggctatgtgtattctcaatcggaactgcaatatatatggctgtttttaaacaagaatctaaccgaggatgacctatgtaactccactagcccaagactcacttgtagcttattgtaatcataatatataaacatatgggtaaaccaaactaagtaagattcatcatatcttatgtattcaaaaagattagacagtttttcgaatcagcaactacataaaaatcaaacacacacaaaaagttagtgaatccagcacgtgattaagcgaccgacgttactaatacctttttagtattggataatgctttctcatcgcacaattaaaaaggataaacaagatcgagcgtgtggacgtaagcgagcattttaaaaacaacaaatttcataattgcacgaattagaagacaaaacataataatgtaaaaaagcttcttactggtttagaagcatagaatcaatataaatatgggaccacccgcacgttcgtttgcatcacaactctaaagtgttgtcactcaacaaaaaggcaatggaggagtcgaagaaatacaaaagtatggtgaag

SEQ ID NO: 62121 - DNA, 235 bp, Arabidopsis thaliana landsberg
gaagttgttaaaagtcctttacgatccgtcctgacaccgttaaaaaaagccgtcaaaataaagtatgggctttaaacgttagttttgttgggctaattttaaaatcatggcccaactaaaggagatattcgagtggaccgcgtaacagaggatccctaaaatcccttcctccgattaataaattccagcggacattttagccttctcacatcaacacgccctaaaaccgctctcg

SEQ ID NO: 62122 - DNA, 1908 bp, Arabidopsis thaliana landsberg
tgtaattgtcacactagtctatgcattatctaatctaactcttgatattttataagtaagatatatgtacgcatttctaagttataacttgttgctacccttttgctagtggataattcgaggcacatggcattttcataattggtcaattagttattaagtaccaaaattttgaaaaggaaaaaaattagaaatgcttagaacatattagagcaaaacatatgtaaattttatgcaagaataagggaaaagcaaataaaatcaaaataaaattgtatattgtggaattaagaaatgaaagaggaacgcaatttagttttaaaatctgacatattatatatagttgagtcaattgttttccaccgaagaattggttgtggttccatctaacttaagatattttgtgttaagatggtttatttgtagagatatattataattatatatgatttctaaccaaaacaacaagaagtttttaaagatgggtacaaattgaattaactaatgtaattccacattgtcatttggtaaaggaaagatatcttgacaaaagagattaaaagaattatgtgaaaaaccttggcgaccttaaaccatctccaatgtctttatatctttggcatcattaagagtaaatgtgtatcttgatcaaacctgaaaccactaaagaaaaacatatgaactcaaatagaggccaattaaagatgaggtccaaagaatagggagtgtcaagcctttcacaaagacgacgccgttttgctaaaaaaggcccaagatcacaacgacgacgtttgctgaagaaaaatgaaaaatctttcactacaatcattagaccaaaaaagaaaaaaaaaatcaaaggagcttccttttttcgctctcgtctccgtttacccttttgggatttttccctaaacctttttctctctttgtataatcaaatcctctttatctttcattgtttcgcgtgaattagctctgcaaaggctcttcattcttctcgcttggattcctctgcacaaaaggtacccatttgatgtcaattttggtttattgttttgattgccctgtccaagtgacaagtctttgtatgtatgatataggtagtgggttctagtttgtagatgaacttgtcgaatttggagggtttttagttggaagcatttatatgtgggatttggaattgttctgtctatttgttcttagcttaaaggttgggacttaacttatgacttatgagcatgagagaaggagactttttttccaattcgaatctgattgatgaaactttttttactggatttgggtagatattgttaggttttaaggtagttgactgttgttagttgttgtttactcgagattagattattgtcatctactcttgttataaaagaagctcctttgtactatatcagtgctgataactattaatgaagttcctttcccttaagtggagatagtttctttgtatttgcaaactcaatttatgtgagaatatatccaccattattgagtttcttcaacctataccgtctctgacaatctcgctttttcgttattaagaacgttccagtcttaattaatgttatcttcctttggatgtaattggtaacaaattgcagaaaaaagaccatggatgatcttcatggaagaaatggtcgaatgcacattggtgtagcgcaaaatccaatgcatgtgcagtatgaagatcacggtttgcaccatatcgacaatgaaaacggtatgatggatgaccatgctgatggtgggatggatgaaggagtggagacagacattccttctcaccctggaaactcaactgataatcggggtgaagttgtagaccgtgggattgaaaatggagatcaattgacattgtccttccagggacaagtttatgttttttga

SEQ ID NO: 62123 - DNA, 417 bp, Arabidopsis thaliana landsberg
  unsure (1)..(417): unsure at all n locations
gctgatatcataccccctatcaacaacacatatattttcatcataccatcctctttaaattcgggcgttttataaccgtcatttatccgcatggcataaataatgatcgcgccattagagccgttgcccgctgccccggttcctgaggacccttcgccacccgccgccaaaacctgttgcgttacggccggcagtatatgtgtcgcccgagagaatcatcgtgccgccctgtccccagagnnnnnnnnnnnnnnnnnnnnnnnnnnnnnnnnnnnnnnnnnnnnnnnnnnccctatatcccccggcgccgccggccaaattaacagcaccgcctgctggcgaccgccattgcctccggaagcatacttgccataggcagcagcacctcgtagcccccccggaacctgcattaccggt

SEQ ID NO: 62124 - DNA, 247 bp, Arabidopsis thaliana landsberg
cttctctgttttcaatttgagtcttttaccaaaaaaaatctgtaaggtttttttgtaaagtgttttcaatttaagtatttagcatcacatggggaaagacaaggaaacaataggataagagacgacagtagcgatcaagatcctacgattatgtctcttttgagcttagagatcctgtgaccaaatttaattaactgatctggatttggtatcgttacagtattcatatccacataattactgaacc

SEQ ID NO: 62125 - DNA, 624 bp, Arabidopsis thaliana landsberg
caacctcttgttaatggctacaacaatctgctttgcacaatcagggtgaatcttgtcaccttgtctggaccaagcccttgctctcatagacagcctattagctcggcgtgtaagaacatggattgaaacgcctcaccctcattagattcattgatgttttcccttgaacatcgtatgctctcaataacatggtaaagtctagggtggacgctcagtcttagccaccgcagacacgttcatcttcaggctccacccaaggcgacactcgacgtagggattctagatcatgtattggtaactatattctttgttatcgtggctgatggcctcttccaagggtgcaatagatgcataccaacatcgtatagccggtcgtaggagagagtttacgcggttgttgacgttgcaaaggaagcaaatttctggccagtccatagtatccttcacaacagcatcgatggcaactagcagtgtccgctgggcataattttatttttcggcatatccggttgcatatttattaaagaaaccatggcagatggcagtgttttccctttcgcataatgtcacaaaatacccaacaagttaaactcgggtctacacggacgagaaagccacaccggg

SEQ ID NO: 62126 - DNA, 1091 bp, Arabidopsis thaliana landsberg
cattcaaatgagctcccaagaagctctcatccaaacgaaacaataatccaaaacccatgatgagtgggtgtggtggaagaaagtttttcttacctcgtatcatgaaacttccaactgtaaggtattccccagtaggagctgttttagtgacctgatgaggataaacccaccatgcactagtaacaatcttggaatcccaggcctgactatgacaaacctgcatcatattatatccaaaagtctgccatcaagacattgcaccatattcacataattcaaacaaccaaaatagtagatgaaattgcttaccgtaaaacatccagcttggtttaaagtgagaggcggtacattttgttcaggtttatgattctttatcacagtactagatgctccatgaagctctgcgtgtacatatctaagaaagcatggttaaaaacttatcatcatctttgaatatttaatactaacacaaagactagataaataattctatatattaaaacttacagatctccttttgacatgtaacgtttaactatcatctcattttgctgagcatcacgaccactgatgaccaagtagttttcactgctaatgaaccaattaaatttctcaaaccagtggacttttctcatgtgtgaaatcgttgcaaccactttttcctttcagccagaaaaatgcaaatgattagttgactgcgaggaagaaacattaaacaagattaacagcgacgaggttggaagcttacctgagaaagttggtggcgggtctttttctcagctgctctaaaagccttttcatgggcagaaacagtcttctcctgtttggtttcttgcttcttcttcatttcataccagcgcctagcattaccatgcgcagaaagtgataagtcaacctccacctacaaaaccacatcgtgctccatatgtcagaacaagaaagaagatgagctttgtatattcaatcaaagtgaggagagatcaacaccttttccactggaaccgtcttctcatcatcatccatttcatcgagattgttgcacaacaacaaggtcatgcaattcttctccagataaagtctgtcaatgactc

SEQ ID NO: 62127 - DNA, 572 bp, Arabidopsis thaliana landsberg
gattaaatcaaggatcgtacgtggtgtccttgcgcggatacgagcgattgaggctcgagagcgtctgtaccgcctggatgcccgcgagccgtttgtcgacatacatgccgcacagcagcggctgatcgaagccggtctggaatttgttggcgaccagcaggatctggtactcgtcgccggcgaatgcctggcggatgtcgcggcccttcagattcggattgagcgtcgcagagtgttcggtgaacgggtcaggcccggagtccgcgtccgtgacttcgccggagaacgccaccagcgtgccgagccggtacttctgcgactggatatagcggtcgatcgccagcttccagcgcaccgcctcctggcggctgccgaccaccaccatcgccttggcataaccatcgagcagcggcgccacgttttcgcgaaagtgctcgacgaccacctgcaccttctgcgcgatgttgtaggggtgcagcttgacccagcgcatcaggcctttcatcgcctggctgcgttccacggccctgtcgtccagctcctgttcgccggtcgccagcttgaacgccagc

SEQ ID NO: 62128 - DNA, 369 bp, Arabidopsis thaliana landsberg
acacaggcacagaaagagaacaaacagaagggtttcaagccatattggacagagaaacgcatgaaggcgagaagagagccgaagccagggaagaaacccgaagagccaacggggggatgacaccagggaccgtgcgaaggaactagcgtgcaaagccaacaaaaggcatgaccagagaacgacagaagagacaacaggcgatcacaaagccgcgccacaaaggagcggatccacaaacgcgagaggcaaaagaagcctgcacagacagatcaatcacagagaccactgaaagcaggcccaaaaacagagaaatcagccaaactgagcaaccaaggaaccaggtaccaaaccgagatggagaacacccga

SEQ ID NO: 62129 - DNA, 336 bp, Arabidopsis thaliana landsberg
agggaaacactgcctacgcgcgaaggataagagttaggaatatgtgcccagacacaggcagacacaggacaagaaggcaaaaacgactccaaaacaccaacgaagctactaccatgcaccacaaagccaagagggcacagccgaagaccacaagagcacaaagccaagcaaccgcaaacaaggaaacacgaccaatgcctcaaggataaggaggcggataacagccacaaacggaaagaggcacaggacagcgagacacactcgactccaaaacaatacccaagggaacccatgcaacataaagctacgacggggaagccgaaggcaaaaggaacc

SEQ ID NO: 62130 - DNA, 1915 bp, Arabidopsis thaliana landsberg
tctgaaaacgcatttttctaaataattttggccggaggaaaaacttgtcaagaatgggatccggtgctaagggattgtactggttttcccaggtttataagtgcaaactttctattaaatgaatgatatactcagaaagtcaaatggaagtgatgtcgtgagtcgcgcacgctcttgacatacaagatagtgcatggaataaccaaaatatttatcaacaaacgtgtacgcaaagttgcaaacatcaactcaacgcttaatcacttaattttaagcacatgcctaagaactaagaaaaccactaaacgccccacacgtataatcaggttatttttttgtattttaaaaagatagtaggtcggattagtagtgatgatgattatgatgtcccgtcggaggataagtcggatgataggtctgaggaggcactgaggtaactccggtaggattatgcccgtaaccgtgtcccataaccggtgcgggagccggtacaggcgcttgttgaggcacgtggggaccatgatcagtaacatggtagtgagattgcttagccataagcttgtcttccgcatgagccgctttagccatgtgcatatccatattcgcttctgcttccttcgcctttctccgttggtgcgctatctctttctcctctttcgtcctcgccatcgcccgctccgcctgcacgtcattaatatttgaatcaatcaaacaatccataactatttagtcataacaatgatgttaaacgaaatcattagcgtaattctaaatttagaaccttctcatcagcttttgcttgacatatcaccatcttctccttggctgtactagccatatcgcttatcttctgtttcgccgattgcatattttttttctttagttttctgtttctctaaactctaactaattactcttgaatgattcttattcgatttaaataatgaaatgtatgcatggcttcgtcggtccaaatgggtcacattaattccacgtgttattaatgtcgccacgtgtcttgtttcaattcccagctttctatctagttaccacgtagagatgcttcgctggcctaatctgatatccacgcaccgcctctaccggattttggtggtttaattggccgaattttgtaaaccggaaaagtttttggtttgtatttccggtttatgatttagcagtggaatggttgattggtctcttttctcagaaacactctcttatcttcttcaacctctcgacttgtaaaagccgcgaaaatcaaaatcctccaaaactatggctctgattttgccctgtacattttgtacttcgcttcagaagaagaattttccgattaatcggagatatattacgaatttccgtcgaggagctacgactgcgacgtgtgagttccggattcctgtagaagtttccactccatcagatagaggatcgttggttgttccttcgcacaaagtcactgttcacgatcgacaacgaggagtggttcacgaattcgaggttccagaggttagattggataagttatactctagatttgcaatgtatgctctgtagtttcgagattcaaatatattttatggctttggatctaggattcgttggctatagttaattttgattctacttagtttttgtttctctcttgcttccatttcgatgttcgttgcgccttagaggaggaaattagaaggaatttgctgcttgtggctcttttggtttaagcaaatatgaattagcttgttgtagttttgtaactattcttacgtctggacattgtgtagtgtggttgatataatcgtgttgtctggcttatcactggtttccgttcgttgatatgtggaagtctatttgaaatgcaggatcagtatatattgcattcagctgaatctcagaacattagtcctttaca

SEQ ID NO: 62131 - DNA, 561 bp, Arabidopsis thaliana landsberg
  unsure (1)..(561): unsure at all n locations
cttcttctatgaaactcttatcctgaattttgtttcagcgatgcaaccataggnccaaaaatcaagtataaccactttcttttttaaatcctgcacaaaaatttataagagttactaagaagcatatgactccgtttgttcctcaagagttcacatgcaaaatatagatttggtatttgctgatgcaaagcaatttatctaatgtcttccggttcctagagctgaaaccaacagcctcttaattacttcgaaaaactaatcctcaacaggtgttcagtaaataagcaaaaatctatgttatcaactcttcacataactttaaacgagaatttacccggcgaaactggagaggggcagtgtttagccagtcgagtttagacgggaattctggcacagttgtagctgtttgcctacaaataaaacaatagaaacagagtaacatccacatcaaaacagaagatcatccacatttctttttcccgctagtgatattccatatttctgtaatctattgtatatgataatctctctgtaacgagggaattaccgaataatcaaact

SEQ ID NO: 62132 - DNA, 1463 bp, Arabidopsis thaliana landsberg
tttgtatttctgttatctatttattatactcaagatgaaaataataaaaactctttatttacatttcttcatttattaaaatgctttacaaagcaaaacttattaatctctgtaaaaacagaaagcacctaattaatcatacccaatgtttaactaccaatgtgatcgaaaatgaaaatccaaacaatgaaatcttaaagaaaaaggaaaaaacttagaaccaaataaaaatcaaaccatatgattgatgagatcatcagcttgtaaatcccacaagacattatccacattaaacacatgttgatgatgatgatggttcctcatcatcgtcattccatctcctcttcctccttcagatccaatctcctcttgatcaaccacttctcccttcagcttccttctctcctcctcctccgctgccgcggtttcagctaccgcggtacgtattcctccgtgacccctccaagctgcaacggcaggagacgctgatccatcatttctttcttcattcccaaacgaagacgaagaggatccatatgagaatccattacccatgtcccataacttcattatcccattcccatggtccaaaccatccatctttatcttaccagcttcattatcagcaatctcgtgaaagttgtttgggttagggttatggtttgaaaagttgatttggtttaggtcaacacgtttcttggtgagcaagtgaagcatctcgtccttgaaacagccgagggcagcttcggctaggtgagaaacctgaggaggattaagtgtagtggtgatctctgccattagatgcgagaaaggcttgtgggtcaccggatctattcccattcctgacaacttcttcttcagcttcgtgttccaataatttttcacatcgttgtctgtccgaccaggaagttgcgccgcaatcaacgaccacctgaaccatatatgtcaaaagattattaaatgtttcccaagaaagatgttaactgttgtttctcatgaaaaatcccagactattcatcagcaatacatcatcaaactctatttatgagtcgaaaacaaatttatagaaaattaaaagttcccaaaagtttaaaaccctatacttagatttggtattatggtatatagaacaaaacttatgtcttattcagtttcttgtgtcccaagaaacttgtcaaaaaactcataaaaacaattcatcagtaagtcagcatcaaaatttcaaaaacttagtaaagaaacccgatatttatgagtccatctgtaatttatacacctagattaaatcttttcaagaaaatcataaaaccgtagttaattagatctagtgagtagtgatcataccggttaccaagaacagagtgaaacttgacaatgatatgttcttcagcctccgagaactggccatgtttcaaatccggacgcagatagtttgtccatcgcagcctacaactcttcccaca

SEQ ID NO: 62133 - DNA, 245 bp, Arabidopsis thaliana landsberg
tctcctaagaatccccgttctggccgcggcccacggaggcccttcctcatgaaactgcgttcactcatttttgcagccgctctcgccgctgttcctggcctgacgctggccgccgacgctgcacccgctgccgctccggccgcagctgctccagcggcgacgagccttgaccagctgcttaaccaggtccgcacgatggatgtgcgcgatgcgcaggacaacgttgcgcgtgaagcgcgcttcaa

SEQ ID NO: 62134 - DNA, 1093 bp, Arabidopsis thaliana landsberg
gaccggccctagcttccatagggacggccggagattagcagcgatcttgagagaacaaaacggtgatcaatgagagacgaataagtttggtttttatgtgtgaaaagcttttagtttctctctctgtatggtacatagtttgttgtagagtctccattgccttcaagctaagctttcgttttatattatttcttttttgtaaaaacaactgttttagtaaaaatttctacacaactgcaacaaactcatcactcacatccatcagctgatgacatgtctttctttcatcgtcgcggtttccttaagcttctcttttttatcctttgcaggtctctctcattttacttactgtcctaatctcatttccttctgttttcattatactaattatatatgttcattttattcaaaaggatcctattattttaccctttaacaaaaaaaaaactatatacagtatatgcatgctgataattcgtaaatataataaatctggtatcttattatataaagtgatccgccaaaatactagtaattttgaattaaaattagttagggggtaaggtttggtgagaggagtgcaagccaagttacgttccctgtccttaattaggtgaattttctgcatacataagctaaagagaatgtaaagatcatatatgcctttgatcttcttcaccctttcttgttcattctgtttccatgacaattcctctgctccaatcctttttcttttggagtctgcggataaagatctagtccatgggactaggcaggttcagaagcacaacgggctgggccttgaccagccatggttgtttccaaatacaaaacaaatcgaatcaagtgggcagctatttgaattctgttaacatcgaaaccagaattttgagtctcttgcacctatcaatacaaaaccaaaaaaaaaaaaaacttatgattcggaaacaaacaacaattttattgttatacaacttaattagactacactaataaataaataaaatgatccttaatctgaaaattttattcaaattatcgaaactatgaaaaaaagttttagaaaatttccccaaaaaagggaaaagaaaaa

SEQ ID NO: 62135 - DNA, 518 bp, Arabidopsis thaliana landsberg
cgggaatgcccacaatcaataacggatccattgcgattttacacttatacccaaggatcgcccaaaatgacggagagggacatagtcacacaaaacatgatcgatgaagaagaaggtaccccaagaataggaccctatggagcttgaacaagatgagagaaaacagaaccaccggtgcctcccgatgtcggagatgcataaagagagctcaggttgtccgaatctgagccggaattgagatgacggagcagagcaccgatcctgcgatcggaagaagaagaggaagagaaatgagtagttttcatttttgtttgtgcttcgggtgtgtttgtttacgaatgaagaaatagttgaatacgaagatctctatgtttatatgaattaggtcttctaatttatttttggctatccaaatttgtcacgtaagcttggcataaagatgcgtgcctgaagcatcatcatcatcatgataatcaagatattaaacagttttttgtcagattatccatgaaaaagcc

SEQ ID NO: 62136 - DNA, 168 bp, Arabidopsis thaliana landsberg
ccttttcacaccccgcaacccaagcccgaaccgggaaagggtgtaacccacggggggcccagacacccagaacacccacccccctacaaagcgaaacagcccgagagccactgggcaccaacagacaccgaaacggcggaggagacaccggggccaaaaaaaaagaaa

SEQ ID NO: 62137 - DNA, 918 bp, Arabidopsis thaliana landsberg
aaataatactaaagattagctgacaaaataaataatggttattatttttgatatgatctgcttggacataggtagtgggtaacgatataattatcgatgatataaaaaaacacatcaaatcgatatttattagacgtagaattgattaagaatcataaaaattacgactgtattttttttttttggatttctttgttctaccaatctaattaaaatatgtaaaacttcaaatataaaaaaattataaatgttaaatataatagtcaagtctcaagtgtagaaaatatccaatacatctagaagactggactcaattcaaactttctatttttattgtcatttaataatcttgtaaattaatgaataatgataattgagaaagtaatacactcaatggtcaagaaaagaaccttggaacaaaaaaaaacaagtcaaagaagtataaataattgcattgttaaactaaagccatgtctcatgccataggagtgattgtcaaaatcttgtaagatttataagaaagatcatagttgatttaccttacttctaagaaaacaacatctctctttttagtagctaaaaattcttatattagcaactggtaagaacaaacacatgattattacagatgggattaaactgtaaattaagctgtacaatcgaatcagtcgggcttacaataaattaattaaaacccaaacgtgaatgatttacgttatgtagaaatgaaaccaattaatttggtttgttcggtttggcttcagacgacggttatggaaaacagttacgtttaccggatgtgatttcattcggccaggaatattgggccttaagcccattaaaagtttgagcccgaataacatacaccttgtaactaacaggctctttgtgattgaaaaaaatattattcattttttc

SEQ ID NO: 62138 - DNA, 1921 bp, Arabidopsis thaliana landsberg
gggcttaagttctacataatatgaggaatttgaaaaggcatgttcctgaagagcatcaaaactctgttcgaatgcatctcccatgtggagctttagctggtttatttggccagaccatcacttacccattggacgttgttaggagacaaatgcaggtaaaaaaacaaccaaaccagaagcaagattcaaactatgcaccatttcagaactcagaacatattgggcgtttcgtgtgaccacaggtagagaatctgcaacctatgactagtgaaggcaacaacaagcgttacaagaacacatttgatgggcttaacacgattgttcgaactcagggttggaaacagttgtttgctggtttaagcatcaactacattaaggtaaatcagatgaagaaacaatgaatccaatatctcagtctcggtttcacttttttcctctatgattcgtttaattgtctttatttgctagattgttccatcggttgcgattggattcacagtctatgagtcgatgaagtcatggatgcgaattccaccgcgagagagatcaaagccagcatgagggtctttgttccttcactctcttatagaagacacagaagacagaagaaaacatgattgttagacagatttttttttccctacttcttttcattttcaaggccaatttgcccctaaaaatccttgatagtgataatatttttttgagaaattatgctaaaatttataaatctgtgatcaaatccaagcgaaagataaagttgatatctgttgttgtgcagcaaggatttggaaaatttccaattgacaattaagaaaaagtttcttagaataactcgaacttaaattgtagtattggagatttattaagtttgtaacaactttaatgatggaccaatttcacatgcgtatgtgtaattgaaatgtcataaacaaccccacttcgtaacacgacctagggttataatcgtctttttgtgaacaaatccgaccgagagagagagagagatatatttttggcagtaagatcaaattttggcattggtaagttgttgttccttcttctcctcccgcaggattcgactcttcagttccttatttaatcatctcatcttctgggcaagtcctcttgttccttgctaaaatttctgggcttttttccctttgtttttcttcttagatcactctgataatttttcgttttttatttctcagaaattcgaggtttttatagggttgtggtcttagcaatggaaggaatgttgtcgtccggtgaccaacagagattagtctcttctttccttgaaatcgccgtcggacagaccgccgaaactgctcgacagttcttacaggtttgttgctcaaaactggtagatttgttttgttctaagctgtgctttttttttaaaactcaactgatagatttgtctgagtgagcttaaccttgattgagtttctgattttgggtctaaagggttatttcagcttaagaaccctatatagggtttctaaatctttcagctttgggaaaaaattctgactatgggtattcgggtttataccctagattgagattagacgcagagttttttatttatttattggtgattatcggttgatctggcttttcgtgtaacaagatctctgtgattgagagtagcctgatttggtgcatgtggtgtcacggtctccattgtgatgagattgacttggtatatttaaaattgtctgtatgatcattgatcttcttatgacttggaacttgtaactcgatatagctggtttattatgatttatgtttagcgtagaatgttgtagtttgtgattcaccactctcctgtagatagtttgctatgatctgatcactcgtgaaattactaacgtagtagaatctttttattaacaggcgacaagctggaaac

SEQ ID NO: 62139 - DNA, 907 bp, Arabidopsis thaliana landsberg
tactgaaactccatatggattacgacatgtgataaggtagattagttgtatctttgaaaataaagtagccacatactataattatatacttacccaacttcttatcaaatctatttggcatgtgatgatgggaaacagaaccacaagttgtccaataagaactaagaagcgcatgcccttatatcgtgctatttctatcttgtttcctattaaacctctttggttatatatcgtttatatttttcctaaatcatgattaaaacatcttattatagttttgcatgcgataacgaatattagaagatttcaactttaaaaaataaataataatcatttttaaaagcaaagaaatgattcattaacagctaaatgtcattgacactagcattgtctcatgatttgatcgttttgtacttcaattctataggaagtgggcgcaatagatgacaaggaaaatgcaagtgctgagtcaccgcactcactctctgtgttttaacaaggaatcaaactccacttagtataatatcagtttctcttccataagtcgagtcttgattagtttcactcacaaactcaatgacttttttttgaacaaactaagatttcattcgaacttaaacgggagttgtctccacacggggatgacgctactcggagccaaacaagcaaattctgtgacccacaacatggtcatgcaaatgagaaagctaaaacaacaagcacatctcaatgactaagtgataacaagctcaacaatatcacaagaacaaactcatgcacgttttatcaaaaaaaatctcgataaagctttttgagctaaatagaacaaactctcaatgaacaaagagctgaagagagttaagaacaaaggtaaagtttttatgaaagacctcttaataattcaaag

SEQ ID NO: 62140 - DNA, 913 bp, Arabidopsis thaliana landsberg
gatatgcgcggttgctagaggtgatggaattgtcaatttgatcattttcgaatcagaactttcccgaaagggaacatcgtcaaaaggaagtagcagcaacaatgtgatcaaaagggtttgtttagactactctgttggtggacacaatgctgctgtttcttgtgtagcgttttctcagtttcaggagaaaggtagattcttgatctcaggtggtaatgataaaacagtcaaaatatgggattgctttaaatgtcttgatccaaacaacaacaacaataacagagatctcctccatttgaacattaacctaagcaagaaggtaactaaaaactcacattgttcttttgctcttttctcttttgtctgattctgacatttattggggtttcttaaacaggtgaattggctttgcacgaatcaatctgattctgagaatcttgtagtgtgtgacacaacaagagtaattaaggtttactcaatctcttaaataggcctgatgggtccataaacatagactaaaagattcatctttttttgtcattgttattagactaaaagattcatttttatttttgacattagaatggttgcttgatctacaagttagtttatttttttgcttaataaccacattataaagaatgattacatttaatcattgaattgttaaattcttttactatcatcaactttattacgtactatttgtttgttctatacttatgtgtgtatttaacttctccctttcagatttatcttcttgtcccatttacacaattaagattttgttacgaagttgaaatccaatttatttttcaataaataatgttaccatcatcccaaaaaataacctgccattctaacgatctcagataagagcaacaagtaatttctatttggatattacggggac

SEQ ID NO: 62141 - DNA, 1243 bp, Arabidopsis thaliana landsberg
gcagggtttaggcattgtcccgagttattatttgtatcagatcctgaaagattatagaaatgactcgcaaaatcagatttgttgcgcatatatatagggccaaagaaaccagacttagtggcatagtctttaccaaagtctataatcttttgcgagcgacctttcgagaaatcccataaaacaagctttgaatcaagtccaccagttataactgaaagaaactagacattttagagagatgtgtgtacatagtaacaaatcacattaagatgttagttaccttcccaaggtctccatggaatgaattgtacagaactacatatcttaaatgtcacattaaggtgttgacttgagagatttttccgagactcatagaatttcatagacgcgagggagcaaaatatcgaaataaggatacacttgtgtggccagctctaagggttttataaaggcatttctgaccaatgtcgatgatctgtgtttcaagcaaactaatcaaaccgagaaaagtcccacacaaattcatgtttatgtaatcttttaagtattaaaaacaacaattgagtgtaccttaacatcgccagaatcatctgcagaagcaagaaaagatgaccttccgttgcatactacctttaacaaatcaagaaacccaaaagatcgatgtcacaggtaaatatgataactttttcgaaaattcgaggcttttagtatctctacctggtttacttcatctttgttgtaattgtaactctctaatggcttccaagaagtagcactcagctatgaatttgcataaagagagaagctttaaaactaagtgaaggatatgtttatagatagttaatcaaagttttgatatttttaaattaccatatgaacatcaaaagacttgatttcgtttccacaagaagcatagagaatgttctcattacctgaaaaatcgaacaaaatttatttaccaacttgagccaaagagaagaaattgaaagagagagacacagacaaaacacaaagagacaaaacctgtcttgaaacaaagagatgaaactggttctgttccaacatcgatgatgaattgaacatctttacatcgcaaatcaaaccagcaaatgcaaccatcctataatcgtatgaccggaaaactatgaatcttgcgaagtaactacaataacgaaacctaaattcatcggaaaaaagaggtttgaatcagagattaagaaaccttttcggaagtgagaacaat

SEQ ID NO: 62142 - DNA, 1120 bp, Arabidopsis thaliana landsberg
aaaattggggagtcgtgtataattaccaaaataataaaacaattattaatacgcttgcatagactaattagtttttttttttcctaagcttactaaagtgatctgataaaaatcatgtatggaagcatgaaagtaataaaaaaatatcaagtttcaaaattttagtctttcatatttatgtacatttatatatatacgcatgcgtagactataatcagtcattttcgtgttttgtctatacaattactaaaaactgatttaatcaaaatcgtgatatgttttctatttctgaccacttaatataaacgatcgatttgtagaatttgatggcaaccaatcaaaggttaccgttagatataatgtctatatataaatagtatccccttttggcatcttgcataatagtaccaaacacctatctaatctcaaattaaatatttaaatatttataaaatgaggatcattatcacttcttcgaaaagctaagcagcaaagaaacaaatctcacaaagacagttgttcttataataatagaagaaaattgagggattaggaacactattattacaacatctttctgtcaaataaaatatttagcttaaggaaaaaatttaaaatcaagattatttaattaaaaaaatcacataggaatgttatgatgatataagtttttgtcttcaaatgtcaactaaattccggtaatttccacacacttgtccgtacttgcctatataaacatacacaccctcataaacatatatcaaaattttacacttatgctcttcatatcacatacaacaaactcatatatataaaaactttaaccttcgtatagcaacgatctagtagaaagcttatactaaaactttctgattctcttaatatggcggaggagtttaaagctacggcatcgatttgtggtggcggaggtggcgcgtggtggaactcgccaaggagcgttatgtctccttcggatcatttcttgtcaccatgcttcggagcggctatcacttccaatgattttagctcgcaagagaatcatctcaaatctaggatgacttgtacggacaacaacaacatcgttttcgggcagcgagaggcggattctgacagtggagga

SEQ ID NO: 62143 - DNA, 383 bp, Arabidopsis thaliana landsberg
  unsure (1)..(383): unsure at all n locations
aaacaaaaaaggaaaaacaaccaacctgctccaaagaagggaacacaagacgcaggggagcggacggacaagaccaaccgaagagaaacaccagacataacagccggaggaaaaaaacaaacaagaaaccagacacaccccaaggcccaaaggacgaaaagaccaacaaagaagacccaaaacacagaccaccaagcaacgagaagacagggaaaccaccctaccaaaancccaaaacaacgangggaacaagacaaaccccacccaacggggaaccagaacaggacccaaagccaggcagaaagaccccacaaaccacccaaaaaaaagtcaacggagaagacaacgacaacccaaaaagagcaaccaactagccagacagc

SEQ ID NO: 62144 - DNA, 1246 bp, Arabidopsis thaliana landsberg
aattcaagaatcattcctgtgatttttggtgcaaactgtggctcaagttcttccaccataaagaacaaagtttcaccaatcaactacaaaaaaagagaaatttaggtcatataaagataacataaactatatttgtaagtagctgcaatcttaaagtaagcaaaattaattttacatctcgttgttctttgggaggtaaagaagcaagatcaaaaggaggtgaatcaccacgggcaacttttacaactttgttaaaaaagcataaacgattcatgacttaagcaatgaagacgacgatatatttgagagaagaaacaaaatttagtgttttgatgaataagatttcatgtgctatatataacaaaaccaaaacaaaatatctaggtaaatgccaatattctttctttttaataattggggattcaacacgctctttagatcatgtgtgtgaaccacgcgctataatatagctaaaacaaaaatgatataacaccgtatgcctattttttttttctatgtaaatagtataaaattttggttttagatttgttgaaaaacaatggctatatgttagcacgtatgttgaacaatgcaaaatttactaaatgtatttttaatcatttgttttgtatatctacaaataacaaaattatctaactcttagaattaacattacaaggtagtgtgattggcttataatgcatgagtttttattttttatttttttgggacaaactaatgtgcatgaattttaaaattagatttttaaaataaaaatattgaaaatttcacaatttacaatatacaaaaatcgaaaatgtggtacttttgacaaaatccaatgtttgttacaaatttatacattggaatagaaagaaatctaggagagtaatagcttactcaatcaaaaactgacacgtgtcctccatcctcaccaagtcaacattctctgtatctattttaattttgtaaggtaagaaatcttttgcacaaaaaaagaaaaggtaagaaatcttttgcatttttaaaagaaaaggtaagaaatctgagagactttgatctaaccacgcgtttaaaaggagacagtgaacacacgcgctatgaatccataatccatttagttggatgtgaaagcccatataatgtcatgggcctaatttatatagcccatataaacgaaataggaaacacacgagagacagaagcactgtttgggttttggctatatgagagagataataatatt

SEQ ID NO: 62145 - DNA, 1850 bp, Arabidopsis thaliana landsberg
aacacctattaattaaaaattaaaaataaaactaccaaaattcaaagctgactaagaatagtttcacatttatttgatgggatggaatgggaagggaatgaattattcggtccagaagagtatatattatacccaaaagtaaagactgtaaatagatgtgaagaattttttttttcgaccaatttttttttggttaaaagaacttattttcttcgtagcaaataatctctttttcatcttatctttgtttcaggaaataaataatttatggcaagtcattatatggttcacgagatgcgtatggtaccatgatattgataacataccttaaagaggagaagaccattagaagagacaaaaaaaaaaaaaaaaaaaagggacagacaacacattctccacaacatatttattatttgaaatttgtaaaagaaaacgaataactacaaagattttttggtctcccattttgaaaacctcccgatttccacatacatcctttttcacctttcatcaattatgtagctacatgccctactccagattttcaaatgttatcataaaattatagtaatgcatgtggccgattataatttttgtatagtttggtatgcaagttttgatatatcatcttaattgtttaattttaaaccagtgtttttgcactagagattcttttattagattaactactcaaatttcagtatttttatttgttcagttttgatatatcacattgttcccgttcttctgcaaattataatatattatttttaaaaatacaaaataagaataataagaagaatatattatttcttcctatatatattagcatatagttgctcaagaacaacggcaaaaataaaacatatcatatatataatatatgaacactttcaatcgtatatacagaaatatacctattttctacagccagtaaacttgtgattaaaagtcgatatacatattgtagaaataaagagccatgtttttgctaacatgttaatatttgtgcttaatttgatattctaattacatatgcatggatgttaactttttagttgaagttagagaacggatcttttgttttaaacaatacataaacgcattacgcatacgtattaatgtaagattacatgaacgaggggagtttaaatgctttgatgacgtgaggctgagcgttaagaaacgacatcagctaaagcaattcgttttttttctaagtagcgaaatgaaattgagaatataaaggaaaaagaacgatgaatctgaatcccccaaagtagaaaattcgtgtcacacgtgaaaaaagttatagatttaaattctctttttgtattgccaagaaaataaataaataaaaagtccaaagagaaaataaaattggaaaagaaaaagtgtaaaagaaggagccaagattttcacacaacctaaagttttgtttaaaaaaaaaaaaaacaatttctcgtgattcaatcgcattatcatataagcttttccgtgatacaaaagggattttataatagtaaattgttaaattaattgacgattatttgatgttattaaaagaaaaaaagaatagtaacgatggatactttttgccacgtgtcttaatcccaggtgctcagagtggaagcaggttactttggttctggtgttgttactaatgctgcaccacatttttatcgtcgtcgaacaacactcacctatatatggcgcgtttacttcacttcctccttcttgtcctgtgtctgtctgtcgcagttaatttatctactggtcaacgaaagatctacactctgtagaattgatttaagttcgctggttgattttaaaacattataattatatgt

SEQ ID NO: 62146 - DNA, 596 bp, Arabidopsis thaliana landsberg
aagagccactaagaaacaaaggcaaaactccataccttgacataaccactacggcgatcgagattgagatttagattcttaatctccccaaaatcaccaaaagcattggttatatcctcctcctgtgtctcctcatgaactccagagaccaagataatccatccttcaacggctacacaacaaacaaattcatccaaaacagtcccaattcttcattaccctcaaagaaactatgttctatcttcacagactctagaaccattacattttttataatggttacaaactaaatctaaaccaatctaatttttttcaaaaaacttctaggtcaaattgaatcccaaacacaaggggttatgagaaaccctagaacaaattactaccacaaataaatcaacaacgcgaagaatcagtatgccaacactaaaacctaactaaaaacagcgaaagaggaagagatttagtgaaattacatctctgcggaccaggacggccatctgaaccaagtgattcgaaatcgcgtgaggaaagacgacgctgacgatcggaatcttttctccttcgcgaaaacccacggccttttggtctttcttttt

SEQ ID NO: 62147 - DNA, 1194 bp, Arabidopsis thaliana landsberg
atgaatagttatttctatttagtgctacaaaccatatgtgccatcgtcttcccttctccagtaacgccgtagcgaaaaatctcttctcttcatccccctgttactacagcatgttagtattaagacaaacaaaaacactaactctggcagaaagttgagtagcagaccaaggtaaccaatcgctgtatagctgtttgtggattatatcagtgtgaccatcaagatgttcgaccacactgccttgataaaaacagaaatcccatctgcaaagtttcgagaatttagttcaggaaaagtaaacaatacccgcatttgtttatgttctacgattgttaatatcttaggcttgcttgtctggaaagaggcagtagtacttactctgatcttgagggtccaagagaaagaagcgtttggaaaatagtttctgaggttccatcaacaacaccaacagccataatagccggatgatcatcccactgtgaagtcatgcaacaaaatcatcaaaacatgattcccttcaataaacccaaaataccttttcaacagattaagagtgaaaaaaataccgacccttccgagagaatctctctcttttgcctctttaaaaagccgaagacctgcgtgcaacacatgttaacactatgcattccagccaaacaaaaatcaatgaaatttgagtatgaactataccattctgacaaccgaatattgtccagggagaaggcgcaacaacatcagttgtaacaggatcaactcgtgcagacgaccgaagtgtccagtcaatagagtttgagtgatggtcccgcactgagctactcaatctgatttcagaaattttctttcttaagtaaccacaaaccattatctgtactacgtaactaacaaaaattggcaggaactactggctcagcaatttatttaacagttagcttagagatgtatccaattgattacgtggaaaaaaagaggtacctcaaagagtcccatcgactcctggaacaattaaaaacatctccaggaaaaggggcaccctgcataaaacatataactataagtctccaacctccaagaagagctcttaacttgttactaattgccatttatataacctttaaaaccgcctatttaatcaaattaatccaccttgctgcatcctcaggactgcttgctcctaactatataacaattaaaaca

SEQ ID NO: 62148 - DNA, 110 bp, Arabidopsis thaliana landsberg
aagagaaaaaaacccaacgacggctcaggagcaccaactcctccacaaagaaacagaaaggacaacacaaaagggggagaaggaacaaaaccaaggaaccgacacccaaa

SEQ ID NO: 62149 - DNA, 468 bp, Arabidopsis thaliana landsberg
  unsure (1)..(468): unsure at all n locations
cgttctgcanngcgcgtcnataatatgttcgcgtccagtatgtcttttattgctaccgggattggcgaggtagttctcgtacatctccttgacgtacggagcattgcccccgaacagataggtgttgtcgctgtacgtctgatagacggacgcggacggggacccctgagattgggattcactcatattgcgctgacctccgtttccctgcaggaaactttgaactggttaaacaaccttccgcgacacggctggaccgattggcggatgcgactgtggctggaagggccccgggagaacgtgttctgaaaacgcatccccctcagtacgagcacgattgtgccaccgaacgggagcccgtgccaagcgacttatgaatccgggtgctgattcttatgtttgggcgcccgtccccaccagctcgcgcacctgctgcagggccgtcgggtcgtccagcgtggtcagatc

SEQ ID NO: 62150 - DNA, 1353 bp, Arabidopsis thaliana landsberg
acacttaaataactcgcgtttagctgcttaccgaattgagaatatcttccgctgcaaagtataaaccattcacagattcattttagaactcatcggaattcagagcaacagagtaaagaaaaaaagtttgatttctttcacctgtgttcattctatccatggataataatcaaaatccccctgaagacacacaaataaatccaaaactaaaagtcaaaatcgaaatcttaatcggagaatcctaattgtgtgcatgcaaagatagaagctttacgtaagttcgccggaaataggcaaccacgaccgagagaataaagcgttaccacgacgtccgtaaaacaacgaacaagagatctctccatctccggccatctcaacgccttccgctaaggaacgacgtctagccgtatcttcctcctccagcttccacgccatcttccgtctccatcgcctcgaaggagccggaacagcctcatcctcaggcgatgaaagaggagagacacggcgacgaggacggagacgaagaataaggagaagagaaaggacgagagagagaacgaagacgagacacttcctaagcgttctcaagataaatattatccgattgctcgcgcctgatgttaattggtccatttccgccgacgttgacgccatcgccggaaaattcaaaatcacaaatagtaaaaaaaataaaaatcggagaaagagaagaagaaggaaagcgtgtaacagagaaaaatgtcagaaatttgggggaaatggtgggactcaatttataggggtgaatacttcaatgagttagaagaaagacgacaaaaatcagaagttttcattaatctgatgcagtggcggatgatcgtgtgagtgactacgtggctatatctcattggttgttgaactaacgagatcatgtagtaatgttgttgagcgattaagtcagagatttggacggtgcagatacggtgtttctgcgtgagttcggtcgggaaccgttggtaagttggatatatggtccgttacttccaacatttaatgatttaaattaatttacttgcgactcggctcaaaaaccgcgttttgagaaactgattttctttataacaaaaattatattatttccttaaatggagacttgtatgccttatatgatgatttgattagtaagattttgacacattcttatattttttaatgaattgtactaatctcatatttattatacaaatcttcatatgatggtgtatttattatatgcttatatatgtaaataaaacgatagagacgagaaagtgtagaaataagcagagccaagggatttttaatcaatcattaattaatggcttaactgggaat

SEQ ID NO: 62151 - DNA, 209 bp, Arabidopsis thaliana landsberg
gatgccacactgaagagcttgtacggatattggaatattaccggattaactgttgttccagccaaaaatgcacctgtcttgaatgtaagtaagtaatcttcattggtagttgtgccttctgtggtgagaccaaataacagttgtaaggaaacaatgatggtttggtcgataaatcgattgtgcttactatactgaacctgtataaagca

SEQ ID NO: 62152 - DNA, 1071 bp, Arabidopsis thaliana landsberg
ccctaacccttacacatgttcctctccagtgcacttatcaaccttcaccacccaacgactcttcctcatcactttttcacgatggtgatttttcatcatcatcttctgattatcattgaccctcgtcacaagtaacccttctcctataggtaaaaactgcgttttccttccatcgctaaacctccatgaccctctcgaaaacgcgttataacccaccacaaccgccacaccgcttccacccccggttcttgcgttttcttcgtgatgattaaggatttttccaacgatctcttggtggttttcgaggttacaatccacgaggacgaaatctgcttctccgaaatgattattgattagagtgtcgtcgttagattctccgactacgaattgtatctgatgaatctctgatggttccaacattttttgggatatgattagttcttcgataccacgtaaaacgcatacaacttgaccacgcgtttggttagccgctgcgattagtgcaacgagtatgtcggcgtttgctgctccggcgcaagccacggctatctttctagcgctatttccggcggctagggctgatatgaattcggcgacgtttggttcttttgtcctttgatcctgaaaatgcatatagagaaatatgtcaaaatgtgacattaactaatcttttatcgtaatttgaaacaatatcacgggtaaatgttttggttataagaataaactcttaccgttttcaatgtactaagataggctttagtagcattctcagcagaccaaaaagccattattgtttttagatattttgagtcttagaaagaaaatccgatttctctcaatctcttgcttagaaagctttgaagttgttgatggttttggttttaggggtgaaggttctttatttatatattgggagatttgtggatgggacaagattcaaacaggctggtccagtatcatgaatagtttcttattgatataaagagaaggagaaattgaataaatttggtcaagttgtaattgtatctgcatatgtatacaatatggtatctcttatatgtatatatttaa

SEQ ID NO: 62153 - DNA, 1357 bp, Arabidopsis thaliana landsberg
  unsure (1)..(1357): unsure at all n locations
ctgctagccataatactgttcctccgatcacgtgggaatcccaccgcccatcacgtgccttccccaaccgtctgattttcttcacgagagaagtccaaaaagagcaacgcaaataattgtaaacaacaataatcataaagaagaaaactcatgcaaaaaccacatgaatgtaccatcgcaatttaataacaaccacatgcatcgtctttagagaagatgcataaaatcacagccgttgatcacgtacaaagtacgatcgtataggccgcggcgcaggagatcgaatgagccaagaaatatcaactgtgtattttgatcgaaaggcttggtcggtcgattcaatgttttgcaattattaaagtaaatcgagaaatccaaaatgaacgatagaagagatttgtcgagaagtcagaccaggcactgaattaactacaaaactattgactttatgaaagaaggatattaaaacatatgcaaaacaccaagtggaatgggacagtgactattaatgaagatgggatcttacctcaaacaccaaaacatgtcagtaaaattattgtttcccaccttataaattttcttttcttactttcacatttattatccatacacatgaatagtccgttgttcagaacaagattaagaaaatgaaaattgtccaaacacataattatatgatcttcttgtttctcttaccggttcaaaatacttatcatcttgtggttttttgttcatttgaaaagaaaagtaaacaatttgataatataattaccttttagtaatcaaaattagattattgttgcctggaagttgaagaaatgaagattaatgtcttgtataatttatattttgtttcagacctatatatacattgtcatgcaaggaatagctgaaagcagattttttttcttttgagaaaattactactcaaattatctgccaaaccgattaaaattacttaatttcaccatcggtttacttatttcaagctgtctgaagtaatttatcgttgttactctcattcttcctcgtcgatttcggagttttcctgattacttttaccctaaacgccgcctgacaaaaccaaaccggataattttcagaaaccaagaccggttattgtaaatgattcggttaaaagaaaaaccgagatttggtaggggtatnagatgtctctcaccttcttatctgaaccaaactcgatgatgtcggacgatctaaaccgcgcgggaaattcggtgttgctctatatcttcttccttcgttactagaaaacattcaaatatcaaatcagaaacttcaaagactcagatataataacctggtcagagtatccatatagacttactcggtcaca

SEQ ID NO: 62154 - DNA, 476 bp, Arabidopsis thaliana landsberg
taaaataagcacttaagttccgtaatagacttcaaattctgacaaatcacttgattacaaactgaaaacttcgatcataaaaacggaatattttgatagaaaatgcaaataatgatttgattggatatgtgtagtaaattgaggttaaacaattgtagacgaaaaaatgtgatataccggcaaaaaatattccgtaattgattttgtatttcaaattaaattgaataaattacaaatactgaaatattatatactataaaaaaaaatgatttctttttcttcctcgccggcgctagcggtggtgattacacaaactcagagcttggtaaattccgatgattccactgctctgacgatgaaggaccaatacatctaacatttgaaacaatgtaatctctcaaagtcttcaaagactcatctctctcaccattctcaacaatcactgatctcttctccaccggatcatcatcatcatc

SEQ ID NO: 62155 - DNA, 1388 bp, Arabidopsis thaliana landsberg
gccatcaaatctccgacgatctttcaggctatcaacataaccccatttactaccactctccatgttcaactcaatggacttaagatcactctcctcatcatcatcagaaccagaaccatcaatcacctccaaaatcctacgaatctccgacgacccttttccttcttcaccatccaaaacccgccggagctccttcttcagccgctccacggcggcgtatttatcttcgaactcaaacttcgcctccgtaagcttcatttgaactctctcttccctcaaaacatcagctatatgcatcatctctctctctttctccatctccttcttatcatctccgattcctttagttagctcatcacaaacctcttcaagaacatctttagctctcttctctcttttcatctcctccttcatcttcctctctgtttctttagcctccgagagctctctccctaatcttctattcatcttctctgttcttcgccggagttttctctcaaccatcgcctcttcttgtagactctctatcaacctccgcttctcctcttcctcttcatctaattcactcattagatgctttagtgaagatcttgctctgtctagttcacataacaaagcagagatcaaacgattgcttgctgtcttgtgatcatctccgagctcaccgatcctttttaatacctttaccagttctttagacgttgttaatccgtcactgacattcttgaaacgagttttcacctgtaatataattaagaatcagacctttcttcttccgcaagaaaagtgtttttagggtaagattgcaaatcataccgagtttgcgccaatgattttgtattcaattgggtttaatttctgaggatttgttgatcttctacgaatcatatcgtcacagagatcgattctctgtgcaattttgatttttcagacttagaatttcagaaagaaaaaaaacacagaggaaacttgaaactgaagcaaaccctaacctctgagcttagacgagaaatcggatcggatgatcgtggcgggaaatcaatggaagagaactctgttgatttcttcgctctgtatctcgatggtttcttgcttctcaagcaatctttatcagaatttaccggagggtctgcgtcgtcgttgatttcccacagcgtcgcagctagctttctcgccgacacgcagcttttctgcaattgatgatgatctataggaagattttccggcgaaaacgataacggaactggagttttagcggcggtgatggacttaacaggagttcctgagccaccgtcgtcttgagcggctctttttccgggcgaaaattgcaccgttggaagccgttttcgaccaggcaagtggaagaagaagaaggagggaagaaccca

SEQ ID NO: 62156 - DNA, 424 bp, Arabidopsis thaliana landsberg
caaaaccacattgatatcaactagttatatgattcttttttttaaaaatattaactagttataaactacgaggtggaaattggcaaaaggatatcttgtgaagtgagagactcttgcaaaatagaaaaagaaaaacaccttcataatgtatctatatcttctagaagctcatgatctctttatctatagaaatcatgcattgatttcaaatcaaacaccataaaacttaatccttgaaacaaaataaaaataataagaacttctaaaaccttttgttgtagcaatgatcatttcaaaactcatatatgtactgattgggtccagatttcagaagctcatgccttattttgtatcacattaagcacggccttgggatagtctcttgtttgcaacattttaagagaattattataacctatgatct

SEQ ID NO: 62157 - DNA, 252 bp, Arabidopsis thaliana landsberg
aacgaagaggaaaagaaagggcagactcaatagaggaagccggccgacacgaaacacagagacagaaaaaagaacccaaaacgaccgaggcaacggcgaaaccccaacaccgcgggaccagggacacgaagcacaagcgccgcaaaaaaaagcagaagaaacaagaagagagcccgccggaaaagccaagcaccaggcaccaagacggacagcaagaccgcggagcaagaagcgagaagagaagaaagagcc

SEQ ID NO: 62158 - DNA, 459 bp, Arabidopsis thaliana landsberg
ggtgaggatcctctatttatagcgttttctctcttcttttcagaacaagaaaaaaaatcaactttagcttattattttggatactacttaccataaagtgacacatcatatattgtttttacttttattaatttatgtgattatttttcttaattacataaaaatcaactttcataatattaaatagatcttccgttcaataagctgatttttttccctcatattttgttagcaaatatgaaagtttatctttttatgtaattaagaaaatctacaagagatgtataaattggcaaatatgacgtgtcaggtagcaacatttactttgcaaaatgctcccaaataaatgtcatacatgtgtttttcaataacactatatttccttttttgaaaacgttattttaatatattgtcctaattatttacctgctacgtgatttatataattattcccgtttt

SEQ ID NO: 62159 - DNA, 584 bp, Arabidopsis thaliana landsberg
aagttgtgactggttttgcaaacgtatatacattctttaatattcttttaccatagatttctttatatgtaaaatttcactccgaaatattagtcttccggcaacaacatcgtttgcacatttcacatttatgtacgaaagtcgttttgtgcattgttgagcaccaccatgacttaaaagtccataacaaactagttgagtaggtactatacgtgtagaatattaactctaaaaccaaaataagaaaccaagcaaatggaaaaggtcactttaagtaagaatcttaaaaagtgaaagaaattgagacaaaacaatagttgtatttgaggaaaaaaaaatcaatagttgtatagagagagtgtagtggtgaaattggtgatgtgtgtcacagctcagcaagtataacgctcgcaataagcaagctgaaccttatcagcaaaatttgcagatccaaatcgagaggcaataataggcaaggagaggtctagtttatagctaacctgaccctctgatggatccagagggtatggatgattcagtatttgaaggacaggtgatgctacagccatctatgacattagagc

SEQ ID NO: 62160 - DNA, 1381 bp, Arabidopsis thaliana landsberg
tcaatcattttgcctaactgattcattagtctatcacactcatattatagatttgggagcctacatagtgttagcagtcttctagggttataggtatatataatgtgtatacataccctatattaacataagttcgttgacaaaaaagtgatataaactcaaagattgtccataagttggtgtccccctcccaaattctagaacattactatttaaagcttttctaaaagagaattgtttttttctctttagattaagtaaaaaatctaatccaaactcaaaactttttaaaaatggactgcaagtttgacttaaattagacctcatatgcttaataataggcctattcacagaggaaatagagtcgtaacccaatctaaccatgaaaatctttcttagatagactatcacatatcaaaatagaagctgactttaataacaaaaatttcaaccttagaatttattgatgtttttagacatcctcccaaatttgcctacattattcttctatttaagacatcacaaaacgaaaaggtaaaacacattctgagaagaagaagaagaaaataagaaaaaacaaaagatgaaaaccattatcctttttgtaacatttcttgctctttcttcttcatctctagccggtaaaatctcaattcacagtccattacataaatgatgcaatagtcgtcttaatgtttggaacgtaatgtatgatttaattgatgcaaaactctgagaagtattttgactcttgttctcctgatattttgcagatgagacagagactgaatttcattacaaacccggtgagatagccgatccctcgaaatggagcagtatcaaggctgaatggaaaatttgcgggacagggaagaggcaatcgccaatcaatcttactccaaaaatagctcgcattgttcacaattctacagagattcttcagacatattacaaacctgtagaggctattcttaagaaccgtggattcgacatgaaggttaaatgggaagacgatgcagggaagatcgtgatcaatgataccgactataaattggttcaaagccactggcacgcaccttcagagcattttctcgatggacagaggtaagggaaaacaaacccaaagattgacatcatttctgatatatatatatatatagtagctacgagctaataaatatcaaacttggatttggttttaggttggcaatggaacttcacatggtacacaaaagtgtagaagggcacttagcagttattggagttctcttcagagaaggagaaccaaatgctttcatttcgcgggtaatgttaaccgcgattgcatttacgataccgttacaaccttttcctgaaactctcagcctattctttgctatgt

SEQ ID NO: 62161 - DNA, 187 bp, Arabidopsis thaliana landsberg
  unsure (1)..(187): unsure at all n locations
gacgagcaaaaagccggaacaggagaccacaaacnggagangnggaagaaaaaaaacacccacccacagaacggagaaaagcacacgaaggagaaaaggagacgacgaacccaggaagcgaagaaacaacccaacaaaaccccaacncaaaaccagagacaccgggacgcacaagncagaccaaaac

SEQ ID NO: 62162 - DNA, 906 bp, Arabidopsis thaliana landsberg
cagaggattgttaacaaaaacaacgataaaatagaaactagtcgtagccatcgagacacattagattttgattcgctaagtcttttgtcccgaaagataaattacacggtcattcagttttcgagtttttcttataataataaggagaggtaatttactagagatatgtaataataaggtcataaaaggccagcctccagtaaatttctccttcttagtgtctcatctacgagcttgaacgttttctttacaagcttctggtccaaagccgtcgtcctgtagattttgaataccctgtccactctatccggcgccgtgttctggtaatataactcctcaaacttcttcttcacaaacctgaatccaaattaaaaataaggtcatataacggtaacagtttggcgggaatcagtaaagtttggagacaagcttactcgtatgcatgctcaatctcttgtttcccacttgaaactggttggtaatctctgaaccactcgcaaacgttcaacggaacctatgcacattgaataagaaagcgttattgaacaaaaagacttgcttgcctatcaaaacaaataaatatgctttagttcttcttacgtcaagaactttcttctcaaatatgtcgaacttgttcaagaacagcatgaaggatgttttctgcgtaaagagaaccaagtttttgtaaccaaacccatctcaagagtgtctttaaatttttaacagatgagataaaaatgtaactaaaaacctcaaaacagggttgtttcaggacccagtcgaataattccttggtctccatcatcctgtttttctgctcgtcctcaaagagcgtttggtcgtacctatgatcaaaactcagttaatgttttggcaatatgtggacagtacgaggatatcttataa

SEQ ID NO: 62163 - DNA, 1752 bp, Arabidopsis thaliana landsberg
tcacacttcaaacatatagagtttcttctaaaattgatgtaattgcacctgatgatgtatagaaacattatcaatttccaacaacgatggccagattttaagactttaaacagcatttagttttaaggtttaaggaggtgactcacgactcgcattcccactctccgggattgatttgacgcaatgtaggcttgtctttgcaccttaagcatctcgtgtttttcgaaaagttcaggaaattacatctgtgcaagtaaaacaaaaatcttaaacatgttttcatggttttaatcagattaaacactaaccgatgaaacagtttgtcctcacgtttgacaaatccaatctcctttcttcagtgggagatgatctttttgttcttccttcaactgtttaagcctttcctcagaaaaaacatcacatcgcaagcatcttatgtttttcgcaaaatttagaaacttgcatctgcccagttcataatacaaaaaagagcccaaagattaacatccctgaaatcgaatcataaacattaccaagcaatgcagtaagattacttactctgtacaataccaatcccctggcctttttcgtggatctctttcatcaatgtcctgtgaatttggctggagctcatctccagctgtctcagtctcagcagattcaaaatctgttaagctatacgctacactttctctgagcaacttcctcacagaatcttcaacaagtttggtttgacaggcacgattctccacagtaggagaaatggaatcaagcccgtaagttagcagtaaacgcatgacatctatagttcgagcaccttcatcatctcgtgcttgtgcatacgccctttcacatttccctctcaagttgcaagagccacacacctactaagtaaatgtttaagctttgttaagtaagtttcaagtaaaacctcaaagagaccatttgatgcaaactcatataagcgtgtgaataaaaaaaagagttacacttagtgactataaagaagaaagcatacatttccttcatcaatgccaacataagctcttagacgctttcctgagttcacgaccttcctatcagtgcttggacaaccacacccagcaatcactttgatatctttctttgacaggtttctgcaagtaagaatttttctgtaaattctcatcaatttcaactaaaagagagtcttttaataaatggaaaacaaatgcaggacttgaaagaaggatctgtatattttttttatctccggcatttagtcgagcacttggtgtgcaatattgaatcaaattgcattacctaacgagagtgaaacgatggcgggcgaaattgagacaagctgtacgaatatgattagattccttggaactcatcaatggaatcaagctttcttcaaagtaaccttttttcgctagcatccccattaaatctagccactcgggccacgggtgcgagcttggatcaaccaaacctggtctagcgatctcaccgttttgggttttagctagaccgtggaatggtcttgtgtacccaatgattcgatgtaacaatctatggtcggtcttgaagaatctcatcataagatttttggtaggtacataaaagtttagttacaaagagattttccccgacaaagcaacgaaactcaatgcgtcccagttaagcttaaatgtacaacgcatggacgacaaaaatacacaaatgtcttaacaaatacacactgattttgatgctctctaggaaataacc

SEQ ID NO: 62164 - DNA, 312 bp, Arabidopsis thaliana landsberg
  unsure (1)..(312): unsure at all n locations
gctcacnnnnnnnnnnnnnnnnnnnnnnnnnnnnnnnnnnnnnnnnnnnnnnnnnnnnnnnnnnnnnnnnnnnnnnnnnnnnnnnnnnnnnnnnnnnnnnnnnnnnnnnnnnnnnnnnnnnnnnnnnnnnnnnnnnnnnnnnnnnnnnnnnnnnnnnnnnnnnnnnnnnnnnnnnnnnnnnnnnnnnnnnnnnnnnnnnnnnnnnncgactaatacccctgaggaaaacagcctaacacaccagctgaggtcatcagatgagcgatcaccgattaaggaagtggctgcgctgggacaggcagcaggaacaaa

SEQ ID NO: 62165 - DNA, 571 bp, Arabidopsis thaliana landsberg
gctctcatgttcgcaccgcggtggcggtgaccctggtggtcgacatcgcggcggccatgatggcgatcgcggcgatgcacgacgcacgcatcggcatcgcgatgatgctggcggtgaacctgtgcgccggcgccctgatcctgccgctgcgcctgtccgggttctttgccgcgctggccacgctggcgatgctgggcatctccttcttcggctggtcgctctccggccatgccggcgaccgcgacctgctggagagcgcgctgttcggcctcgcctatttcgccacgacggcgctgtgcagcgtgctcggccagcaattgcgtgccaccgaggcgctcgccgaacagcgcagcacggatctggccaacctgtcgcagatcaacgagctgatcatccgccgcatgaagaccggggtgctgctggtggacgacgccaaccgcatccaccagatcaacgaatccgcctggatgctgctgggcaaccccggcgccgaccagcgcgacctgggccagctggcaccggaactgtcgcgccgcctgtaccactggatcacctccggcaagctggacga

SEQ ID NO: 62166 - DNA, 377 bp, Arabidopsis thaliana landsberg
gaaacaagccccgcggctcccaccgcaggaacatacgaacacgaaaccacagccccacggcaagccaaccaaaacacaaaccacaagaaaaaaccccaagacgcgaccgagaaacgcaagagaaacaaccaccaagaaaccaccagacagaacggaggacagaacaacgataagaacctcgccaaaaaaccccacaaaacacacaccaaacaaccaacccaggctctggacaccaagcccaaaaactcggaaaaacgccctcacaacagaaccccatcctacaagaacgagaaaacccccacgcagagacacaaggcccaacgcacagaaacacacaacaaatgcccgcggccatggacgaaacgcaccgcgaaaag

SEQ ID NO: 62167 - DNA, 253 bp, Arabidopsis thaliana landsberg
  unsure (1)..(253): unsure at all n locations
tnnnnnnnnnnnnnnnnnnnnnnnnnnnnnnnnnnnnnnnnnnnnnnnnnnnnnnnnnnnnnnnnnnnnnnnnnnnnnnnnnnnnnnnnnnnnnnnnnnnnnnnnnnnnnnnnnnnnnnnactcggaatgtactttcttagttgttaaatatctgcgttcattgttaggaaaggcagtgactggcaatccgattcgatcaaaggaaatcttgactgcaggaataacgcttgcggagaagatcataagctgtgt

SEQ ID NO: 62168 - DNA, 231 bp, Arabidopsis thaliana landsberg
ccttacacactgccataaatcacccaccaagccgaaaaagggcccaacaaattgggaggttgataaccacctcttgggagagacacaaccgaatgcattgatgtctgtacctacgcccgctacaccttttaacgggcctaatggagcgtgcatcatatatactgcctcgcctcgttctagccaaggtatgatgtatgattttcaacctacttacatccaaagcgagaggac

SEQ ID NO: 62169 - DNA, 618 bp, Arabidopsis thaliana landsberg
ctgcttggtcccatttcggccagctacggggcttccacctggatcggctgctcgtgcggcgaggcgtcttttttttcggcgatggcctgctggtactgggcctggttgatgtagtggtgttccagcatctggccgagcacccagttgcggcgggccaccagccgcttggggttgctgaccgggttgaccgccgagggcaactggaaggtggaggcgatggccgcgcattccgggatggtcagctggtcgagcttcttgccgtagtagtattccgccgccgccgccacgccgtaggcgcggtggccgaggaacatcttgttgaggtacagctcgaggatctggtccttgctgaactcgtcctccatgcgcatcgcggtgaacatctcgatcagcttgcgcgaatacaacttctgggggctgaggaagaagttgcgcgccacctgctgggtgatggtggagccgccctgcaccttctgcccgccggccaggatcacgtgccagccagcgcgcaggacgctgtgccagtccacgccggggtggtggtagaagtccgcattctcggccgacagcacggcgtgcttgagcatgtccggcacctgcccgatgtccaccgggatg

SEQ ID NO: 62170 - DNA, 546 bp, Arabidopsis thaliana landsberg
aggatacgtatgttgagcaggcgcttcccaagtgggggcgtcagcgctgcaagcgcttcgaagcttttaagaatcactgttaaaggctgagtctgattcttctgcgcaggttcgccggctggtgggctcgccatgatgtcgctgtccatttccatctcccggtgctgcgctgtttcgcgtggtggcagtcagcgtagcaccgggagctccggtttcagcgcgcgtcatcgcgcacctgcacatagcggcgcagccggctcgatgcatagccgctcgccaatgatctcctccagcgcggcagcagccgcgcatttcccgaacccgcgtcgcgaggcgcgggcttttttcgatccccgctggagtggtgacggtaccgctccggcactgcctgcggcgcgagcggtgggctttcttcttcgcgctgttcttccatatgcgcatcgtgcggcgcgggtgtcgtctgacgaggaccggcgcttcccagcttccggcggacgcgcagctctatgtgcgctaccgcgagcatcaagccgggctcggcggctc

SEQ ID NO: 62171 - DNA, 353 bp, Arabidopsis thaliana landsberg
ctcaattctgtatcaccaaaatcaaattgattcttagagtacaaaaggaaattaggagaattgctcattttgaccactttctaagttatatacatgaacttactggcttagacctaagtacattttaggtatgggattgtttgtatcacaacgtcggactcgtagtgtttacttaattacttcaatagctattacatacatactaatttgctttaatagatacggcagagggactcgtagttatgcgttttttacctgtttaacattatataatttttattgataaaatacttgttgaattgcatttaaaaacgtcaattcaccaattttactattatacaagttagcaatca

SEQ ID NO: 62172 - DNA, 453 bp, Arabidopsis thaliana landsberg
agccccgcagccacaacaacagcctcagaaggcggagggagatcaaggagagccggctccaacccctcagggaaaaagagcaaagacgtagcggggaacaagccaccagcaccgacacaaacactagtcgagaggataggagcgtgaaggaaaaggaaacaatgcacgagaaagaaacagtgagccgcaaaagcaagagcaggacgaaggcccgcaacagctgagacccgaaaccacaggcaaacaacaccagaaaccaactatacggggaagcaatcaaaccaaggaacaagcaaaacacaacgcagggaaagagaaaagaagcaataccgaggtagttccagaacgaagaggaagcacatcgctcaaagccgcaagagccaacgcaggcagaggaaggggatacagagacgcatccaccggcccaacaacaaacaccatcacaacggcaag

SEQ ID NO: 62173 - DNA, 1933 bp, Arabidopsis thaliana landsberg
tcgaagcatccgtttgttctattcataatcttctccgtgatcactactcttcttcctctccttctctccgcaaacaggttggtttttattcttagattttcggatcaatagattcaaaattattcggaattgttagggtttatgcctgccttgacgtttactcattgcttatgtctgatgatgggtttaacttttgaggattgaatcaggaatcaaatatctttcttttattgtttttctatttcaattgtggagaaagttcatgttcatgtcaaaaatttcatttaatccgatctgtttttgtttagttaccctctgtgacatagtattgatttgattgccattgcagttctatatagttgtatctcgtgtcgctacggttcttaagacaagatatacagctactggattttgggttgctggactgagtcttttcgaagaggctgagcgacttgtctctgatgcttctgagaagaaacatttgaaatcttgcgttgctcaagctaaggagcagttaagcgaagtagataatcagccaacagagagctcacaaggtttgtgaaacatttagtttggcttttgatggttttaagtgaaatttatctggagatgatttttatttctcttgtgaattttttgcaggttatctttttgagggacatcttacggttgatcgtgagccgccacagcctcagtggctagtacagcagaatctcatgtctgctttcgcttctatcgttggtggtgaatcctctaatggtcctactgaaaacactattggggaaactgctaacttgatgcaagaacttatcaatggtcttgacatgatcattccagatgtaatgccttctcttttcttccttactagttttagattatgtactatcacacatagctgatatcacaagtttcttcacctaaagatagagatgaaagcaattcttaatcatccgcattctactcatatgttgttttttgcatattgagtttctccacttggttgtctcactcatctgtatcaagagtgtttaacctcaacctctaatattgtattggtagcgtctttttcttagcttcatgattgaaaagtgatatatgatgtgttctatgcagatactagatgatggtggaccaccaagagctccaccggcaagtaaagaagttgtagagaaactcccagtcattattttcaccgaggaattgcttaaaaagtttggagcagaggcagaatgttgcatctgcaaggagaatctagttattggcgacaagatgcaggaattgccatgcaagcacacatttcaccctccttgcctaaagccttggctggtataaaaaaaaaatcccattctttcaagcttactagtaagtaagaacataaagcttatgctcatattgttttatggcaggacgagcataactcttgccctatatgccgccatgaattaccaacagacgatcagaaatacgaaaactggaaagagagagagaaagaggccgaataagagaggaagggcgcatagaatgctgtccgcggaggtgaatatatgtacgtttaaatttcaatcagttatggcacactcccattgtctttccttgaaacatctccgaattgttgttcatcattcacaattataaatcccattttacatatagattcaatgtcttttgtatgaaagcttataataacaacacagacttctttactttacacacaattgtatcttgaagagatgacaagttcaataacataacatcaaagagtcattagttagatagactctaagacagtgttactaactacaatagtttcttcagtagaattgtaaaatggcaaacatatctgaccactcccagacatggaaacaatcttcggtttgtctagcaaacctatacagacactatcatacaacacattacacacagcagcgtacat

SEQ ID NO: 62174 - DNA, 464 bp, Arabidopsis thaliana landsberg
  unsure (1)..(464): unsure at all n locations
gccctcagcagangancganganggggggtttcattactatgagcaggcagctccgggcagtagtgtgcctccgacttataacgctcctccgaactatgttcccggagcttcaggcaatacgatttcgaatgcgagcaaccgcttggcttatgtagatgatttactgggatcgagtgtgattgcaggagcagaccttggggatcaatctgcgggtaactaccgttatgatgcgattggtcagttggttacggacatagggtctgatttggggacgtctatctcccctgagaagattctatggacagttaccaataaagtgagttttgtacagaataccaacaatggagatctgatcgactttgaatacaatggtatgggtcatcgtatttcgaaaaaagtaacccaatttggatgggaattatgagaagaccatttatatcttagatggacaaggacatgtgat

SEQ ID NO: 62175 - DNA, 821 bp, Arabidopsis thaliana landsberg
cccatgttgtcaaacacatgtaaagcattcttaaccaaacccttctctgcataaactttcagtatcatgtcaaagactgtaggagagaaggaaaattccttgaaaacccgaacgagctctccccagacaacgaagcccgagtgattaagagcaaccagttcacataaatacgattttgtctgttggtaatttctagccctggacaagatgtgaaccattttacagtaagccttgtaatcaggccggaacttttgttgctttgaagccaaattgaaaatctccagacatgcctctgggttaagcctcaatctacgcaggatggagttgagaagttcatctgagaaatcgagtgatagatcatgtaaagcttcgtacctgccaagtacgagcaaacgtgagacccgctcgagtaattcgggtcgaattcgcccgtttcctcctcgaagctcgcggcgtaaggttctcgaggcttcggagaagctacgagtatagagaaacggaagcaactgataggcaacaacgcgtgccggagaccgtcggagcatcaggagaattttgttgtcggatgattaacgctggaacccattaaacttgggacctcaaagttccgtactttggaatgtgtctaaggttttagtcgacgattgacgacgactacgtcggcgacgaagagtgagagtgtgtaaagaagaaacctttaaattggaatttggttcggttggtttggtttggctcggtttggttcgattgaatttggagagcaataacaaagaaaacactgaatctgattctgatggattttacagaggaatacaaagaat

SEQ ID NO: 62176 - DNA, 247 bp, Arabidopsis thaliana landsberg
catggtaataccagtaataatgattcgcattatctttcatctgatttattaaatgtaaggctgttggatttaaacggggcgcgacgcaaagtaatcgtaacatttgtaccccaagccggttttgaccgggtacaactaaaggtcggtggcgggatagcttacggtttatcgtggcttggtttttaccagggcccacatgttataccaaggtccggaggttcagggggggggggtgcaacaaccaaca

SEQ ID NO: 62177 - DNA, 205 bp, Arabidopsis thaliana landsberg
  unsure (1)..(205): unsure at all n locations
ccaanaacacaaaaanggaggangcctgaaacaaaccggcccgcgccgcccccgaggaaccggancggaaaaaagaggggcccccgccgcaagaaacccaacgaaaccgccgccggaaccgacaccccacccaaagagaaagacacncaaacacaccggaggcaccccaccgcacaccacaaggacgacccgacccgcaagggcc

SEQ ID NO: 62178 - DNA, 136 bp, Arabidopsis thaliana landsberg
  unsure (1)..(136): unsure at all n locations
aacaacaagnggggagggcccacagagaaagccggacccgaaaccccaatgagataatgagaaaaagaaaacacacaggaggacccgcaagcggagccacccaaaaaggaaacccgagccaccgcggccagcgaac

SEQ ID NO: 62179 - DNA, 347 bp, Arabidopsis thaliana landsberg
  unsure (1)..(347): unsure at all n locations
gcaacaagcagaaacgcgcaaagccggggaggcaatgaaacggccccggcgagccggccgcacaaggaaaccagaacgcccgcgcacgcggcaccgggggaccccagccggcaaacaaccagcggcaccgacacaggcgaaacccacgaacacgacaagccggcaccacgcaacggaaaccagcggncgaccgaggccgcgagaaacaaaagccgccaaccacggccgcgaccagcacaaaagangcccccggcgagcaccccgcaaagggaacagaaaaccgggacgcaacaggaaaacnangaggccggggcaccgccacacaagggcgcggagagcaaccgcgc

SEQ ID NO: 62180 - DNA, 741 bp, Arabidopsis thaliana landsberg
  unsure (1)..(741): unsure at all n locations
cactatactcaatccgntttgtttaaaggttttagtcactacactcaagtactagatcgttattctcttctgtatcatttacgggacaacaatgaaaagtcttcgactatcgtgtctttaaacttgtcgtctggtcaaagaaacaacacatgctctgatgctcatattaaagtacaaatagtacgtatgcatgtatacaagttacgatgtgtgtgcttgatgcttgcatttaatcaatcaaagcaatttatatagttcgtaaacttgatgctaaacatgttgggccgattatcctcgtaattctcaaatcggataatgctaagttggcttttaaacttggcaagtcttttattgggctttactaatggattcatagattagtagttactctaaggccttcttattaattcttattaagatcataataagatcctgaataggagtatcaaaataagaaataatattatcctcaaccattcactcttgttaaataagaattattaatttattttcctactaaccatatatgaaaatgacacgaaataatattataattacattatgagccatcgtagttgagattagagactaatttatgttttagacgttattatacataattaaatttgagacccagtcaaaaacttcaaaaagtccgacttgaatacccaccgcctttttctcgccacgcgtatgacctcgccgtgttttttactctttaaaatttcgtttcatttgtcc

SEQ ID NO: 62181 - DNA, 725 bp, Arabidopsis thaliana landsberg
tggaaggccgcgtcgcgttaatgtaacttggaatgggtggctgaattggaatcactgcgcttttttttgtgtttgagtccttgaccgactctgccagcgattggagtaaacagaactcaagatctcgcatattacctagctagcaacggtgtttaactagtggctacagagtctctgcattttgcaagtaagtaaaacggatgcagagaaaggaatttataaacctccacaggttttcttatttcctttgggaagacgcatgtatgtctcaaataaacatggcaagagatgaaagtcagagtaaacaacatgacaagtgtgagtcttacaagaactgtgttgtccacatgctcttttgaaaggtcccaacctggatggtcctctcagttcagccacttcctgatcaaacaattaaccaagttttgttttttatagctttcagattattgatatcgtgtgttaactcaattagacaaggcatcttgagcatttcacacctctaagtgtattattagtttatgaccaagcagaacgtataataagattgcttgcgtaaataattgtccactaaacaaagaacaaaattaaaatcattattagaattggaagtagatgagacaaacaccaaatgatcacatgcacaagcgaattagtcaaccaaacattaaataatcaaattgcttatatctatttggaaataaatacaaatcttacgacgacccccg

SEQ ID NO: 62182 - DNA, 235 bp, Arabidopsis thaliana landsberg
  unsure (1)..(235): unsure at all n locations
cgaaagggacaacaacacccaacaccagagcgagaacacgccngaaagcggaaaagaagaacncagaccaacaaaaggaaacggaaccnagaaaacaaaacaaccaaggangggccccccggaggaggaaacgacccncaggagacccaccgacggggngagggcgaagcaaaaccacaanccncaagggaggacgggaggcccaccacaaacaaggagangaaaacaggcaaac

SEQ ID NO: 62183 - DNA, 605 bp, Arabidopsis thaliana landsberg
  unsure (1)..(605): unsure at all n locations
ttggggttttcaggataaatgtagtaaccaaaatgattcttcagagcgtattaaaactacttactactaactaactacacaaggaagagacctggtcaaagtttttgcagagatgaaagccattgctccatgtaattcttcccatctgcaaatttgataagaatgaattcagaaaagttttcactttggtttaggacaaaaactgttgaaacatcaaatagcaaagactgtggacaatttgcacatgggatcaaatgtgaaaagaaacctctaaagagagcaactttggtagttcactaaaccaaaaccacaagcattatatccaatagatcatcaatcccaagagagaaggctatggtaattcactacaccaaaccaagaccacaaattangggtgattcataccaggaggcaaaccattggggagattcttgacagcactcaagagctggttattattattactagagccttcaacaacagctctataacaaggaaccaacactaagaagccaccatcatttccttcatcatcactttggaaatcaggtccatgtggctcagtccatccaacagaccattcaggtccatcaccagcaacaaca

SEQ ID NO: 62184 - DNA, 330 bp, Arabidopsis thaliana landsberg
acccattcctgcaaattatttggttatgcaacttatattctcgaactttttgaaaatcactagatcttagaaaaagctcattgaaattcagcttccagtgtttgtcttgacagattaagttgttctagaactaattgaatcaaagttgatgatatattattctcccagtcaagagaataaatggagctagaattatatctatagcagtgagtctccatcaccgtaatcggatgcgacactttcaatgccaatgtatatcatgattcatatctggcacatcaaattatataacacaaaaaatgcatttttatataaacgtggttaccaacc

SEQ ID NO: 62185 - DNA, 559 bp, Arabidopsis thaliana landsberg
  unsure (1)..(559): unsure at all n locations
gttcgcgctgttatcgtacgtgcgggagcgaatcgcgccgttcacgtcgagcgtgttctaaggcgttgtcgtgccgatgccgactttacccgtcgcatacgaaatgtccgaacccgataaggcccacagctcggacgagggcgtccacgcggagccgttccacttcagcacgtgaccggtcgaaggcgccgccgaagcgacgtcgcgattttgaattttcnnnnnnnnnnnnnnnnnnnnnnnnnnnnnnnnnnnnnnnnnnnnnnnnnnnnnnnnnnnnnnnnnnnnnnnnttttggcactcgtacgcgtcgctgaccgcgctgtagatcatcacctgcgtcgtcgagcagttcgtcggaaactgcgccaagggcggccggggttttgaaacccggaatataaaagttgggcaccgtgtatttcgagccgtcccagcggaggagctgacccgcggccgtcggagccgtcgagtcgacgggctgtccttggatctgcgtcgtgttcgtcgccgttcccggcacgtttccgacgagattcgcggtgatcgtgcccgcgtg

SEQ ID NO: 62186 - DNA, 652 bp, Arabidopsis thaliana landsberg
ttttagggtttcgaatacccaactgcttgtcgttttaactctagactggaccgagttcgctacctttgtctcgccttcggcctttttctggttcttcacttctgacgagattcgcttttaccagagagagagagagatgagaatgacatttttgagttatctgaagcaatggcgtggaacagcgaaagaagcattcgagaatgtatcaatcgtcgccaagtttctctgtttgcttcatgtcaccgatcgatacataatctccacgacccacgtctgtaattgtttgtgacctaacgagactgaatctatttctctttcgtattctccaaggaatctgattttgtttgatttgggttttaggttcacgggccgagcatgcttccgacgcttaatctaaccggcgatgtaatattggcggaacatttatcacaccggtttggtaagattggactcggtgacgttgtattggttcgatctcctagagacccaaaaaggatggtgacaaagcgaatcttgggtttagaaggcgatagactcactttttctgctgacccattggtcggtgatgcttcagtgagcgttttggtatgaacattgaccaatctctctcttaaaaattcagtcttttggtgcatttggtaaaaacaattga

SEQ ID NO: 62187 - DNA, 747 bp, Arabidopsis thaliana landsberg
tacttttgtttttattgaaattactttgaaaatcttaaaggtcctttaaataatttcattttcttataaataacaatagattcaaaataaaatttctgggaaccagaaactaggaaaaaatatgatgtggatggatcacaaaaaaaagaagaataaattacagaaaaatgaagaagaagacgtgaatgcattaaataactggatcggttcaatacacatcaaaaaatttcgaaaatgcataaaaagtaacctaaaagcctatctacattagacatcactgacattctcatcttctctggacaacaagcccagaaaacaaaaccaaaaagttaataacaaaagccaaacataattagaaacataaaaaaaattattaatcaaggaaacaaaaagtaaagatttaaccagaatattcatcttcatcataacaacattagtgctaataatgctgatagatacttatcaaaaataaaacaaagacactctcttaacgtgtagaagcagtcatgagattcaaagcaagatcagactgatccaacacaagtctcgttttgcttgtttggtctgagaaatgatgtgatctcttcttagaagaaggcaacgaaactccaaaaagctttgtctttctcatattactctgatcatgatgattagtgtgatcatcttcaagaactgtaatagagctttgtgaagttggtggaaatgagttcaaagcattgagattagtggcattgacagtggcagtat

SEQ ID NO: 62188 - DNA, 478 bp, Arabidopsis thaliana landsberg
  unsure (1)..(478): unsure at all n locations
aagagcaaaaacaccnngggggaagagagaacaaccgacaacgaggaacaaccttccagattatcgaacacccacgggaaccacaacaaaggagaagcgggccaggcccaaagggccacgggccgaacggaggacaccgagcccacgagggacgccagaagaggaacacgaaccaagacagagagaaaccagcgacagtgagacgacaaacacaccaaacagaatcccaagaacggcaccaaagccacaagtgaagacaaacacaagcgccagcagagagctcacaaagagaaaggggcaacccacatgagaggcccaggcccagacagcgaacgaggggcacaagaagcaccaggccagaaaccacagcaaagaaaaacgcaagacccagagaagccaaaaaggagaaaaacagagaagcccgaaccagaacaaaaaaacacgactagacgaaaaaggaaccccaaaggcagggccc

SEQ ID NO: 62189 - DNA, 1595 bp, Arabidopsis thaliana landsberg
tcatcgaaccagctcacggaatctgtctctaatggctcccgcgttcgtgttgcgtatcaggtaactaattcaaaggaactgaattgtttctgagagtcataatgttttgggactttattggctaatgaatgattctccaattagggagtacgaggtgcatacagcgaatcagctgctgagaaggcttatccaaactgtgaagctgttccatgcgaagagtttgacactgcttttgaggtcagaatctcgttcctttactgatcaagactgaaatgatcagtatttcattttcttaagttttggttgccattagtcttgctttgttcttgtttaggcggttgagcggtggcttgttgacagagctgttttaccgattgagaactctttaggtggaagcatccatagaaattatgatcttctgctgcgacacaatttgcatattgtaggcgaagtcaagctagctgttcggcactgtttgttggctaaccacggtgtaaatattgaagatttgagaagggtgcttagccatccacaggtatgccacatacctttgtgcataatcgagttctttttctcttggcactatttaaacccttcgtcgttgctttcgatcaggctcttgcccaatgtgaaaacacgttaaccaaattggggttggtcagagaagcagtagatgatactgctggcgctgcgaaggtatgttttatgttcctagtatgtttatatattcacactcacaacttacagtggcagctaaataagtttgtgaatttgattcgcagcaaattgcattcgaaaatttaaatgatgcagctgcagttgccagtgaaaaagctgcaaagatatatggtttgaacatagtcgctaaagatatccaggttttaaagactttccgaatgccttttccaatttttcatccatatttttacacttctgctggattatttgattgtgaagttcaatcaatttaggatgactgtgataatgttacaaggtttctaatgctcgcaagagaacccattatccctggaactaacagactctttaaggtgagaaatccagtataacttccatctgcaaaggcaactctaatttctggcaatgtttttttttctctgatggaatgagttactttgattcttgtagacaagtatagttttctcgttagaggaagggcctggagtacttttcaaagcgcttgctgtgtttgcccttcggcaaatcaacctcacaaaggttttgattaacacactcaaaatcttccttcattatgtgcagccttgtttccagtcccttacaatcaattttattgtggtttcgatcagattgaaagccgccctttaaggaaacatcctctccgagcatctggaggcctaaagtaatttctctcacaaaccactgttaagtctataccgtacccagagtgtctgagcagtgatgaaagtgtctctctttctgtgcttgacagatactttgactatcttttctatgtggactttgaagcatctatggctgatgaagttgctcaaaacgcacttaggcatctcgaggtaaagcctttggtcacttgatctgaaaacatgtacatgtgacta

SEQ ID NO: 62190 - DNA, 308 bp, Arabidopsis thaliana landsberg
aaaattgataactaaattgttccataacatttgtcttaatttaagaacctaactcaaaactgatggtgaagtattctaatttgtaacaacagcataaatatctgtttttaccaaattataataatttacactcataacagaaacttcgtctggttctaagtgtaaccgaactataataaacatctctcagtaggcccatgtgagtccaacaatgttcctccggcgcttcttcttcttcttcttcggactcgttccttcttcctggtcgtcttcatctacctccttattcttctagctcttcttcttct

SEQ ID NO: 62191 - DNA, 547 bp, Arabidopsis thaliana landsberg
gattatataatcaataaaaagcacattattccaaatttgaaaattcaatataatgatgtttagatcaaggttatttgtattagattagtaacaagagtagtaacttcatactgttttttacaaaaaaaaaaaacaattagaaaggtttaattactaaaatgacacggagaaatccataatacgatccagtaagatgaacctttatagaagaaactggcgccggattcaaacttcagaagtagacccctttgtcgttcccctcttttcttggtaaatacgtctaaaacattatctaacacttgaatgtgagcgtgaaaatataaacacacgatgcaagacgttatggtttcgaatttagaacaaatcaagtgagtaagagtatgatgttgcttcttcgaaaatatcgaataatatcttattgttgatggtttagacctttatcagaaccaaagagccattgatcaaaaagcctctaaacaagtcaaatcacaatccaaaaatatgatctttacaatcaatttcattcgaattacggttttcaataatg

SEQ ID NO: 62192 - DNA, 276 bp, Arabidopsis thaliana landsberg
ttggtgctgcagaatcaacaaaatagtttcatggttagacaacatttaagcatcggcccaacaagggagacgttcattagggagtcacataaaaagaacttgtgcaccaagaacaagactgtgctacaccgatatagaagatagttattacttctcttttatcgcagtatcaaagaatcatcaatcatccccttctataagcttatatttggttacatatatatactagcactggtacgtcatgataacgttatgcatctcctaaccacaagttgt

SEQ ID NO: 62193 - DNA, 1581 bp, Arabidopsis thaliana landsberg
aagtggagtgtataaaaaaagtaacatgcacaggttgcgccaaaatcaaaattcaaaactcatatgtcacttgcaattttcctcactttgtgcacaagttgaagacttatgaacaccctttttaatcaaaacaaatggttcagcattgaatgtgaagcagcaaagtgtttagacagcatttttcaatcgtaaagaaagcaaattctacaggaaaacaagaatcatatgctaagccattacctaactagtccatctataaaagattcacacctcaaaagacataattcgcagcacaaatttcaggtacagtgaaaatgatcaagatatcgagaaggaaagaggaggcttaccctgagtaatagtctctggggatatagacatctctcacaggtccaaacctctcaaagggctcacgaagctcttctggtctacaaaatcaaaaacaacaaaatcaacaacaacccaacgaaatcttcaaagataaactaaaacaaaatcaaaactttaaaccaaaggaagagaatttacctgcaatcaagaggaatgttacgaaccaagagacttccatggctagatcctctacgtccaccaccaccaccaccatatccacgtcgaggaggaggaggaggaggacttctacctcgacgacggtatcgtctcctcggaggactgtaataaggcggactgtatctcctcatcacgtaccatagaaacaaaacgatttcaacgcaagatcctcaatttcatcaaaacaaaaacttgtttcttggaagaacagtgataaattagggtttacggtcggaggattgtggaattcacctgcgacggagttaatttgatcacttgagagtagcaatgttcaaagacagatctgaagtgaaccctaagcccttcttatgagagatcagagaatagagaagaagaagacagatctttttctattgatcggagagcttggcccatttattaaatgggcttttggccttatcgcgttttttcctttttcgcgtatgtttttttaaatggaaaaagggaaagattgttgattgttgacaattagagaaacagtaaaaaaaattggggaaaaaacagttttagtaacttttaacatttatgacaaaaacaaagtaacccttaaatatataagtttactgaggtgacttgtgttttggagattctcgttctaaattgatataggaattttgaaaacctcaaattgagttagttcttgttctaaaatagagacttatttggctatgttgaatagttgttgatattgatttaactcgagatccattttggcttaattaacgtaaaatttatttatttctggttgatgacaatgttcatggaatttgatatttatggtattttgtgaacttcggaattgatattaatgttacattatgagtttgttgtactattctgtctgtttttggctacaagttatttattattcaatcatcaactatactaattaaagtcattttcataaaaacaaatcaacttgacagaaattagttacatatatagtaaactaaaatgttagaagagagcggcattgatcactaccacattttg

SEQ ID NO: 62194 - DNA, 807 bp, Arabidopsis thaliana landsberg
tgagtatattttaaaaaggtgtaaataggctaatggaaacatcataatgataattcattccaacgccacgccttaacatactttgttagctgttattattagtaccatctatggcccaaatgcataacatacactttcatgatcttgttgtttgtgtataaactatactagatatagtaagttgtgtgtataataataatattgatattactaaacatgatcaagtgcatatactacgttcagtaaacacaatgacacatggatagatacacatggatagagacacatggatagatacatatgtatacaaaaccaaaacggctagaaattgaaatgatagacgatgataatgcaaatttagacatttattagtgatatacacatatatctagtgtattgtagacacaaatagaaagatgatgatggacgttcagtcggttggcttttgagctaattagtagctaaatgttttcttttggcagagagctaagtaggtaaagttactgacatagttggcgatgattgaattggtttatacagttcaatacaacacgttaaatatatatatatatatatatatatatatatatatttttttttttatctcaaagtcgatcgaagaaacacaaaaaaaatatatacagtatatatgtttgtttaaagatataataattcagaacgctcatctggaccaacttctcccattgtttgtttaaagatccaatacgaactcaatttctctttaatgaaacccaaataaaaaaacttgttgaaataaaaaacaaggaaaccccacaaaagcgatcc

SEQ ID NO: 62195 - DNA, 611 bp, Arabidopsis thaliana landsberg
tattcaaagttataacttaaatcaaaaacacatgtaaaagatatcatctgttcaaagtcataacttaacttttcacacacataaataggtaattgtaaaaagcaagtggttagattctgttctttttgcatgagcttaccggtccaactcaatataggttatatctttttgacgaccaatatagaagataagctatctccaaaaataaaattacatatatataataacatgtattgaattaaatactatttgttcttttaaagtcaaacgttttctctcccttaattaaatgaaaattcacgaggagagcctagatttagggtcgtcagaaaatagaatacatttaacatatgcttattcacacctgtagaacaaaaaatagtgtttatgttattatcacttgactgttattttctggtgattatttaaaaatttcaactagttggtcttaaaatatttgcaaatggtacgaaaaatctaaatagctgtatctgggagcaggaaaaattaatatagctgtatacaagttataaaaggacaagtaatatattacacaatttgaaaaatgccaacacaaatttcatttaataggtcatgatcatgtatctttc

SEQ ID NO: 62196 - DNA, 186 bp, Arabidopsis thaliana landsberg
caagaaaacaaaaaaaaaaataaagggcgctcgaaccccaagaagataaagaaaaaccacagaggaacacggaaaaaacaccaagaaacaataaacacctttaccgttaggacaaacaaggcaagcgacaccgggaagggaaagaccaaagagagccccccgaagaaagaagcaaagacaaaggaa

SEQ ID NO: 62197 - DNA, 726 bp, Arabidopsis thaliana landsberg
gaagaaggagaaggagaagaagaaggataagaagaaagatggtaataactctgaagatgatgagtttaagaagaagaagaagaaagagcagtgcaaggagcatcatgatgatgatgattatgatgagaagaagaagaagaagaaagactataatgatgatgatgagaagaagaagaagaagcattataatgatgatgatgatgagaagaagaagaagaagcattataatgatgatgatgatgagaagaagaagaagcattacaatgatgatgatgatgagaagaagaagaagaaggagtatcatgatgatgaggataagaagaagaagaagcactatgataatgatgatgatgagaagaagaagaagaaggatcatcgtgatgatgatgatgagaagaagaagaagaaggataagcaccacaagggacatgactaaaaaaggtttatgatttgggatttgcattcttatgactaaataagtaacaacaacttaagcacacttctgctctctacgtttatgtcaattgttgttttgtttttgcttcgtgtttttgctgctaacttcaatgacatcttcataagtcatatgtaatatgtttagtgtacgtgttttctagtgatgtcgtttggtttaacgaatccgcctactactttatgacccgtaaatgacctacggtttaggcggggtttactcagccgtttgaattcacgggttaagttatctcg

SEQ ID NO: 62198 - DNA, 362 bp, Arabidopsis thaliana landsberg
aattcgaacaagccatcaattttgagaatcaaattaaggtgctgtcgaaatcttggtcttatatttctcttttgagggtgcgcttacatcttgtgtgtgaatgtacaagtttcttttttctcactgcagatgcgattcaagcacgatgaacatgtctataaatctttcttggaaatcttgaatatgtaccgaaaggagaacaaggaaattaaagaggtgtacaacgaggtaatatacttcatctcacctgtaatgccactccaaactttttctaaccttcgaatatctatgctccaggtatctattctttttcaaggccacttggatttgcttgaacagtttactaggtttttgccagcgtc

SEQ ID NO: 62199 - DNA, 599 bp, Arabidopsis thaliana landsberg
tcagaccctcctctacttcatcaaatgcaagtggaaaaggttcgtttgatctttgtttcatatttttccttgttctagtttttgccacgtatctcaattttgttcccgctacaactttttatcaccaggaacgccgacgagaaagggctgttgctctccgcggtgattatagtgttgaacgttatgaccttaatgatgataaaacgatggtgaagattcaaagagagcagcggaagcgccttgataaggagaacagggcaaggagaggccgtgatttggacgatagagaagcaggtcaagataacctacaccattttccagagaaaagaaagtcgtccagaagagctgaagctcttgaagcatattctggttctgcttcacattctgagaaagacaatttgaaaagtaagctaactcctgtgtcaaacatttttttatttgcttggtaccttttctattttttaagagtcccaaacattggacaccttaattctttctctttgagagagaatttattttccaattttggttgcatggtgatctttaaggtgcgaagatctgcttctgttttctaagatgtttactttgtgttaggtatg

SEQ ID NO: 62200 - DNA, 446 bp, Arabidopsis thaliana landsberg
  unsure (1)..(446): unsure at all n locations
gacttgacgccggatgcaagtgtgtcggcacgtccgaccccatgcaacgggcagtctcgcgccggatctggcatgctggcgcccccgtttccgccacgcacgcccatgcagaccttcgtttacgccagccaccgcaagcccgacacctacgtgtggctgcgcgatcaggaccgcttcgacgtgctgccggccgaactgtccgcgcgcctgggcgagctgcgtttcgtgctggccgtcgaactgacccccgaacgccaattgccgcgtgcggatgtcgccacggtcctggccgacctgcaacgccagggctggcacctgcaactgccgccggccgacgccaccatcggctgattccggcaaacaccgtgatttaacggccagttaccgcgatgcccggtttgcccacctatactcgccgcatgtnctcgaccaaattccgccaaccg

SEQ ID NO: 62201 - DNA, 705 bp, Arabidopsis thaliana landsberg
aatgattttagatataggagtcctgatgttgcttggtccaccacatacacaatatagtattaagaaaaaaatttttattgacataaaacaacatatagaaaaattcaaactttttctaacaagaagctaacaagatacatggttgagatatcttgattaaaaagatgattttctattacttctaatctccaaaaaataaaatatttagaaagtgaatctgttttgaaatggtaaattatattcattaattactttaacatgttatatcgaagacgaaatgagtgaactcgaagatgatttcttgaatatataaaagtaaacaaacaaatcgtgagaaagagtagaaatgaagggtctaaattttgttgatatccgttgctctaaaaatatttgtagtatagtcttgtattctctagattgtcaccaataagcctaattaacggtaacaaagaaaccgtacgtgttcatataacggcatatagaaggctattcaaaaacagaaatgacaaaatcaaagctataaatatggatgtacatatacattgaattagcatccataaaataaaaaatagtacaagattgaagaattgcatgaaatacgggtatgtatatcacaatactaaatcaaaatcgaggtctgtgtcagctttatgcttacatagttacatgcatctatctatggattccaaccaatagaaaatattt

SEQ ID NO: 62202 - DNA, 1211 bp, Arabidopsis thaliana landsberg
acgtcgattattcatgcgaactgcgaaaagtgcaaagaaagttcccagcaaagctaacccaccaaccagtaaaaaggtacttcctgctcctatgcctttcttcttctttttgaccttctgagtctcaggtctgggaaaattcataatggcacttgactctgttgttggatagccagtatcattttgtatcagtggtctgacgtccaatgggaacttccacggtttatagttgggctctacatggaacttgtttccccaaatcctgctcaggaaaacaccaatgattttcatgagtcataggtgtgtctgagccaatttatgagaaggggggaataataaactcaccacagatgaggaatggactgaaaatgacttgggataataccactgaactggttatcttcgatgttcctgaagacatatgtttaggtcataaataaaggaagttcaatgaaatggaaaatcaaagcacaaagagagtgaaactacaggtcagctaaaggaagatccgcgagatatatgactgatcctgttaatctgttgttctggaggtacctgcagttttgttatcacagcatcaaaactgttattaggttataccaacgtgcacaaagcagatagcagatataagaaaccagatacttacagtgaagtcagattcattagagtcccaaaagagctcggtagatctcccgtcaggttattgaatgacagatccctagcaaagtcaatatttgaatatgaatgggtatcttgcacctatatatggtgatgaaagactaacagaactgaacagaagactcacatttctttaatctgtaacccagaaaacacatttccaagaggtccagataatgaattatggctcaaatttctagaagacagaggaagccattatttaacaaatcagtataaaaggaaagcaatgtgatgagatatttcaaagatatccatttggaataagccacttacaaagactgaagagatgtcataagaggtaaggaaaaagggatactttgggtcagattgttgtaagccatgtttctgtaatcggcaaacaacgaaaacactcgtgaattgcactggaatgtatgcttaaaagatgaatgcacttgcttaaacacttacatatgagtagcgttaggaggcaagccaaacggaatttcaccctaaaggttaaaaagcatcatccataaacaaagtaagaccaa

SEQ ID NO: 62203 - DNA, 821 bp, Arabidopsis thaliana landsberg
gcgatatatcgataatctcaaagttagtttctttcagattggtactaccaatgcaaattgagttcgaacagaatatattttagaaagatcataccaaaagttacaaaaccggcattagcggatagtgtttctttaggagctccctctaattcctgcggtgcggttggagaccacgaacaagaaggagcagtattaagcgcagcagcacgcctcgcctctacaaattcctatatcattatatccaaagtttcagtactacagaaatcaaaacctgtttgaaaatttagctttgatcattttgtcaccttaaggaaagaagtcgccagaatcgtgtctacggagtctttaaatctcataggaaatgccacagtgactttatccgcctgtgatacacagttaagttctctatcactctctagattcttactaatcataagaacctacttcaatggctacatacgaaagacctatagagtatatatatacctgaggcacgaggaaaaacgtctcgttaggtctatgcataattgctacaagcctatccagctcaggagcaaccgtccttgaagctaaatgcttgaaaatgatttttaacggtgcacccatcaccacttctctaatggaagctagcttcgttaataactctgccaaaacatagatactttctattagagaacaaaaccaacatctaaatcaaaacaacatcttatcaattagagaaagagactcgtttaaaaaccttcatcaggacgaactttagagaaattgagcttgagggttaaactaaaaccatctctaggaggatcaagtatttgaaaacc

SEQ ID NO: 62204 - DNA, 925 bp, Arabidopsis thaliana landsberg
caaatactcgaacgatgtgataaaattcacacctgaacatggtaacgaacatcatcaaattcaatccattgataatctagctccactgctttatcaagactgaaccaaaacataaacaaaatcaagcaaagtattgaactttggttccattctacaaaacccagttcttccaaaatgtttcagatttcttcacaaaatcaaaatcaaatcgaccaaaataaaaaatgggtcttattgtagattaggtaaaactaagagtgtacctaattaagaattgaaaagcacttacttttgagctcgcgtcaatagcgtttgaagaagaaaccttgaatgtgactgcaatagtatcatcgattactttcttacgatatctaaaggagttaactgaatcacagagaaaccctagagcctttgagttcttctcacgggatctaatcggagaagaaagagagctcgtcggagacaaacgaagacgaccgagattctctgtcacagcttgaacgtttcttcgataactttttggaattttactaatttgttcaattttattactcagctactcagctaagtgtaacgacgccgtttcgttatttctgtactttatattttttatgaatttaaatggcccataggcccaattatgtaaatcctatgtagtataagctgagcccatttcataaatatccaatttgagcttacccgtttcaaaaatatttaatgctgcaaatatctgtatgtttgttttgacagtggcaaacgagtagtgtttccgagatttttttttttccttcggatttaaccatttgtataatgattttttctccggcttttgatcatacctggctatgtagattgtaatctgccgaaggtttttaaaaaaaaaataagcacgtaaattcaatgatattttacattttagattcca

SEQ ID NO: 62205 - DNA, 393 bp, Arabidopsis thaliana landsberg
atatcactaaaaatccctggaggttaatagacgaggctacttctaattgatgaaacggtggcttcttaagaaagccacggaccaaggcggatataatgatacataacttgatgctagaacccaattagtatactatgacccttttcgatacatgatcattaatacttaaagagcataaattaggagcataaatcacatctcaggatagagcaacctaagggcagaaagaagagactatcttgaaactgaacctatttagcgactgagagagcaccccaaagacttttgtatccatccgacatatgatcaccgctaagtgttcgacgacagcgcaacaagagataagtgtctcgcaagtggcttcattgggacacatattatctattaaatgca

SEQ ID NO: 62206 - DNA, 1241 bp, Arabidopsis thaliana landsberg
caattactccacaacctatcgattatagtagaaatctcgttcatttgaaactattcatttcaaatccttgaaaccgtgggaaaaaagtgaaatttaagaagacgctgaagcttcaaaaaaaaacaaagttaggagataccgtacctgaccaggcgtgattggctgagaatccgccattatagtggatccacgaagggatcttcaatcaaaaactggaaacaaaaaagaagggaagagacagggagagtgatttctactccaccgtcggatctaaggtaaggcacaggatccgaaaccctagaaatacaatagcacggaaggtgcgagcaaagaagaagaagaagaagaagaagaagaagagatctgaagtgaagaaggtgttgcttcaaggatggagaaaatggcgggtgcgacgtcgttctcgtcaagctcacccaaacggttgttggttggtttggcgaatgttctcttttctggtccgttcggtttttttgcctttctctactaattttaagaatcggtgattacaataccaacagaaaaaaattgattactgaatgattaagtaataactagagagagacgtaactattatagattcaaagtaattttaattgttagtgttaagtttcatatacattcaaaataaaacttcaaatttattttaccacaaattttactagacttgcactctccgagaaagtcacaggtgaatgtaaccaaattcatacctttccctcttcatctcctccaccaacaaatcaaataacgaaccggaatcttccctgccacactgtaaataatcgcttccggcaagaaattccattagctcaccctcgatctcaatccagctgcatcctggtgtcttaacgacgcctctgtctctcatcaacgccctgatcttcgcagactcatcccacatcttcatatcagctaaaacattagaagagattacatagtttcctgcgttcttcgcctctttcatctccatcaacatcctcatcgacttctctctgatcgcaacatcttttctcttatgacatgctccaaggatcgctgctaacatgatctcatcaggcttcccaggaaacctctccatgaactcccaagcctcgactaacatccccgcacgagacaggagatcgattatgtttgtgtaatgctcgatatttgggaccaacccgaacatagaactcatctcatggaaatatcgacagccctgatggaccaaacccgcgtgc

SEQ ID NO: 62207 - DNA, 1116 bp, Arabidopsis thaliana landsberg
  unsure (1)..(1116): unsure at all n locations
tatatagcatacaattagtgggtttaacaaatgtaccctcgtattttatttatgttatgaatttctccatatacatttaatttacacatttttgtctatgtttgtaactaatttattgtagtaattttctctctggtgtttttatatcttaaagtctaaacgcactagggtattttgcatgacataagctaaaggtaagaattgacaaaccttttatactcatttgctattgaaatagaaacaaatcgaatttagcgggtgattcnnnnnnnnnnnnnnnnnnnnggacttttgtttgaaaaaggagaaattgaaatttggtgtcaaagtaacggatctgattttgaaaaagtaaaatttacatgcggtaattggtgacggtaaaaacggcaaaatattttgtatttttttttttcggcaaaatattttgtaatattaccaacatttgcaaaaaaattaaaatgcagagatagaaaaactctttcttcgacttcaaactctcattaaatccgtagaggaatagttatcttctagaaaccatcgaattgttacaaaaccctcatttgattaatgcgttcaacattttgaaaatctttttatttgtgcattaatgtgatttttatttttgatcttactaattatataaatttaaaaattattatataattccggcattcaccaaggtcatattttaaccaatcagaacccgaggatattaaatttgttggtcccgacaataaaagaaaaagttgtgggtcaaactggtcctaaataatagtcaaacttctcattttttctaagaaactgatttgataaaaaaaaatatcttcgttgaagtgagggtgactagaagtttctgctttcatcaattaaaggtttacgcgtgaagcagatcatcaggttcttatagatggtgaaaccgatcatgatatattgcttcagctctgcatagccactgattgagggttctttgaatctgaacttcttatttattgagtttgcacagcagtggcggcttcacacgatcagttggatcagatgagacttatgccagagtaccggaatatatggcactccagactcatgggcaccgtcaccgacgacactccctgtaaa

SEQ ID NO: 62208 - DNA, 1576 bp, Arabidopsis thaliana landsberg
  unsure (1)..(1576): unsure at all n locations
tttgtccttagttgactatataatgatgaactgattgttcgacaagaatactattatcacaggaaactgatagctgtaaaactaatgcacaccaacctctccttcgagctgatcaagtatttggaggactctttgatggtaggcgcgttcagattcaacctgtgatcaggaatgaaaaatacagttgttacatatgggtaagtaaatcaaagttgacctagaaatggatcttgtaaccaatcgcactaccattgaaagaagtcgttcaagagtcaatttctgttgttgatcttcaacggaagctaaagcagaagcagcttctttccccaatattgtcatatttgattttaggtcgtgaagttttgcttcagcagattccagtttcatcaagatgtcaggattaccttgagactctctcgcctttgcttggcgtctggcaacttctgtagcctgtttggattaaagcaggcgcataagtaaagttctatcatgcgaataataaaatgactagttcttggaagaggaaaaaacccatattctactaacggtaattaaatagcttcatggtattatctttcaccgtacctgagcttcagcttcttggcgcattctgtcatagcgttgagcaagatgtctagcatcctccaatggagctcccaaaaccattgcccgtaatggctcagcaacctaacaaattcaggattgacatatgattgtagtagccaaaccgcaataaagaaagaaccaagtgaacaccatgacattaattgacttttaaggagtatgtaacaaattattccagataaaagaaatagatcttcccacaaatggcagtcattccactaacaatggcaggaaagtaattatttgtgtagttatattgcatgcaacagatatgtgctattgcttaacactttgatggaagatgagaaagacaaacctgtgtaccaagagccttcaacatatttccacgttccttctccatttgtgctcgagcacgcccatagttcagtgcagcccgtgttaatacgttaccattcgtacatgtattctctgaaccatatttcctgctatcctcagacaatttcgtacctgatgaaaaatgagtgcaaaatgaaagacaggcctgtgagccaattcaagtctataacagacataaaaaaatacaataagttaaaactcaaagggtcaaaaaaatcacctatttcaacttgttttgaccctgtaactatataaccttccacaccacgaacaatatctctttggtaatgctgaaaacgaagaacgaatgagtccaaaatcaatagtaatcaaaacttcaaactagtcaaaagcttaagaaaaacaaccttagcagcacgagtggatatgtaaagcttttctagcttctgatgctgattgagttctgcttcatcagctaaaccagagccatatccccctcctccaaattgcttaaagacagccttaaccattccacaaaaactaagtcagtgtaaaaattaacctcaaactcnaagaacacaaaccacccaatctcagtggtaacttggaaacatgtagcacctaatatgtaaat

SEQ ID NO: 62209 - DNA, 422 bp, Arabidopsis thaliana landsberg
gccaagaggacagaaaaaaaaacaggagaaaagatccattacacaaacacgagcaaagcaccaaacggggaacaaaaacaagagcaacacgggggcacgcagcaacgaagcgggcgcaaggaaaccaaggagccagggaacaacaggcgacaacgcaacaaaggcccagaaaacaaacaccaacagacgagcacaagaggcagaggcagcaaggacgccacaggagaaaccgcgacaaaaggcacagcaaaacaagcggggggcaccaaaagcagaagacaccacggaagaaacagacgagaaacggaaccgaagcgcggcaacaagaacaaaaaaggacgaacggaaccgggacaggggacgaaaccaaaccagggaaacgaaaccggaccagggaacaggcaccaagagagaagcgcaag

SEQ ID NO: 62210 - DNA, 298 bp, Arabidopsis thaliana landsberg
acccccagactttaatcattcgataaatcccgaaaatacattcttaacagtaagaaatacataaaagggtcacaatatagagactacagaacgttttaaagagaattgttgagtcgagtagaattcgatagagaactaacttcaaattgaaaaatgatgcaaaggagtttgagattggctagtatcatcgatccagacaaaggtagtggagaatgtgaagtgatccacacgtgatatcgaggaaaaagggaaaataagatttactcatagcgatcttgaaaatattggaagaatgtcc

SEQ ID NO: 62211 - DNA, 974 bp, Arabidopsis thaliana landsberg
gaatttacctgagtttatcggtgttggtcctgcttcctttgtttgtcggggcctaagtatttttccatggattcctttttatgttcaggatcaagactgaaaggagaaataatctacatgagtctttaatactttgcaaataacagatatttccagccgtatttccaaaatatttaatatgaaccgacctatttctgatgccaacaagagcactatgtacagctctagcacaagctgaagcaggtgctatagcagctgttggaactccctgaacaacagttgcaaatgctgatccagctccgtctccacgttgatacttcttcaaaggtgtgcggactaatgcagaagctgtctttcctattccatcaccgatgctctcacatgcctataaaacctcagcaatgtaaaatatctgatccaggagcagaaatgcaggacatgtattgcctttacactcaccttaagcatgccttgcttagcatttctaggctgattatgtctgacattcgtcttcgttctgccttggggttgtggcaatgatggtgaacttgcaaatatatattctgctctcaataaaatatcatgagccccggctgccaagtgaacaccgagtccaacagcttccagtgagatacttctgagaaacgctacagtccctgaaaacagttacagctccgtaatgcgtactatagaataatacaaactataaactcctagatggaccaagtacatgctgctaaacatatttctttatgaatggatagtatcaggaacatgatcgtgatctgacatggtggatatgtaataatttggccacagtagcaaattttatgcatcttacttaagagaggcaattccagtatcaaatatattagaaatcttatttataagagtttcctaatcatggtcagaaggccaccagctatcatcattaacccttgttctagaggaatgatggtctagaaaatatatat

SEQ ID NO: 62212 - DNA, 321 bp, Arabidopsis thaliana landsberg
agaaataaatctgtggcatcttaaaatcaggatgtgaatataaatctgcaataaaagtgcatcaacaagtctgtgactactaaaaagttagtttagtcatgattaaatttgcgacaatttcgtccaataaatctgttatgatggaatatatatctgtgattcaaaataaatttgtcatcaaaaaaagaaatctttagtaactaagagtcaatctagcaattatcttttggaaacacaaatctgcggaaacgtatagacttataacaaatcggttgcaactaaacctatgtgcgtagcatcaggattgaggataagtctcta

SEQ ID NO: 62213 - DNA, 362 bp, Arabidopsis thaliana landsberg
ctgcttttagatgatcataatctgaattagcgtgtttttacaggtcttgatggttcagctggagaagcataggatcctggatactatggttatggaacagaagttcagtacccggaaatcaaaacttccttgtcatgaagagaatgaatcactcactcgggtgactcgatctttttaactgaccattttcttgatcttgattttaaggtaatgcacggggaaaatgggtctgtgatctacttgacgccagggtttcagtcttatgatgcaagccaaacttatatgcctataaacccggttggtgtattgagtgacgcactccatttgccgatgaatgctgatcaagggtattattcagaacc

SEQ ID NO: 62214 - DNA, 286 bp, Arabidopsis thaliana landsberg
agaaagcaacccccccaatacataaaacaagatttgatcgcccaacccaaaagaggagaaagaaggaagggcaaacatacagcaggaaaggcggccagcgccagcggaagaaggagaaagaacggaagaacgggcagccagaggccagccgcaggagacgaaacaaaacccaaaaataccccgcgctgactgaccagccagaccaaaacgcggggaacaccccaccgaaagagagaaaaaaaagcccgaaaaggaaacaaccccacacaacaaaagcaaagaagcc

SEQ ID NO: 62215 - DNA, 427 bp, Arabidopsis thaliana landsberg
  unsure (1)..(427): unsure at all n locations
cggtannnnnnnnnnnnnnnnnnnnnnnnnnnnnnnnnnnnnnnnnnnnnnnnnnnnnccccaaccatatttaataatttcttctttctttttttncttttttttttatatattaatttctattatttatttttcttttatatttattcttttacaatttttcttatttatttatcttattttttctttttaataataccactttcattttattttttattcttttttataattattattatatatttatctttcttctatttttttatttttttttatttatatatacaattattttttatatcttttttttttttttttacatttttatttatattattttacttttttttttacttttatcttttttttttattttttttttatattatttcctttattattattttttttttatttattatta

SEQ ID NO: 62216 - DNA, 416 bp, Arabidopsis thaliana landsberg
acatggtacaacctgacacgcgcaaatagctaatttttcattccatgtgaaggccccccaaagcattaagaccggaggggttatctaaccagagaaacttataacacactaatttaaatccgaaaacaacccaacccaaagaattactagataaatttctaactgaataacaattggcgaataaatattagctaataaggcacccgactaaaactagtaattgataggagcgatcaaattgatagagataaggattcagcaaaatagtgaatcctattcacgagaaaaacatattaaatggtttataaaataactgcaaccttgtctcaaaccatattgtgataataaaaatcataataaaacaaaacacctctatctgtggaaaataatggcccaaccttaacataaaaactggt

SEQ ID NO: 62217 - DNA, 501 bp, Arabidopsis thaliana landsberg
ggacccggaccggagctaggaatagtagtgctgagcatcacattcttgaagatatttttttttctgttcacgttgaaaacttgacacttccttcccgacccaagctgtcagatgctgctcctaatacccttggtaccgcttgcttagcattacactatgctaatgtcatcatcgtgatagagagatttgttgcgtctcctcacttgataggagatgatgcaagagacgacctttacaacatgttaccggcgagcgtgagaacatcgcttagagaaaggctaaaaccttactcgaaaaacttgagttctttcacagtttatgatccaggcctatcaagagaatggacagacgccatggcgggtatcttggaatggttgggtccattacctcaccacatgataaaatggcaatcttaacggagttacgaacaccaaagcttggttttaaggacccacatattaattgcacaaacccttttctttgcgaaaccaccagaagaca

SEQ ID NO: 62218 - DNA, 1234 bp, Arabidopsis thaliana landsberg
  unsure (1)..(1234): unsure at all n locations
ctcaaaaaagaaattctcaagaaccctagaatgaaattaaccaatgagccatattcaatcaaatgtctcacctttagggtcagacagattggggtatcttaaacttctctccctgccatggttttcgtttctacctcgctttaatccagtaatctagttcttcagattcgattgaaatttctaagaagattagggttccaacgttttctaggagtgaaggagacgaagatgacgatcgaaattggtaatggttctctaacaacaggattggctgtgaattctgatggagtgatttttggtttttactcttctccattgggtttgggtttactatgaacaacttatgggcctatatttaagcccgttttaactgagcccaatactcttcttttttattttataatgacttcaataatcatttaatttcttcaatccaaaaaaaaaaaaaagaggagacaatttgtctcccacaaattattaaaacaactacaagataagaataagaattgcatattttttagaagaatgaaaaaaatcattaaattttgcaacaaattacaccactaagaaacttatctcaaatttatttcatatgtcccattcattttttttatatactatagtatctatccacttaatttacaattctgtaaatcatttatgattttttttcatcatgattcatgacgcctttaagttaagtgcttcactatcaatctatttaacggtctagtcgtaataatttcgatatttcaaaataaatatatcagaaacacctgttttttttttttttgaaattactaatagacaaaaagaaaatggctagcttagccttagacagttagactagtaacgtgaagttcattggcaccatggcatggacctaatttaggtagaaagtacctttactttactgttgatacatcattaattacgagttcataatacggatcaaccctacacaagactattattgttaacaaaataacggtacgttcgatttaaggaaccaatctttttgaaagtgtgaaaccaatctttttgaaagcaaaatagttttgattttgataaatctctaatctaataaacaaaagaaaaaccgcacgttcgatatatttgttttgggtccaaaggagattttgagacgtgacatgaatcttcaccataagtttttatataaaaaaaagtgnatnaatagatnnggatccaacgagagagtgatgggtttttatgg

SEQ ID NO: 62219 - DNA, 978 bp, Arabidopsis thaliana landsberg
ggagagctaattctcagcatatgctagctgtgatttctaaagataaaacgcttgaatttcttttttagttaaggattggttcgagaagttttaaaaatccagaggtgctagaataaaccttgttaatgcttgatactggagattgtttagaattaacgttagaagtctaacactgtataaaagcttgccatatggtcctccttagttttctaaacaaagtcatagctttaagctaatgacatatatgcttgataaccaaaccttttattttattaaaaacaaagagagaatattaagtatggaccatactgtatggtcaaaagttagggaaagagaaaatcttcagttgacatgtttttgtgtaaacgtgaaacagattccaccttcctttgttgctaaagatcagaaagaaacatagacttccaaaataatattaaaaattgcgaaaatttcgaaaacaaaaaggaaaatttgaagggatctagctttggattgtccttttcagttggggaccagaagtggaatgatgatgcagagaaagcccactttttttggttcttgtttccaggtttctcttgttctgattggtttaggcaaatctaaaaccaaaaagggggaaaacacacggaaacacagcgattggcgaatgcgaaattcggatggtcagggctcactagagagagagaaaataaggtacagattcttgcttatagctttacttaccagtaagttatactacacacgtttttaactggtctttgtcgagttttcattaccaaaaaacttttgttttcacaacacatgaagttttgaaaagtttttctcacttgaaatggaaacttcttttgctacccgtagctttttagtgtactgttccattaactaaataattgtaatacccatccctacttatcatctatgttagtatgaaacatgcttattgtctatgttccttaactgaccctacatttgttactt

SEQ ID NO: 62220 - DNA, 413 bp, Arabidopsis thaliana landsberg
caagggcaggaacagacgcgagacagacccggccgccacaggaaacaccacaacccgaccgacgggcaagggagaagcaagccgacagcgaacagccggagccaggaaacgaacagcgccaggagaaacagaggggcagaacgaaaagcgaccagcgacgaagacaaagcagaaccggaagggccaagcaaaccaaggcaaaacaggcagccaagcgccacagagacgcagggagaacgcgcccagaaaaaaaagaaccccaacccccacagcgagaaagcccaacgaggccgcaggaagcaaggcaaagacgaacacagcgagggagcaaggcaaaaaagaaaaacgcacaaacaacggggcgagggaaaaacaggccggaacggaagaccgccaccacggcaaggggacac

SEQ ID NO: 62221 - DNA, 560 bp, Arabidopsis thaliana landsberg
tgacaccagtatcttcctatctttaagggctttgtgtttggtccggtctttttcttttttctcgctttgtccctattgatgtgtgatttgtggtgtgtagggattagtacttttttattttgtcaactttataaatagagtgaatcattacttggctaataatgaaaaatcaaatggattttattccttttaaaatatttattggcagtcgcatacaagagcgggttgaatccagaaaacattggcaaatctattattaataaaatttaaaaatataggaatttgataaaatttcgttttattcggttcggttttctttgtaacactaaaattgcaaaaaaaaactatcatttcaattttataaaaaaatttcaggtttgtgttctataacttcaaaggtaaaatctaaaattgtcgaagttggtatgtagtattcaattccctcataaatttggattttttcttccagattctcgatgggcccggcaatgggaaaatgttatgcattaaagaaacaatgtgtccaatatgttcaaagaagttagaatatgttccccata

SEQ ID NO: 62222 - DNA, 852 bp, Arabidopsis thaliana landsberg
gaacaacagcgaattgcttaaactgttagaaatgtgttaattacatgaaattataatttttaaaataacacgtactaactagctatttataggatatcttcttaaaaaaacaaaaaacaaaaaaaactattttaggataattaagctatcacgttaagcgtataaaaaactactgtaagagatagagatttcactgatcaaactaagtgcataatatttgcaataaattgtaagccattaatcgcattcttacgtaaattccagaaaagtacaggtttagccttaaacctatatgtttacatatcatgcaaaacaaattctaactcgtaaagtgtatacataggtggtgaatctacaggcagaagtttcttacttacaagcccatttggcatcactagagctacctcaaccgcaaacgcggccacagcctatgccgcaaccgcaaccgctctttttcactcctcctccccctcttgccataaccgatttacctgcatcagtctcacccttgccctcaacctatgacctagcatccatcttcgatcaaacgacgtcttcttcggcatgggccacgcaacaacgaagattcattgatccacgtcaccaatacggtgtatcatcgtcttcctcttctgtcgccgtggggctcggtggtgaaaacagtcatgacctccaagcattagcacatgaactcctccatagacaaggatctcctcccccggcagctaccgaccactcgccgtctcgaactatgtctagatgagttggttttgatcgatacatctccgcattgttattaggaaaattaaattacaactcaataagatttaatttcttttgaaagactgatta

SEQ ID NO: 62223 - DNA, 430 bp, Arabidopsis thaliana landsberg
gaaaacaacaagcgcgggggagggaccaacgaaacagagttgatacacccacgggagaaagaaaaaaccgggaaggggcaaacgaagacgccaccgggacccgaaaaaacccggaacaaaaagaaacagacacccgcacacaagcgagaacaaacccgccaacgaaaaaaacagaggaaacgaaacgagaaaaaaaaaaccggggaccgaacggccaaaacagaggaacggaacaggagggagacaaccccccgggcaaaacgccaaagaaaaacaaggcgccggcggaaaagggccaagacacccaaggccaagaaacgaacgagacccgcgaagaacagcaagcaacaggaaacaagggagccagagccggagacacgagagcgacagagggccaaaagagaggaacggacgcggccagaacgggaaa

SEQ ID NO: 62224 - DNA, 640 bp, Arabidopsis thaliana landsberg
tttttccgttcagggcttacggagagattatgagtgctgagacgttggcgaatccggcaggagcagtagcgggtcggtttggagtttatggctggcggtatgttccggagacgctgatggcggcgcttgaggaactggaggccgcgtatgccgaggcgaaggtcgacccggcttttcaggcggagctgaacgatctgctgcacaactactgtggtcgacccactcctctttacttcgccaagcggctgtcggagcagctcggcggcgccaagatttacctgaagcgcgaagacctgctgcataccggcgcgcataagatcaacaacgccttggggcagggcttgcttgctcggcggatgggcaagcaacggatcatcgccgagaccggcgcggggcaacatggggtggcgacggctacggtgtgcgctttgctcgggatggagtgcgtgatctacatgggcgatgtggatatgcgacggcaggagctgaatgtctaccgaatgcggctgctgggggccgaggtgcgcggagtttcggcggggtcggctacgctgaaggacgcgatctcagaggcgatgcgcgactgggtgaccaacgtccgcaccacctactacatcctcggcagtgcactgggagcaca

SEQ ID NO: 62225 - DNA, 595 bp, Arabidopsis thaliana landsberg
aaggtcctcattaatcatatattatctatcattcacgttcatttattttcttaacatatctgattaacatttctttttgtataaaaaatgtagatattcttcttacaactttacccattcctttaatatgtttgctttctttcattcatgtcctcttttgtccttctttcttttacacctttttctctcttttctttttttctttctacttttttttctttctacttttttttctttctcttttacgtctttcctttttctctattattattctttatctatatatttttttttttgggcaaatctttatgtatatttatatatctttattatcagattgtaaaataaaagttcaaccaaagagtactgaacatttattgtgcctctaatagttgattctttcactagctcttctcaatagagaaggaaaaagaacagtgtgtgtcaaagttccaagaccaagataggacattaagattttaagctaaaaaaaaaaaaaaaacttattcaattgaaatgaatatcgaaactagtcagtagccaaaatataagttaattgatactaattaattactacctagctacaacaaataat

SEQ ID NO: 62226 - DNA, 1897 bp, Arabidopsis thaliana landsberg
  unsure (1)..(1897): unsure at all n locations
tcataacccaccatcatagaagattcattgcctatcgtatctatagatatattatattataagagaattagttagaaattgattttgaaaatgttttataaaaataaaaatgttttgaaatttagagggtttgctactttagttaaataatataagttttgaaattataaaccttaactaatataaaggtctcatagttaaataaatcagattagaggttaatacttttttaattgacaataaaaaaaataacaattacttcatgactccttacttcattgattataagaggatttgtttttctgctttcaaataaaagtttaatatcttataaacaatttattattgattaggaaaaaaattgagttaattttgaaagtaaaaaaacctaatatatagattttgattttgagttattattaatggctatatgcatgttatttcaaaacttaatggctatatgcatgttatttcaaaatttaatggctatatgcatgtttttaatatatagattttgattntgatatatatgtatatttttaatttaatggctatatgcatgttttaatatatagattttgattttgatctatatgcatgtttttaatttaatggctatgtgcatgttacttcaaaatttcagtataaaaacaatcaaaattcttagtttattcagtgaagtagaaaaaaggatcttatatcaatattatatagatcgaaagatgacatcgatgaaacttcacattgttgctctttgtattattgtttccttccttgttaatgttcaatccactcgtaagtattggtttcttgtctaataaatatacgctttttcaatcatatatgcatataggttggagcctagatgtttgtatatgtgttatcacttcgaaactatccgaatcaaaattcagtataatatatgttgtcgacaaaaatatatgcatataaatatgtaataatcataggcattttatacataacaaaaatatctatgatggtaacttaacaagtaaatatttttaaattgtgatgaattcaacaggaattatggatgcttcctcagattgtgaattcaaaggaccgtgtcataagaaagaagattgctatgactcatgtggagtgaacaaaccaccgtttaacaatgctatatgtgtacctggcagagattcgtttcaatgttgttgtattttatcgtgattctattcaaatttagtttactattgacttattaaaaaagttatatcaaaaaaagatacatctgaattctattgattaacaaatttttttttctttcataatcttgtcttaaaacgaaataaatataatgatatttgttgtcatacccataacaatgaagaaaactcaaagagaagagagaatcatataagagccatgtacatttatttggcgaatgtatttgacgttgaatatgaaatatgtgtaacactgaatttacaatattttctaaatttcatcatcatctctttcataattatcatattattgacatctaaaattttcttccaacttatatagaagtaagcctagctaaaatttgtgttgtttggatcattggatgactatatattgttaaagaattatccaagagatgagagttttagaggtcactgtaacacgagaaaacatgtaaaacgcgataaaacatttgtacaattctaatataatggcctattttgctcaaatctgtttattattgttttaagaattatataaagatcataaaatctgtgggtagagaaaatatcaaaagggaaaagtaggaagtttcttattgcctagaaaatgatggatgagctgaagagcttctctaggtttaaatgtcggaacctggtgtcccgctcctcttaccgtcacaaacattaaaccgtcatac

SEQ ID NO: 62227 - DNA, 1442 bp, Arabidopsis thaliana landsberg
gcgggaacctgccaaatcaatgtcttcaatcaagaacacaaccttctcagggttcttcaattcataagcaagtagcgttgccgggctggcctttgactcgtttcctttcttcttaaggtcaatatgaaccagagactcgaaagatccgaaaacagattcagatacagtacgagctactctcctcttcgcggttgtgtccctgccctcgattataatccaactgtctttcttctttgacacgcaatccattaaactctcagcgataagacgcattgtcacagtttgccttggaatactctcctccaaagctttgaccaaagcgctgagcttcagtctcgtatctgttacggaatctgatcgaaacagagaacgccccaaatcaagagtgaccgtctcatttcccttgtcatcttcagcttcattgatcgactcacccttctcatgttcgtttccacccaaatcaaactcaatggtgcaagaattctgacgtctgaatttagcaatcgagtttgtggctcgctgattcggcttcaaacctaatgaatcaatcaaagaagttgatttcgaagactcatgtgatgatccataaggcaagccatagggatagttgcccatcatactcaattgtcctgtctgattatgtagagtttcacaaaacctgttccattttctcttcaatcccattaactcatcctacaacacaatcaaaacacaagaattagacctttgatgtatcgctgaatccatcatttttctgtgtacttaatttcaaatgttgtaccttctgtgaagaactgtctgcatcatgagattggagccaagaaggcaagagcttgtcttgattagctttaagggatttggcttctctgtcaaagctagtaacacattcaggacaacaactcagaacatggcttattgtctcttcttcctcagctttatcataaccagaaagtgactttgttgcattcacagtactcatgttccttgcctcatgtccactgcaataaacgaacggtcaaaaaccagaggtcagtggcaatatcgcaaataacatttgaaaaacaaaacagaaaagtaaaaggagattttggattgttgttaaaagaagccctgtagacaaaaagacaagatgtttccctaatatagaacggtctcttagctatcagacataaaagagaaaacttgagactaattgaccaaagtggtaaaaggggtaaaagtgtccacacattgctacaaaacaaaacaagaaaacacataattgaaaagtttcaagctttattatcaacctgttgcaggatatattctctctacgatgttttaattttgtctacaagcaataaccattgaatattacaccaatcatatctaattccgtacctatctccatatcatgaaattctaatatccaaaaattcctaaggaatataaaatgtcacatc

SEQ ID NO: 62228 - DNA, 1275 bp, Arabidopsis thaliana landsberg
cagagatagtgtcacgatgatcatcgaaagaaacagatttttgttatcctctatttttctgggtaagaaatggcgaggaagagcagaggtagatagatagaagaaaaaattcaatttttcttttatcacagacagagaattatcgttggaacagatccttttaatgctaaataatacagaaatgtagtaaattttcttccttgttttttttgtttgacacagacactcactgagatatttccagaggaaaaatttcggatctttgttttttgtttttgcccttttttttctcctccgatgtctctgtgtgaaaaggaagaaaattaattaaccgtgtttttaaaaaataaaaatgaatactcctcgtgtacaagataataaatttgatgtacctgagatgacaatattacccctgcttggtctggtctgatatcttcaatgtgacggttcattgtgaacctagctagaccttggcagcttggctctttttcaagttttaaccatcggttttccagagaataatactgaattacctactgactatacaattttcttgtaatgaaaatatatgattttactaaataaaaataaaatatcatccagataggggtaaaagggtaaaatagtcagaacaatgtaattcttctggcacaagaaatcttatgcttcgcagtttgtaaagtggttgggacccaccggtagaaaaagggacagaatcggaggttacgattcgctggtcactggagcagcgtaagagctgtgatctttagacgtcagtattacgccacgttagcttacgaggtagtgatcctctgctctgatgaccacctatgttcttttccgtgattttgacgcttttctcttctactggtttgaccgttccaaatactttttattacacgtcaacaacatattaaacaaaaaaaagtaaaatggattcggctttttgttatttttcttttgactctcccctttaattagtttcctatgacttcaagtttccgtctcctactagattaaggtaatgtatgtggaaagggtttttataaagtatgaattttggactctgtataaaaatggaattcctgtgattttaaaatgaaattagagttatgtacatgcgcattgatggtgtatttccctattagccctaagaacgatcgttcgttaattatacaattaatcatttattggttgagagacagaaacaacatccaagagagagtccaaaggacggatccattacaaagacatgtgcaagagaatttcttagtc

SEQ ID NO: 62229 - DNA, 1460 bp, Arabidopsis thaliana landsberg
cttaaaaagaatatatatatctgtggatgtagggcaatacatattgatcactaatgcaactattgatctcttctgtgaaactaatgttttctcctatgtatcacaggtggcggttatgtgatttctcccatagacaacggaaaacaatcagttgtgaagcacatgcttgctgttgattggaagtcctggagatcttatgtgaagccgtccttagctagatctattaccgtgaaaatgcttggaagaatttctggtagttgccaattctcttaaaggaaaatttctcagtttaagcacttttcttttatcataacatccttgttggttgaatcagccctgagagagctttttagggcaaagcacggaagctttcctcctaatctgtcgtcaggggagttgtcaagaagtgcaagattgactcagaacgaagatggtgtgtttggtgattcttccctgagggaaaacgaaatgtttaaggacactgcaaatgaagagagagacaaatttccctcagagcgctctagccttgtagacttggatgagtttttcgacgttccagaaccatcagataatgacaatttggatgacagctggacctcagattttgatttggatacatgctgtcaggtagcaacatcagacaggactttaatttgctcggaaagataacagttctgattttctgtttgccgactgcaggaatcccgccagccaaaactaaatagcgctacgagcttagtgaaaaaattacacgatcttgcaggtgatcctaagtttcatggagaaattctgctcttattagttgtgtcttctcattctgttttcttcttctctagtttcacctgtcttttaatggttataatttttttctcgagcagttcaaaagaggggttatgttgacctgcatgagagggcgaaggaagagagcagcccacatgctacctgcaacccgccttgctgctatggaaccacgcttccaactgatcctagttgtgatttgccttgtagttggacaacaacggacccatctacttttctcattcgaggaaaaacttatcttgatgaccagaagaaggtaaagaaaagctcataacttgtgcttgaatatatcaatatgtataatattactcaatttgtaaacattctcttgtggtggatccaggtcaaggcaaagggtacactgatggaaatggtagctgcagactggctaaaatctgacaagcgggaagatgatttggggtcccgtccaggaggcatagttcaggttttgattattattgtttgttctgatagttattagcccctctcttactttttataagaagtcttacaagtttttaaaatgcagaaatatgcagcaaaaggtggaccagagttctttttcatcgtgaatatacaggtaagaggacactcctgtgaccaatgtttttttattcagcttttccatgtgtccgtaaatg

SEQ ID NO: 62230 - DNA, 596 bp, Arabidopsis thaliana landsberg
atacggcaatactcattgaacaacgaagattgatcttctttatgaccaactcgggttaccctattaccgcctgccagattgttacaaggacttcctccaattacaagaacaaatgcaccatatttctccatcaaccctgcgattgtgtcatgagtcaagtgttggatgtctgaaaactcgatcaattctccagtctggttagtttgctcccaaaagtccttcaaaatatttctgtagactttggaaatctcaacagacacaacaagcttcattttgatttggagacgatgaagtgccacttccccaccaccaatacccgtgaaaagagagagaacattgattccatgtgggaaaatgggctgcaggacagacagatgatacgccacaggatcaacctaaaacaagttcaaccaaccattaaaccaaggtattcaagccacccaccaatgaatcaaatacgcaaaagactttaactacaaagagtattattacccatatgatatgtaaaattaccttgaaacgaatttctaaggacttgaagcggtcagtctactcatgcctccaccacgagtatgattttttgaaatcccaaatac

SEQ ID NO: 62231 - DNA, 1554 bp, Arabidopsis thaliana landsberg
tcattaccaattggcaataaaacgaagcagaatattattgtagagacaaaagaaaagttgagaaattaattaaaacaataaagagtccaaatcgattggataataaaaaggccttaaaagagtaaagagtaaaaaaaaaagccactcaaaagtcggaaaacaatcacatctataaacgttttcttcactctctctgctacttgtctctcaaaagaaatgcaattgtgaaagccctaaactaaccgtgaagaagacgatggatcgcaagggaaagggtaaacaggtcgccggtagtgattcgtattccggcggacagaaaaggaaaaactccgtcgaattcagagatgaaggtttgaggattaagaagcgcaaaaaccctgaggttcttcagttcttcgaagaatcagctgaagttggctactacggaggcagctccgacgaagatgatgacggattaggtttccttaacggtaatttatcattatcttctctgggttcgttgattttcttctttgcatggtttcattgcttcgtttcttcttttgtgaggtctccgattgtgtctgtttttgtttctactgagatttttaccatctaaagtggcgatttttaggtcatctctgtcgaatggctgattccgtgactagggtttagggtttgcattttgttttcgtttgatttcgagctgttttgtctagttttaacttttaaggctttcatactcttaaagcttgaacattgcagaaagttccacactttattatcttactattcttttgatgcagatatggaagacgagcctgaggtggaagagagtagtaaggctggcaagggagaaaagggcaaatcatcctttgtttttcccaaggaagaagatttaaacgaggaggaatttgatagaataatggaagaaagatacaagccaggttccggttttcttagatatgctgatgatgatatcaaagatgccattgagatggatgctcttgctccaacctccaaggatcctcctatatggaaagtcaagtgtgcggtatgtcaaactaaggcttcttctacttatgctttatccctgtatgactatgttcttacttctgctcactccatttggtttgttcctgtagattggacgggagaggcgatccgttttctgtctcatgcacaaatttgttgagctgagaaagataggcaccaaattggagatcatatctgttttttctgtggaccatgtcaaaggtttcattttcatagaagcggacaaggaacatgatgttcttgaggtattgaacatttagcatgcctatgttggattattctcgtacttatctgacagtttggagaatgttgcttggggataatcataatgtgtatgtcattctgatttgtctaattttcctaggcatgcaagagtttagttggtatatacgctactctgatggtgttacttcctaaagctgaaactccaaatctgctaactgtccaaaaaaaaactaaaaaagtttctgagggaacatgggctcgtgttaagaatggtaaatacaaaggagatcttgc

SEQ ID NO: 62232 - DNA, 538 bp, Arabidopsis thaliana landsberg
cgccgaagatatcgtgcagtttttcttactactcctcacattctgtttacagtgaagctatctcagattgttttgactttttcaataagtctcaacaagaaagtgaagaccggattgctcatgatcacgaccatttttacgtttagtcaaacttcaaagaaaaataatgatctcatgtcttttcttcttctagataactcaaaattttcttctcttaagctcaaactcttattaatctgtattcacagtctctgcatgtttccctgaaagtaaatctcgagttcaaataaccaaaatggacctcacaattgttgtcttccatgaatgttagagaacatcgagacttatatttgttgatccgtttccaaccaattttaaaggaagcaggttgtgtttagttctttccactatcattccaagagaccaagagttgtaactgtaagcgttgtgtatcaaatcatatgatcgtggagtcaaacgtcatcacaactaaaatctgaattaacattaatgcttctttgctatcaaaactttaaat

SEQ ID NO: 62233 - DNA, 1211 bp, Arabidopsis thaliana landsberg
ttattgagaggaaatcagctaacataagagagaattgattgtcacaagaaactaaaagagcttgcgttttctacctccatgaaatcttccatttggagaacacggtcaactgcaacaacatataaactgtcttcctcaacttcttcgccaaacttttccctccatgtagcactaagacgctacataaaaaacatggagacttcgattcaattcaagtaaaagcacatgaaaagggcaagaaacctagcatcttaaaatcactattataagaaataaccaactgttttccacaggatatctcctagaggcaaggaaacgcaacaccactatcttcaactacacacacaaacagctcttataatggaaatagaaaaaacgcctaaagtctactcaacaatagatatcaactagcaaatactagcacaaacacacacacagagaaaatgaatataaatgcaagtcttctttaccctaagaacttggggttctagtccaacataatagtagcacggacaaaaacagtaacaggccaatcaagaaaccttatcgtccatacaaaggttcatcataaccaatgtatatgagagattcaggattgagttctttggagtgagagattcattaaaaaatgatacctttagaacagtatcgtctccaggtcgaccaatgctaccttgtatcgtacactgaggagtcctcaatccacattgttctaactgattccataaacaaacacaattcatgattgttccttcaaaaagaagtaaactttgccattttttcaaagaagaaacagagtggaattagcaaatgaggacctgaacatgaagagcagacctcttgtcaggagagacagagcgattgaggcaaagaacaggagtgccatctttgtcaacggcgaagcgaactcctacgccgagaggccaaccgtcgtgggtcaaagtggagagagttccaacagatgaaagctccatgatactccttgaaacctccgccggaaagggcttgtgggtcgaagcggtcgccggagtatccaaagtcgtggaaacggaacatcggagtgaaattggacgagatgggtctcgttttagagagatgaattcacgtctctcgatgggtttggcgaaatttggagatggcagaagattgagagcgaaggattgggtttggagttgcattttggttgctctgatagagaggatcgctgtgtt

SEQ ID NO: 62234 - DNA, 523 bp, Arabidopsis thaliana landsberg
  unsure (1)..(523): unsure at all n locations
cgaaaaaanacacgcagaggaacacgcaaaaatgaacccagaagaggaaaagcagccaaacaagaccaagcaagccggagcaacaccaaagaaaccgccacagaagcacggggacgggagaaacccaggcccaccgcaggaacaagaggaaacccgggggaacaagaagaggaacacccaaagccgcccaaaccgcagcaggaaacgctacaccgagcagaagcggancaaggcaagcaacgagccgaagaaaggagaaaaggccccggacacggaagagatgcggcacaacgagctaaacgaagaagcggcaaaccacaaagagacgaacgagagggaaccccgatgccacacaagggcagaagaccccccaaaaaaagacgcgaaaagaaccaaaaaaaggcagaaagggacacaagagaaaaaaaagaaccaacgacccgagcaaacaaaacaaccatggatcgagagaaagacaaagcaacaacccggacaccacagcggaagtgtgccgaaccaaaaa

SEQ ID NO: 62235 - DNA, 543 bp, Arabidopsis thaliana landsberg
  unsure (1)..(543): unsure at all n locations
aggcatactaataaataataatctaatataaatagatagatatgcattgtgtttaaaacacacgctcccttgtactatgagtcacagtgattttcccatccaaataaactcaagttcgataaatcaccagtctaaaatggtttcatcaatgttcgttacttctaacaacaaaaaccatgctaatttatatccatcttctttttttactagttcccatgtttcaaaagtctcttcatcttcattgagaaccaacatggtttctcctttcagtatgcctttcatagctcaaactagtggttttgttaactattctcaagtttttatcactcaaaccatcgcaaaaaggtatcatgctcttattccgacangcaatatggtcattgtccaaaatgataatgatccgtgtcaaccgtttcatgacttcttatnccaccaatttgaaatctacagttaaccccccaaatgattttgattaacactatgaaaccttcacaccttaacccatcgatttcttttgttcgcacaagactatgcatgtcgtca

SEQ ID NO: 62236 - DNA, 668 bp, Arabidopsis thaliana landsberg
gcccgttctctaaggctggcgaactttttcggcatgggcgagcgctgcttcgcgcacccaggcgccttcgtcgtgcgctttcacgcgtgtggcgaggcgctcccggttgcacgggccgtcgccgccgacgacacgccaaaactcgccccagtcgatcgcgccgtagtcgaagtgtccgcattcctcgttccatttgaggtcgggatcgggcagcgtgacgccgagcaccttcgcttgctcgaccgtggcatcgacgaatttctggcgcagatcgtcgttcgaaatccgcttgatgccccacttcgccgattgattgctgtggacggaatccttatcgctcgggccgaacatcatgagcaccggccaccaccagcgatcgacagcctgctgcacgagttcgcgctgcgcgtcggtacctttcatcatggcgagcagggcgtcgtagccttgacgctgatggaacgactcctccttgcaaatgcggatcatggcgcgggcataaggaccgtaggtacagcggcagagcggaatctggttcatgatcgcggcgccgtcgacgagccaaccgatcacgccgacgtcggcccacgtgggcgtcgggtagttgaagatgctcgagtacttggcgcgaccgctgtgcagcgcgtcgatgagctcatcgcgcgaga

SEQ ID NO: 62237 - DNA, 116 bp, Arabidopsis thaliana landsberg
gcttatgaggttaacaatccgttcccggacaccgatgaaccaacacgacttcctgccgtcagaaacataacgagttcttagcaccctagacgccccacagacaggggctcgggcgc

SEQ ID NO: 62238 - DNA, 671 bp, Arabidopsis thaliana landsberg
cggttttcacggcgctgggcctgattaccggtgcgctttgggggcggcccatgtggggcgcctattgggtatgggatgcccgcctgaccagctttctgctgctgctgtttctgtatctgggttacatggcgctgtggggcgcgatcgaggatgaaaccaaggcagggcgggcggcggccgtgctggcgctggtaggcgcggtcaatattcccatcattaaattttcggtagattggtggaatacgctgcatcagggcgaaagcatcatcagcggcaaattggcgcccgtctttttgtggccgcttttggtcatgatgttggcttacatgcttatattcgtcgcgctgtggctggtgcgtatccgcaccgccatcatcgagcggcgggcgcgcaatctgatgcaacaggccgcgtaatgatgcacgatcttttccaccttggcccctatcacgatttcatctggccggcctatgccgtgtcggcgctggcgctgggtgttgtcaccgtctggaccgtggctttcttggcgccgggcgaaacgccgtctgatccagctgggggggcaagttgtgaagcgcttggtctttattctggcaattgcccggtttgcagttctggcgtttttttgtttccagcctgtcgggcccccgccgatgtatccatcggcctga

SEQ ID NO: 62239 - DNA, 1163 bp, Arabidopsis thaliana landsberg
tttaacttggcatcttcatcgacagtgatctgttgctatcaaaaaagttttccatacgcagatatgagcgacggaatccagaaagtaacgtaaaaagactttataaaaatctgtgaggtgaaaacgaaaagcaagtagaaagacgagataaggaaaaagggagtgagggagataaccttatgctttttgtttttcttcttctttttctcttcttttttcttctttgcgtttttcttctttttctttttgttaagcttagtgttctctatcttatcgtcatcagaagatacctaaacatgatgacgaaggcgtaagaactggtcagcagtacatattctacaaattttattccctgtacagatagaatgaaacagagtacagagaataagatacctcgacatcttcgaatgaagcaacgtgttgaattcttcttcctgaactcgaggccccacctgagagcagtagagtatcatacagattacgccttcacattcataccccaaagtttaagaaaataacatgaaaccatatatattccccaataacataaccgatacagtgtgctatgttgttttcaccaaccatacaggaataccatgattatcctaaacttttaagtgagctaaatctagtactcagttacgatgaacttctagtgtgaaactagtttcaggcaaatagtcacggtgtatttacatttaacgaatgctacatatgctttccaaactctcttgaagttaaactgagtaaactcatggaatgcatcaacgcacaatcttcatttgcaatgatgtagtgaagtttcaatgcatatacatctcctacactatcatgatcgttgaaacaagttctacgcgaacttctggccaaacttataaggtctcacgtttgatgctacgcatagtttctactaacttatcccacttttcataaggtgagagttaactaattataagttcttatctattccttaacttgaacagttggactgagctaacaatttcagaagaacttgtcccaagctctcaaccctaattcccaaccaaattacttgaaaattcaggatacctgataagaaccagatgtgattctctctacattcactctctgaatcaattacagaagacgaatagaggacaaactgaaacaaataaccaagatat

SEQ ID NO: 62240 - DNA, 1247 bp, Arabidopsis thaliana landsberg
gatctcgtgaaaccagtttttgtttcctctacctccatatctatcttatattagatctcattgttattttcgattagggggcatgtttttcatgaaacgtttaatacaagaaatttttctttatagttttatcgatcgctttgtgtattggatcagtggtttaacgtattttgcattcttgatgactagtgagatgtgatatattacacgatttagattttcttttatgtatcttttactgaaagtcacaacccacttacttctataactatagtagtagtagacccattgtggtttgtgcgtctgaatccgtcgaaagataacaaagaaagaaaactgtgtaaagatagaatttaacaaattatcatacaagcaataagatgaataaactaaatattactttatttggaagatgatgaggatccttgactccaagattgtccttttgtgtaaaactcgagagagagtcgtccagcccaatgcacttgcacatggagttcgaatttatttatttttattcgaatttatttggtaactctttggtccatgaactttgaggtatatacagtaataagggataatacccataatcaaaagacaagtttatgacaaaaatgtcgccaccgcatttaccaacaagtattccaagagttaaaaaaaagtctattgctattgtctcagacatcaaactggatcggtagtgtaaactatgtctatatgaacaaaaacggtcgtataaaggttctagcaaacaacccatcaaataccatcatcatttctctttcttggttggttcacccaaaacgtacctcaaaatctcaagctaagtgatccgtggcatttgagaggtttaagagatggtgggctttagtgaaaagtgtagatgtttctcaccacaagtctctagtaatgggtgtcaaactcacaaacacttgttggcctattgaagcccatccatcttctcttctcgaaacttcaagtggggtccacaatttctctccctctttctcccaccttcctcttatcttctctgccttctatatctcttcctcctactttcccttagggtttttcagcttcaaaccctccttgcactctccgctttcctccgttacctttacttctctattgcttagctcgaaaaatggcatcttcagccgcccaaatccacgttctcggcggaattggattcgcttcttcttcttcttccaagagaaatctcaatggtaaaggcggtacctttatgc

SEQ ID NO: 62241 - DNA, 1133 bp, Arabidopsis thaliana landsberg
caccgaaatataaggtgttagcgtagttcaagtataatttttttttatattagcaaaatacatgtagaagaagcctaacagttaacataatgatgtcgccaaatccatgcaatttaaagaaggaaaatgacttaaaccaatcaaagacataaaagacaatgacatcttctaaatattattgtccacaagccctcacactttcaaagaccaatcatccctcgctattccgtttgtatttgtctcaatcatgagtatttgttatttttatatcatcaagctatacatgactttatcatattaagtcctttaccattaacataccataaaagctaagtcatgtatagtttgatgatataaaaagaaaaaaaatccgaattccatcaaaggtcataaaagattcggaacttttggaacactaaccagaggtcgtttcgcaatgtaaccaataataggacataagaaaacatggattagttgacaaacaaacaatagaagaaacacagagacttttttttatccacataattggggaatcacacttcacacgtggcatgcagccatgcagcttcagaacaaggggtggtttggtaaaaccatccacagatgcccattgccattggcacaaattcctccaataaattctataaataccaaagccgttgagtgtagtgtaacgctttgcacaattacactttaacccgtttaattccttcttcttcttcttcttattctagtcttcatcatttactcacaaaaccaaagaaaataaaccagagagatggatcaaataaaaccggagtttctgaagaaattgaccaagtttatagcagtttcgatgtgggttttatctcttttaaccagccacgacttctatttatatagattcatgatccaactcgtaacacacgcagtagataaaaactacatgttcctcctctgcaatggtctcgtagtggttgttgctaagagttctggattggtcgctttgtccaaaccaatagagaaaatttggagtcataccgataaaacctttgattatggagatttcgagagttacactacgatactggagctagagtataaatctgatcatggaataggaacagagtcctttcttgcgaggaagttacagt

SEQ ID NO: 62242 - DNA, 221 bp, Arabidopsis thaliana landsberg
aaaaaaaaaaaaaaaaaaaaaaataaaaaaaacaaatgataaaaaaaaaaaaaacaaaacaaaacaataaaaaaaaaaaacaacaagaaaaaaaaaaaaaaatatacaaaaaaaatacaaataaaaaaaaaaaataaaaaaataaataaaaaaaaaaaaagaaataaacaaaaaaaaaaaaacagaaaaaacaaacaaaaaacaaagaaaaaaatcaaaaa

SEQ ID NO: 62243 - DNA, 379 bp, Arabidopsis thaliana landsberg
agggagggcgggttacaggtttcttctttgaactttattctttattatttgtcataattcgagcaagctgataggctacaaaggcaactgatcatagtttaccatttagttttgtaatggttttctgcttaacttgctgttgtgtattgtgcctctgtttgtctctttttggattattctcagatgaaaagaatgcatatttagatatagtcagtgtattttgacataatacagattttgactaacttcaaatactagtgtgtaatatgtaccgtagtattgaaatacttggtttatttgatctgataagttatggtcatttctttcagaaacatattctttctcttgatgggcccgtagtcactgcagtaggatgcaa

SEQ ID NO: 62244 - DNA, 1746 bp, Arabidopsis thaliana landsberg
acacacaatgatttaaaatcacaaatgctctattcttttcttggtagtgaattcaatataagagaaagagtcagagggagtcaaaaaggagacagaaggcagagaaggtcaaacaaacggcttgttaatctgacagcttgtcactttattatctgtcacctaccaatcacattcctagtaaactcttgtgtgaaccaacataaacatattgttgcaaaataattgaattttaaattgtaataacagatattaatgtcaagaagaaaacttacgcaaacgggacaattttttttttttttttttataatcaattccggacgtgaaattatttattaaccaaaattcactgtcggtcttattcttaacgacaaaaaaaaagataaattatttttggatatttcttcttgcaaaaacctaattttctctcatctttttttttttttttacgatctggctttttgttttctttctactctgctttcgactgaggacactctgtttttttttcttcttcttgtttggatcatataaatctaatttttttccggaaaataccgttgagaacttctccggcgtgagctgaccaggagaaatctgttcttgtgtttagttcaattctcggctgaggaacgttgactgttgactgatagagcaacttcagtgtgttgagaccaaacataaagcttcaggtctctgtttttcttttaaacacttttgtctgagatctcattatttttgtacttttgcttctaacctccttgtgtttttttcctgttcaaactattctgatatacaatttgagaattttcagtgtaacagaacaaaagattccatctttatacttgaagattagcttccaactctgtagctaactgtaaaaagtagaagctttacaaaaattaagtctcaggcttataaaattaccacatttgttgaaattggaaatcaagtttctatttttatgaagctatgtggttggatgatgaactctcttttaaagttttggcttgcttgtaattgcagttaaggataggatttgagaatggaaacaagcgacaatattagctctggtggtgttataggagcagaagttccaccagcgtatcatatggctccgagaccttcagagagccctgctaaccactttatggggtcgtctctcgctcccattgacctcccaatgccttcttcaggtgaagcctcaggaaagaagaggagaggcagacctcgtaaatatgaagctaatggtgctcctttgccttcttcatcagttcctcttgtgaagaaacgagtaagaggcaagctcaatggttttgatatgaagaagatgcataagaccattgggttccattcttctggtaaagttactcttccatttgtcactctacttaactaagcattcctttgtctgtttgattattaacattacttggtcttttgcataaagttatgaaagattattaacaactgttaaaagtttctcaagaagttgcatttgttttgtttaaagtagcatatgggctttaactttgttgagtgagtatctattataattgtttgaagattgtaactttgaatcattgtcttgcaggtgaaaggtttggtggtggtgttggatcaaatttcacaccgcatgtaatcacagtaaacactgctgaggtatgtatattagaagaaaaaggcacaaaactttcacttgggaggagatttgtgtttgttacttagcaacaactgcgtgtttgcttt

SEQ ID NO: 62245 - DNA, 1340 bp, Arabidopsis thaliana landsberg
gtgtatttgcgcaatgtttcaaactttttctaaaggttttggttttcatttttatcttaaaatcgatgcagagatctcaggtcacggttaccgtttcggattcaatcacaaaatgcacttatccaagaagtccagctttcaatctcggcttcacttcagctctctttctgatgatggctcagataatagtcagtgtctcaagcggttgtttctgttgtagaaaaggtcctgctccttcaaggtctaattggattatctccttaatctgctttgttgtttcctggtaattctcatcatttctaatccttttcttgcttcaagtttcctacttataatttgcttacaactagtgagtgagtgatttcgcgttactataggttcacttttgtaatagctttcctcgtgctgctttctggagctgcactcaacgatgaacacaccgaggaatcaatgaatgctggtacctacttttgctacatagtgaaaccaggcgttttctctaccggtgctgtgctttcgcttgttactattgcccttgggattgtctactatttatgtttgacttcaaataagcaaattgttgctgccacaacgacccaaggaacaggaatagcaatggggcagcctcagattccagagagagtagaagatcctgtttttgttcatgaggatacttacatgagaagacagttcacttaaaaacagacaaagcttgcttgtaaagcacgttaggtttagtagaagatttagacaaaatgattaacggatatgtgtttgattaagagtattgaaactttgtaatgattgttattcttgattgaagtagaaatctttgagaaccccaaaaacgtcacttagttttgtagtttttttctctgaatctttcttatttattatgcaagtcaaaagtggttgttgggaagagaagtgttcgtctcatttacaacaaaaattcgatagcgatatatagtaatcgaaattttattcccaaacaagggaactttgttattgatagttggaactaaaagtttgtagagaaatttcaatgatacatatccaccgttagaggaacaaccaccacatgttctacccaaccctcacaacaaccagtttcttcaaatcttgagtctaataaaatgccaacacatctactctcatttcttctcatttataaaccagtttgatagacaagatattaataagagcatatagtaaaatctttcttattcgtaacaaagttattgtaaacttatagaatggttgtgaaactatatggacaggtaacagcagcttgtccacaaagagtcttgctttgttttctcgagaaaggaattgacttt

SEQ ID NO: 62246 - DNA, 186 bp, Arabidopsis thaliana landsberg
tttggcctcggaggtccgcagcgatgaaagctctgagagctgcactaatgcgttcatctacaattaccgaacgggctcgtgtgtgtattatgaccttggtccttgtgacaggtgaatgaatgaacgatttggatatggatgtggtggttaaggctggggcgcccttgctcgcttctcgcctcttgt

SEQ ID NO: 62247 - DNA, 258 bp, Arabidopsis thaliana landsberg
ttccgaagtcccggaacgtctggaccgcctctaggcggggccatactgagtaatatacaacaacgattaatctgcttacaaacgttgattaaatatgtagctatatggatatatatatatctgtatgcctccgtaagggacagggatcgggaggcctgcctgggtcaacttaatagcggaggaggaactagagcctactcgaccactcggaggaggaacgaaggtacttggccactagaaaaggttagaacccgctcg

SEQ ID NO: 62248 - DNA, 713 bp, Arabidopsis thaliana landsberg
ttacttctaaagcgcattcagttaaatatgaactttcagtttttaacttttctaccaaataaattaaggcacatcataactactttccatggttattatgcttggtatcttgtggtcgtggaagctgagtcttacatgacttcatatagttattttctttctttctttctaaatcagctattagatactggtgtaatttatggttattctcttgcaactatattcataatttagcaaagagactatatattattcatggatcacattttgtccaaattgacaaagccatcaagaattattgattaccctacccatattgaatgtctatcgttcgatttttctcaagaatgaaactttggtggggtttctgattaatactagtaagtcattaagaggtacgaaataatatcacagaagacgagacagcagaaagacgagacagtgcaaaaagagacaaaggtggtgcagtagactcactattattattgccttaactcaattttcaaaccaaaagctctcagaaagcaaacccacatttgtcccatggacaagtggagattctattgaccacacccactccacttgatttttcctattctctaaagccaaattgctccaaaaaaaaatctttaaatttttgggttaaagtgtacgatgtgattgaatttctgttatccaatgagatcatgccgtgtcaccataacggaatatgt

SEQ ID NO: 62249 - DNA, 1610 bp, Arabidopsis thaliana landsberg
cagtcttctactactactacataaggtaaagtaacctcaccagtctgaataatattctctttatagttatcgatcatgttactgactttggatcctttttgattttgttgtagctggaaaaccaacaccaaacttaagcttccggcttgaaaagaacccgaatttttttgcaatagtatcaaaatccaggaagttacagcaatggtgacattagaaaagaaagacatggttaacatttgggtcctccctctttctaacaatgagttgaaaattgaatgatgcaggattgttgtttaaaatgtgttttttttttagtctttaatgcacattgtaactttcccgacgattttagacattgagaagaggcatcgttttatcaaaactagtctttatagataacacacaaactctgtttcttttgtgcgagtgtttagttcaaaactgtagctcagatcagagccaagttaacaatgtgtcttcaaaacttaaacctagtcttcttgattgtgtttcactatcttggtcttcttcttgtgctctcgagtcttcttgcttcttagctcgtctttctcttcaccttcagagactttttctctactgcgtttctctttctttgacttttttgttttgaccggagccttctcaatctcgtcttcattctcctcatcgtcttcaccctcaaagactatttctctactgcgtttctctttctttgacttctttcttttcacaggagccttctctgtttcatcatcttcctggtccatgatcgtcatcttctcctctgtggcagcctcagccactgtgtttgctacagctgtctctgcttcaaccatgaatccaatcattttacaaacatactaacagaggaatacaaacatagatgcgatttgtgaacggcattagaaaacaaacaaaccttctccagaaaagcccgagtcgaatacaagacctgtaagatgctgcttcaagaaaacctgcaataaaacaatgatatataagtaagactcaacttcaccaaaaaaatactagtccaaaggttgaagagcataccgcagaaatgagctggcgtgtcttaacgtcataaacacgtaaatatcggtccagccctagacaattcaattaaaagaaaaacagatgaaattgttgaacaattaaataaaacaacacaaatgagattgttgttacgggttacggcatatggacgttgaagttgtgataatgaatcttaccgcaagaagctatcacttgatgctgtggatgtctaaccacagatcttatgcttccagagcattttcctaaaaagcttcccaacagctttcctgcaatagagatgctcgattaattgtttgattcagcaagcaacatagtttatgatacatttttagagagaatcaatgaacctgttcgtatatcaaaggaagctaggtcagcagaagcattcccgacatagatagtatgaccgtctgggtcttccgcaattgatgtaatagcggtctcacggaaatcaaaggacaggaccggtctacgttgagtagaaatgtcataaagacggacccgtctccagcacaggcaagttgtgagtgatcaggacaaactttaaactgacc

SEQ ID NO: 62250 - DNA, 379 bp, Arabidopsis thaliana landsberg
  unsure (1)..(379): unsure at all n locations
agcaacagagaaagaccaggcgagggggacgacagaagaaaagcgcaaggccgccgagcaagaacaggggggaagaaacaacacacaaccccccccaaaaaagcagggaaagaggcagccnacccaccaaaccaaagacgcccacagcagccaaacaacaaaaccgggaagagccaccacacncaacacaacccccagccgaaaacgaagaaccaaaaccgngacgcgaagaacaccancaaaccaaacgcacaggagcagaaccaaagagcncacagacccacccaagcgaagaaaanaacgaacccaggaacagcacaagcacaccccccacccacagggaagggccgagcagggcagcagacaaaaaaccgaagag

SEQ ID NO: 62251 - DNA, 818 bp, Arabidopsis thaliana landsberg
ctttattattgagtactgaatagatatatcttcaaccataatgtagctttcccaatttccttacgcgaaaaacagatttacacaaatggagtgtgtagagtaaactaaactcacactattatgactataacacgtacgtagttatcaaattattaatgagtaaaaaagttccaagttaaattatgtacaaattaatcatgtattagcattagattattaaagtgtgaaaaaatgattagattcagacaaccttgaaaataaggagttaaagtcaaagggcgactgcttcacgtaactttagacttacgtcattactaacgtcacctttctttgaaaacctcctccttttggcaactttaataacagatccaattttcttgctcttctcccctattatttggaaattataggaccattttactacaagtgccttctaattctacaaccaagaaaaaaaagaaaaaaaaatttatattacatatctatacgaaatagctagataataagtagttgatgttattgttatgaaaaagttggtggcactaaaaacatgtgatggctaatgacccttagatatgtgtagataagcagactaattatgcaaaaataaatacaaaattgcaaacatcgtaatttgtctggacaattaatcataaaatttaaaacataaaaccattttcaaaataaaaattgggtatgggaaaaaaaatatatatttaaatcctcactttacctatattaggttccatgaaacctccctttaaatcttgcaagaaaaaaatggtggtattaatttaaaaggaaataaaaaatatttt

SEQ ID NO: 62252 - DNA, 831 bp, Arabidopsis thaliana landsberg
gtaaatcctcccaaagctgagggatgttctccttgatattttactgaacgatgcctctgttcacagtgctcttttcagaataatttgtacgactacgcaaaatttagaggtttggatatatactggaatagttcttctactttcctatgggtctgatgtgctttaattgatttactgatatttttcattgtaaaagaacctttgttcgagccgttttattgaaccagcagagattgaaggatggcaacttgctatagtctctgttttggatgttttgaacgtcatactctcccaattttctgaggtaaaagcgttgtcttacctctggccttcttgaaagcttttgcaagtacatgatacatcacaatgatcactttctcccattgaattgtttttcaaaataattgattaatctcttaaattttgcatacaaaatgcaaacacacatcgaatattgctttggctagcaattttttgaacacttttttctctcacttaaatatgtgggtggtcatacacgatttccttccaggcattctggaatttgatagtttgctataaattgttgcagagtacacattctggtcttcctgtgtttcatcaagccatgctgtcatctacaacaaaaccaatctcagttgttgcagctatcacatcactgatttcttacttccgcaatcctgtatggactttcatccaaattcgtagaagttgatgctttgaccaatcacatgtctaaaaatcaaatattttctgcagactatacaggtttgtgctgctcaagtgctgtcaaagttatttgccttggcagaatcatcacaactctatata

SEQ ID NO: 62253 - DNA, 487 bp, Arabidopsis thaliana landsberg
  unsure (1)..(487): unsure at all n locations
ctatgacaacaccacacacatcatgggtgctttttttagttttagatctaaggtttgtaacattcttctagagaccacctcgaccttttatacttcttggatttcaaacctattttctgggtaattgcatatgctatattgtcaacttgacccaagactctgttctattgcacatatacactgtaccacgatgcatgcatgtcaacttgaaccatgctttaactctgacgcacctatatctctgtactgacacaaccgctccactgattgatgcaaccttagcctttaccacctatattgcgtaacatatcgtctttttgttatttctgctctgttacattaggtttactcagctgatactttgctttctttagacttgttcttatgagttagaagcttgatttggatgagtacttacttnnnnnnnnnnnnnnnnnnnnnnnnnnnnnnnnnnactacattccacttgacttcacgcatgtttgtc

SEQ ID NO: 62254 - DNA, 1457 bp, Arabidopsis thaliana landsberg
tctccattttgaaatctaacggtgtaggattcgaaatcgcccatctcgatttcgttctcgccgatttcattctccggcggattaaaattatagccgcagcgaagattacgattatcaaagctcctaacgaagacgataggccaatcaccaaaggagtgtgatttgtacggtgcgttttaacgtttcgttgacgcactggtggcggatgccggtgtggtagacggtggatacggtggtgataagggattttggaatcgttgaagacgaaatcgccgccgtgtaagaatgctgatttaccgaattttcggtatttgtcaaatccaaccgaaccggaaaaccggtttgcagataaattcaagaattggagatggttgagattcggaaagtcaaccgggaacgaaccgttcattgagttctccgataaatccaagtaatccaacgactttaaaccggaaatcggtttaacactaccattgattttacatctggatatatcaaggtggcgtaaacccgatagagaacccaaaccaagaggcaaaacaccgagactgttgtgcgaaagatcgagagttgtgaggttggtaaatccggtaaagttaaccgcgtgtttaaaccgattgaacgagagattcaactccttaaccgcagacaaaaccgaaccattaactggaatcactcgtatagagccaccaaaccggttccgagagagattaacggagacaagacctggcatagaccagagccaagtgggaagagaaccatcgagagagttgttggagagatcaagaacacgtaagcgcgtgagattacgtatagggttccaagaaacggtgccgtttagttttcttgacggaagaacgacgtgagtgataacggcggagcagtttgaggagaaccaggaagagttgaaaccggagacgtaacgaaaaactgtggttagttgatggaagtctgtgccgttaggacaagaaactgtggaagaagagtctgagtgtgagaaggagaccaaagataagagaagaaacaactttagaaacatgtttttagtttgttgttgaagactgttcttccatggaagataaagaaatggtgaagagagaaagatagagagagagagagagagggtttagttgttgcagaatttgagaggagctggtgaggtttatcagacaagagagaagagagagggggagatacattccatacggttgataatatgccaacgatgacgtggattatgatgcaaaaactaaaagtcaaattgttggaaacttgtagctcgattaaatctaatgaagtgatggcaaattatattttactaaaacaaattctctcttcttttaattagttatgttagattttaaaaattccaaattttcttatgccttcaaaatattattaacaattttttttttgtctatatcgcattacctcaaaattgcaattcaatttttttt

SEQ ID NO: 62255 - DNA, 541 bp, Arabidopsis thaliana landsberg
aaaagcgcattttccattccatggtgccacactgccacttagcaaacgcatgtccgttagactcttgattatggtttatttacgtggacaacattataaaatgaatgactttaatttcttgtttttaagaaatttgaacttctaattcaaacccaatcggttgatttatatataccatctactagattcatctccatttatactctggaatattctaacatagttgattgattatgagaatcttttatccagtttacgttatagaaatttagtaaaccaaaagtagcaaaattttgggtaagttaaacttctaggatatgtagttatgcacggtgccttgttaacgaggaaagaaacagaggacatacaaaaaagagtcaacatcaaagacagtaacaatgttgtacgtttagtctctagagttttcgcttgtttgtaataaccacacaccacttttttttccctcacgtccactctctctcccctctctataaatgtccacaaactatactgccattaatcatatacttcactttcattc

SEQ ID NO: 62256 - DNA, 102 bp, Arabidopsis thaliana landsberg
catctctttttgcaggagtgtgccctccggggctttgtaccaactccgtcaaccccatacgggggtactggttctgccggacctgaacccacagctgctggc

SEQ ID NO: 62257 - DNA, 622 bp, Arabidopsis thaliana landsberg
gaatacccagaccgattagcgaagcatcgataatgagtaaacgggccggaaaagtccattttaatatttttgtaataaaccagatgataccgaccacaggagcaaccaccaacagccccagccaggttggctgatgcaatacgcgactaaagaaaccaactgattcttcggtgtgaacttcaccggcgtgggcaaaaaagaaaggcaaatcgtctcctaacaaaaggcgcaatcgccggcgtctttcttggccttcattttagctaaaatcgcttttgcttcactgcttttagtactggctttggcggcctttttagttgtttttttaacggccgtttttttaccgcccgatccaagttcgaatatacccatgctgattcctttatattttatagctgacgctcatattctacaccacctctgtgttatagtgtaggcataagcagtttaaccaaataaacagtgtatatttttgccgaccttgagcaacaaattacccggctgggactttgaaccgtctaatcgacacagtggtcctagccctggaaactgcctggaccttgtttttaaaaggcaaagtattaaaactgcctatatttatatggcccttacctgtgagttc

SEQ ID NO: 62258 - DNA, 1141 bp, Arabidopsis thaliana landsberg
ggatcaatcactactcctcgaacagcttctatcgactttaggtgatgtccctttctgcaataagttatgtttcttaagagatgaaatcaaaactgcttaccatctaaagaatgtttggaattgttcgaactagtgttaatcatgcgaagggctcatcaaagactatcccaaagcatgaatcaaagacgctatcagagcacaaggtatatatatttgcgttgtttatgtctcagtagacacaactttgtctaacccttaataatgtttttctccaagctattttattttattttggctgatatgtttatgaattttgtagagcgttgttaggtgtgcaagatttagtcctgatggaatgttttttgctactggcggtgcagacacatctattaagctctttgaggtaccaaacttttgtcatattcattgtaccaactttttttccttcaagcatcgtcaagagttgatagttctgtggatattccgtgttgtttctttgaggtgccaaaagttaaacagatgatttcaggagatactcaagctcgaccattaatacggactttttatgatcatgctgaagtaagcgtttctttcttcaaaatttttgccgttctgattttgtgtatctcttaaacaggctcttaaattagtgataatcatttgcagccgataaacgatcttgatttccaccctcggagcacaatcctaatatctagtgccaaagacaactgtataaagtatatatttacgttttccctacctaaaatgaattctcttggtgattacaagaaaagtttgtgttcaactcgtttttgtgtcatttcttgtgacgtggtaggttcttcgacttctccaaaaccacggctaaacgagcattcaaagtttttcaggtagagatcatggttgttatatcagtttctgtttagctacatgttgaaaacactgtatctcatccaatctttaactccaaattctgcaggatacccataacgtgcgctctatatcttttcatccgtcaggagagtttcttcttgcaggtgattttctattatagtttgaattcaaagagataaagattctctttgaattcaaactatgattcagatgacaatcttttcgtgatattgcgaaactgaaaact

SEQ ID NO: 62259 - DNA, 1389 bp, Arabidopsis thaliana landsberg
  unsure (1)..(1389): unsure at all n locations
cagacccgagctacattacaaaagcttcccgtgagagctacataatctaaaactattgagatgatgatgtcatcggattcgggagtggggctccatttgaaatttcaccttcatattccttcttccctcttctttatctaccaaaccatgttccttgagacatgattttggtgatggaacagacttttgcggcttctgaggcaaaggaactttttttacttcattgtcttcctcaaagggttcgaggcggtacgtaaccttagactttcctagtctaaactttttgctcctagcannnnnnnnnnnnnnnnnnnnnnnnnnnnnnnnnnnnnntactactttcgcagagctttcccctgggtttacatcagttcttgaagcatctattttcccaaacacactgaatctcttcaacagttctgctttggacgggagatccccatgtctacacaaaaacttcatccgcaaacattttggattagcaagccgcatatctttcatcaggtgtagattcagcgatttatcagtagaaatagattgttggcctgctttcttctttctcttggagtaacgtgcagatgctttgtctcgacttgccttccttttgacaccaatggatctgacattatcaactgatctcgtctggttttcaacagttgttccagcttccaaatcttgtaattgttctgcaggtgctcctgcatcatcagaactaaattctttgtttgaagtgcctgtactaggtagcgaaacctgtcccacctccacaatatgtgactccaacgtatattcagagcagttttctcgtgttccattaagactattcctacctaacgactgctcattcaaggtcttggcactgatgatagagctatcaagcttgtttcttgggctagcatatttttttctcactgaacaagctagagtgtgacaggctcctggaacaacaaaagaaacaggctttgccaaataagctttgtcgttgctcgaatcaagcaagggtgacagttcatttgtcgatgtcacaggtccatcaaccaaaccaatgatgtcatcatgagtttcaatcataacatcaggaagtgcttctgatacatcaactcttgaggcagcaacggaagtggtgtcttcctctatcatatcttcaatagaaggttctgaattcaataagcagatattctgctcaacttgacagcattctttactcttggacaggtgaccatcatcctcatgaacagctcttctaaccatggtttcacaagctttcatggtactagaattagaactggttcgagggctcctcgtattccatgtgcaaatctgaactactttatcaacatgctgaacagaagaacaacaagggagatccttcggcaatggatctcttag

SEQ ID NO: 62260 - DNA, 396 bp, Arabidopsis thaliana landsberg
  unsure (1)..(396): unsure at all n locations
tttaatgacatggcaaaaaaangaggatttgtgggtttctaatgattaatctttttttgggggataagggtaattaactaacgaattatctagtccccttttataaccaaatgaatttgaataaaagaatctgatgtttctttttttgtgctgagaatccgatgttttttgtgaaacaaaatttttgtatcacattttattacgtaaacattttaaaaagacacacaaacacaagtacacaacgnatacaaatttcaacaataaaaagaaaaacgataacgacataacatacataataacacatggacctgagtcattgatcttatagngaactctcaacatgcgagtttggaattccatgcgagtctctatatccaatttaagctacatttttta

SEQ ID NO: 62261 - DNA, 431 bp, Arabidopsis thaliana landsberg
cttggacagtctccattttcccgatttcttcctgataatgaaaatgggtgtattccagggtgagtgagtctccaccaaatgtcctgcttctagctgctcctgcactagcaaagaagcggcctctattttctctttaggtaaagaccactgatctacccacaccggaatatgattacgccattggattttttcggcgtgggatgcaggcaagacagaggccgctactgaaaatactataaacctctcacgttagagtggggtttaagatcctcaaaagccttaatattctgtgccttctttattagaccacgatcaggcaggggtccctgcctgaacgagtgtgcattcaccatcttcttagaactgaacaagataacgccgagttgtgacaacagatctctttcgcacagggttgcaggcaaactaggcat

SEQ ID NO: 62262 - DNA, 135 bp, Arabidopsis thaliana landsberg
ttttttttaaaaaaatttttttttttataaaaggggggggttaaaaaaaaaaggggggttttttttaaaaaaaaaaaaaaaaaaaaaaaaagggggggcctccttttttcttaaaaaaaaaaaaaaaaagggggg

SEQ ID NO: 62263 - DNA, 538 bp, Arabidopsis thaliana landsberg
  unsure (1)..(538): unsure at all n locations
gccgatcggagtcgacgtcacttattacgagccgctgatcggcgccggcatcgatgcactgtttaatgttcaacacccgcgccgtcttctgcgaaacacccgggtcgctcacgttcgaaannnnnnnnnnnnnnnnnnnnnnnnnnnnnnnnnnnnnnnnnnnnnnnnnnnnnnnnnnnnnnnnnnnnnnnnnnnnnnnntatttcttcaagtcgctggcgcatggcgtcgacgtgtcaatccacgccgcgaccaagtacatcgtcgggcattccgacgtaatgctgggcatcgtagtaacgaatgaacggcattgggagccgttacgcaaaagcgtcgccgatttcggctacagcgtcagcccggacgactgctatcttgcattgcgcggcatgcgcacgctgggcgtgcggctgcgccagcaacaggccaatgcgctggcagtggcgcaatggctggccacacggcctgaagtgaagcgggtgctctatccggcgctgcctggtgatccgggacatgcgatctggaagcgtgattt

SEQ ID NO: 62264 - DNA, 1648 bp, Arabidopsis thaliana landsberg
gggccgagctaaatgtgagaatccaacaccaacagccacttagaacaacttttcaagaatgtgtatcatctacctcttccgccatattaagaatatgtgtagttgggcttcgttgagacatatgaattgcgcttgcctatgacaatcccagatgttacttttcttttcatccctaggaagaaaatcttttcgtaacttcaaatcattacaagcgcaaatagctagctactatgtgtgatgcatttagttactttgtgctgagaattggggtctttaatgtgaaatcaaaagtttagggtttctcgtggatattagaaaacgttaaggttggaatataaaggaaaagataaactgaaagagtctgcatagcacactccagcttaattccgtatcgttttaggatttctgacttcactctttgacggctatatattaatgtgattttccattatgtcaacttattgtcaaatgttaattattattttttagataagttttcgtgaaagttgaaacggtgagacttgtgagtgacgaatgtataggaagaaactatggaggtgggttccgtttaaggctttggtggtgtggagattagaagtcatggccgccatatttgagtcacgcacgtgtccacctaccttaccttcttataacttattcattcatgtgttcgataaaatatatttgatattaatttaaacatataacatagaagtgcacaattacaagagttttttttttgtcgctacaagagtttttacttacgttacgtatatgcaaacgcaagcaattctgcatctatttgtttttcaatggcagtcatagttgatatcaaataaataaattactaatgccacatgtttttttagcacagcttcataattcataggagtatcgatatgtaacacaataatggatcttgtagtaaaatatgaatagagtcaataaaaaaaaaaaagagttaatctgtgcgatataatgaaattagaacgaaactcgatttttaggattttaaaatataacaaaactcaaatgtgttataacaattcaaaaaaaaaaaaaaaaacttaacacaataattagtttttctcattttgagaaaaccaaattctcgaaagtatgtgaaaaataccatggaatttgaaggacttttatagattaccaaatagtaaacaaaatttctaaacttgttttactatgattttgtcacgaatacaaaatcaaactcagatagagaaattaggtgatatatagccataattgtgttgattactaaaaataaggtaaatgaccaccatggtaccatactattccatgaacaatatagacaaatagccttccattgttataattgggatattgtcaaatccatcccgtatctatatatattattatacacaagtagaacttttgatggtgattcattatctaccattcacatgtttttgtatcattaaattgttgattataaaagcaggatttgattccacctactaagaagtaggaaatataaaaacataacgccaattttcgttcatcaaaaccaagatttttttgtcgacacaatcaaaccaaataaataatgatactgttttttatagtagtatatatatttcttttcctatagagtattttatctgaggtcatg

SEQ ID NO: 62265 - DNA, 2330 bp, Arabidopsis thaliana landsberg
actttactattttgtctcttaattgtccgttttctaggctattaataatttgtcttattggtttagaaaacatttgttaattaatttcccataaaaatagaagcttataatattgtctagagattatattttagatatttatcaccacaaataaaataaaataattgtcaatctttttaaacagatacttttgaagaatatccatactttttgatattcttgtttagttattaaattaaattatcagatatacctacgaactaatatggatttatatatttcagttacacttttggttttataacttgtagtcaacagaaaaataaaattgttgtcaagacatttgaattttagaaactaacttattttggttaattaataggtcaaaagattcaaaataaatttgtttctcaaattttagtggtcaatattaaatttctgaccaacaaaaatcacaaaacctcagttttgatcatttattattaattatataattgtgaattttgttttgatttaaggctttttaataagttaaaaagttttgtttcttgttcgtttaggtttttttttttttgttatacttataatcagttttagacttagaggaaattgaacagtttagaatagtaggtctagctaacctctttttttttggccggtctacataaccttgcgaaggatagatctttcagctagcaatttaattcatttctgcttaccattgtttcttacttaaattagttacattaccatcaatgtacctcaattcgtgtgtgagcgtttttaacaaacaaaaaaagtcgtttgtgagaattaaaagatggggggatacaaaaaccgaacaataattgaatactttttgaccggagtgtaacatcaataaaggtgttaattagagaatgtaattaggctttttactaacgggaataataaattaaaaactgtcctcgatctactttactatgtatggaaggaacattcgcatgtggcattgtgggaagctgaatctcaaaacttattttaagttttgacattccttacacttatgaatatactatacgattttttttttatcatcaatatacggattagtacattgatgataaaagaaaccacggatgataactattaataattattttattatatgatgaaaatgattatgcatttcacgaaatttcactaaaaaacaattattatgaacaaattcattttgtttatctaataacaataaaaatcattggactttgattttatacgtcgtgggaaggtcgtcgaagcacgttgcgtttgatcattgcatgcatcgtgaaaattccactaaacatcgtcttttaaaaaaagaaacctttaaaacattacaaatggaacgtgaacctataaaatatgataggtagatctcacactttatttacagtattaaacaatatggaacattgacgttaaattattattttctacttataacaatttacacctcccaaaatttggaaaggataaacccaacaaggcaacaagtatcacaaatgtagctgaaatagatgggcttttaaagtttatggattgggccgtcatgaacacatattccataacataacctaattgggtgctccgacttcttttcgcgccgctcgcttgtacatgtcctcttcttcgacttccagataaaatcgcttcctctgtttttttccgatctaaattcacagctcatcgaaaatgggctcacggcaaggaccaccgaagcatcagaacaaattcgcctgggttcccaaagccggcgtcaagatcaacgaaacggtaagctatttgctctgctatgagattaacgaaattgagtgagtagtgtagctagacccttgattttttcggaaatttatgaattgttaggaagtcggcgggagatttagaccattatccgagattaccggagtttgctaccgatgtcgagagcagatcgcctggaaacgcaaatacggcaaatacaaaaccctaactgaagccaccaaatggtatcgtttgatttgaatttagagtcttctttgtcattctctgttggattttgaaattgatttgttttgttgtgtgggtttttttttcttaaaagagcaacctttttgtttgtgggtgcagtcagaagtgtacaaagcgaaatgttcgtctagcataccataagttatgccctggttagtgttttctttctttgcttttgttctcgtactttcttggctaattagagtgtatagatcagtatcttgttttataaattgatgtgttatggtattgaaatgggtatgaaactgataacaggttgtgccaaggagcaaaaggtg

SEQ ID NO: 62266 - DNA, 2431 bp, Arabidopsis thaliana landsberg
taatgaataaaaacaagtaatgtgaaggtagggataatacacgacatgcatatctaacttaagatcacaaaggaccctaataattagttatgtgatagcaacacttgcatgacccatttgcaaaaccctagggtacaaaaaacaattttgaaagaaatttgtttttgatgtggatgccccaggagaggcctagcaatagcataacattacatctacatatgggggaccattactagctaactattttcttacatttatatacaaatatttattgtaaaacttctcaaaacgtaatgttcaaagcagcaggaccatagaactagcaatgtctcggattgtccttaaaagtataaaatctattctcttttagttacttggttctttcctctgagtgtttaagtgaggatcacaagttcatcaaggaccatcttggagctgcaaactattcatgaaagattctttatcaagagacaatgattcgctagatgtgtctttccacatttaattcattgttgataaagtactactcttgtttcttttaagtcgccttatattaatcaaacctaactaaaatacaacgtttagcatattctttcaagtttctgtatcaagtgcagcttacacttaacgtttccttctattatgtgtgaaattttgaggttgatttcatgagaacaacccataacttttcttttattcatgtatcccctaaaagtctacaataacagtcatttcttcaaaactgggaatttgtttttactatctacagtttgatttttttaactagttgaaaggaattttttttactatttctttttcctatgatatgtatctcacaactaaaagatccaaaactcattgattttttttgagaaaaagagttcttaaaatattaagggtttgtcttttttaacatgaattaattgcacagtaatagggttctagggtagtagccctagcatctcctttcactcaggaaatgtccctctcatctctctctttcatcacacacacacatacatgcacacacacacaaacacaaacacaaacactttctctctggtttaattaaacccccttaagcccacatgaccacctctttctttttaaggtcacaagacccactttgctaatttagtttccacacgcagagagagaaacaaagagagagatgggagggagggtttgtggcagataaactgatagaaaactttcgaacctctcttctttaacttttactactctctattcgtttttctcttacttttgaggtgccgcctccaactgaaagtcttctaatatatattctcaattattctagctctccgggagaagtcttatctcacgccaatctctcatttcccactatgtatatgtcccacaagatcgctttcttagttctatcttctattaatttcctaatctttaaattcacacttttttttttgaaatttctggcaggaggcatgaggagaattacttagacctcaacaatcttccagatgatttttctaaagatggcaataagcaagccctcgaggaaggttcttcctctggtatgcataccatgaaaaaccctaattctttatatatatatatattttaatttaaatatattcttttaactttatatatatgaaacatggaggtatatagttattagtgtgtgtattgttaatgtgaaggtttatttggtgttggtaattaattaggtcaaagaaagaagaaagggagtaaagaagggaaagatgagagtgggaaagtgtacgaatgtcgattttgttcactcaagttctgcaaatcccaaactcttggtggccacatgaatcgccaccgacaaggtatgtccatttatatacactcttcttcaaccctcttttaactttcatataatcatattcacactttttagttcgtccaaaaaaacccaaattttctatataactctttgtctttgataaatgattgatgtcacatccatgctttgactacaactaagtaccagtagatagatgtaactaattgcatttaagactaaaattagtttgatgtccttttggttctataaacctaaagagagggagaccgagacattgaatcaagctcgtcaattggtctaccgtaacgataccataaccccacctggaatttctcctttcgggtactctctcttccaaaaaaatttcaaaattatataatatgttactcaatgtacttattatcatcatttttttatgtaattatgtgagttattatcatatgaatgaggtgaatcataattgtaattatttgcagctatcatcataccacagatccaacaatataccggtcggtttactcatcaccaatgatatatcctggaagctcttcaacgaacttggttccgcaaccgccgatgccaccaccaccgcctccatatccatactcttca

SEQ ID NO: 62267 - DNA, 420 bp, Arabidopsis thaliana landsberg
ggaactcggacatgaactggtgattaccacatctaataattcgtttaagaacgtttacatccaggcagctacctggaacggcaaaaaggtggatcactgctggatgttccgagatgaattcatgaaaggcgggcacctcaaatttatcatgggcaataaaccgaacgtaaactggggagtggcgaacccacccccgtctgtacaatagcaggtatttcttctcattccaaaaagattcgatctcttcaagggatttccctttagttccaggtaataatttatagacagtaataaaagcgacaaaacagaaaaaggcctacacccccttggtagctgtcgtacctgcctctctcagagtaccggcgacacctgccccataatggtgtcggcctcccacatcaccatgatactaattcccat

SEQ ID NO: 62268 - DNA, 605 bp, Arabidopsis thaliana landsberg
ctattttggttacacgtggtttcataacttctccaaaatggtgcctaggtgtttttatgctttgtccgagccttttagaaaaaagttaatctcttttagacatatcgagatctcctgcaaccacaaactctcgtttgagtaacgtgactcactcaaagacattttcttctctaaatagaacgagagaaacccactttaaactccaaaccaaatatcttcttcttctatctataacttagagagacaatgaagggttcttgcacaaaaccagtgtttttcacttgtacaatccttctcattttaattgttgcccaagaaaacagagtcgctgcagtagatccatgtaatcctgcgcagctgagtccatgcttggagaccataatgaaagggtctgagccatcggatctgtgttgcatcaaggtgaaggagcaacagcattgtatctgccagtacttgaagaaccctaacttcaaatctttccttaactccccaaacgccaaaataatcgccactgaatgtcattgtccgtatccgaaatgctagtcccaggattttcgttctaatttttcgatgtttctgtttctttgcttttcaagaaccaaaaa

SEQ ID NO: 62269 - DNA, 1733 bp, Arabidopsis thaliana landsberg
ggctgctcttcttttgctggtcctgtctccagttccatacaccatctaattgcttcctatgatgcggactactccaccgctgcaatctgtatgtattacactctccaaaccgatttctctttcgatattccataccaaatctattggaactccgagaaatccctgttttctgaaatctaccaagctcaggctgcttagaaccaataccagtctccctgtgattacaacgaaagctccttcttgtttcagggctttgcacttcaccagcttctcgcccttgaacttcagggaatctccaacctccataagtactgctgtcccgaccgcttcttcccatgagtaaggcctgagaggttgttctctactcagaggcctcggaagacgaagcctatgcctttgggatcttatgttatgaatcctgcttcggtttcttatactctgtgcggtttttccagttacctcaaggatactagcggttggtctggccacaagtccagtaatccccatggccactcctgaaccatatatataggcacccagttaacatgcataaaattagaaagccagaaacaataggacagcgtgtacacgaacatcaaatgtcttgaatgtctatagatgacttgagcggtggttctcgcttaaatacctgagatgacgcctggaagaccatgtttctcagctcctcttattggtgattgaaggagaccagtgagtccctgtgatgaacatcgtgtcagctggcatgcttaaattctttatgcaagttcagaagaatttgacagaagtcactgacttcaagtaactttcaagactaagtgaacatcaaatcagtatataagacatacttccaaagaaagtgcaaataacatacctcaaacacttcacctataactcctttgctacgcgatccttcacccaattgctgcttctccatccttgcaacatcatggtcattgaatgtaaatgcaacaataccctgcaacgaattggtaattctgtaaatatttcttgaaggtggcgtctacaccatagatttttaagcaaacagatgcatcgtaccttgtgtgcagctttactaaattgagtggcagcatcacttaaagcataaatagtgctactgaagagacttgtggttccgtgagccattccttgaataattcctgctgggctctgttcaagtaatctaggttagcatataagttaaaagtgcctaaaccagacattacatgaaaatgttaagcaacaaaaagagattttaatcataacctttgagatactcctgctgggagctgacaggaaatctttaattccaaatgcaacattcctcgcaaaccccatgggatttccaataacaccagcagagccgaaaacctgtgttatagtacattgcagaaatacgtccagcaggtatatagggaatagtatgagtgctctaggaaatgaaaacactaagtgaaaaagtgacattttaccagttcttaccttgtaaatctcatgaagaatttggcgggtatagtgcccaacaaggatctcctgaaatgattcccaactagtaatttgatgagcaattgtcaattgtttgagatgtattcgagcaccctcgacatcggcaagagccataagacctctctgaaatcgaacataatgattcagttaaccatattaaatataacatccttcaattaagaaataacatggcgttataagaatatgaatcaatattatgttat

SEQ ID NO: 62270 - DNA, 1573 bp, Arabidopsis thaliana landsberg
agccggtgtgagtttaatctaatctaccttcattggttctttactcataatccataatcaatggacacctaacatctatttaaaattgatttaccacgaccaatccaaacagactctccaacaaatgacgagattaacaaccgtgaacatcaataaaacatgtgcttcgtcggaccgtgttattaggtataattatattccacaccggaaattagacaaggatcttgacaatatatcagagatatgggtttctcaactaattgctaattagttcttgattaattatatatgtttttctaatatgatattagaatccgatctacacattttctaatccgatctataatcgttctgacccaaatttgatctatcgattattgtccagaacactaaaattaataaatgatcatctcgaaaaattagaagttggataaaattcctgacaatatataaaaaaaatataaatatctctatttattgtcatttagttttgtattgaatacacacattactctaatacgtgtatgaccatcgaagaaagctcatacccggatctcccacacaagttttacactgccaaacgatagtataacatcttccataaggtaccttttgtttgttttcaaattctattgctccgtttttttggcggagagtttcaacttatttcaaaaagatagaaatcctagtagaacaatttcatcaaattatttaattttaaatttgatatctatctttatttttcttcgtataatacagattacatcgagtatgcatattgatatagtttcaacaatatatctattatgaattctgatgaactcttaaaagataatataaatgtacaaccacaagcgtccgttgtacatgcactaacttcacaaattagaaaaattgtaatataaataacaacttttccatttagagttcatattatataaagcgctttgtaatggaacattcgtcgaaagtaatataaagcgaataacaccataaaggacaaaaaaatcctattaaaagacgataataaacaaacttacaataaatggacctaaaaaaaaattgtattattagcaaaattgcaaattaatttgacgtagttactggttaagcagtcagcagtcggcagacgagttgaagtgggccaaaattgagcccccactctgggctcaccatcctatccacgtggttgcatacttgtcagcacacattgccacgagattatcaaactgaacaaaacttacctaccgagtaatttatccaaaaatgttaactaatgaagctactcgtttaggaacattttgaaaatgttgttcattcggttttaaaacgagataatcttgtttccaaaagacaaatgaacagatcacaattaatagaaaacgaataacgaattagaccggaaaatagtttatcaatcatatgatcagaccgattcagacaaataaatagatgaattcttttacagttctggtttaaatgcttgtttaatgtttgatgtagaaaaatttacaactaagcacacatagcgctactgcatgccgattgtctactaaacatagttgaaaatata

SEQ ID NO: 62271 - DNA, 1518 bp, Arabidopsis thaliana landsberg
tggggcgtcttgctacctataaattaatgctaagctcagccacagtcatcttctttcaaccaaacgagtttcctctaaatgtttaccatcagtctccagtggtatccgtgttcgatctccatcagaatagaaatagttatatctgcattcagagagagaaatgattcttacaaaaagaaccagagattttgctttcttgttcatcagaagcttttagtcagaaacttgtaatctctaggaacagaggtatagagatgtaaatgttctgtctatgccaagttcaaaaactgatgagagatatcggttgtgttttaccttgttataagcaaaattcactctgccgtttggaaatggtgaggagccaactcagacaaccataaggaatcaattattgtgaggttcttgatgtacttcttgctggtttgcatgagctcgttgaagataacacattctggtttcgcacggaataaaacagaagttgggtggatgtggacaacctcaccactttccaaagccctgtcaagtaattagatgacaatggaagtttttgttgtgagcaaaagagtagagtatattaggcgtatttacatgttaagacaataagtgaaccaagaacggaaccaacctgtatgtaccggccaattgtctctgtgctgctttaaggaaaaatgatgcagcaagacatctacgaaacgcaagcatgtcatttccgcatgaagacacattaaagcctatctgttcaacatgttcacgaatttgcctgcaacaatcctttgtgtgattatcataattcatcataaggcataacagtcaactgtaattatctacgaagaaggcatggccaacctatatatgtcacgagcatgcttcaaggaacggctattcacatagttctccttacaccattttttcataattttatcaatattgtttccactgccggctgcttttctcttttccaagaactcatctgactcccgataaacactaagataagttaggtgatccccttcaacgctagcaaagtggttttttgaggttcttgcctggcaaaacaaagaataaaggtggctggtttaatcaactgttgatataaaggaaaatgtgaatatatcatggtcctttggtatactcacctcttctctcttctcacgcggatcataaaatatggactccacactgagcacggcaacagtgatcagcatttcttctagacagttgaattgattggccaaaattagagctttggagtatacaggttccagtgggagccgtgacatttggtagccaacgggattctctagtttaccatcatctgccaaggcaccaagcgaatgcaactctgccaatgcttttataatcgcccccctgtttaacatcagatgacaatctagatcaacaaagtgtttatgaaaaaccattagagaatgaatgcttcagctatgagagtcagacttcctttaaggactttagttatagcacccaatcaccgatattctcagtataagagtgacagag

SEQ ID NO: 62272 - DNA, 458 bp, Arabidopsis thaliana landsberg
gttacttctataaaaagaaaaatatctcattattaaaaacgaaatttctatgtataaaattatcgctatattatcacttttactgaaccgatgtcaaattactcgattacaacatcaattgttataattgatgctaaactacatagtttgtatcatttattaataaataatttttaaattgatattgtttatttttgtgatactatgtaagtgctgcaatcaaccatttttcttgtattgtatgaaaatgatttgcctaaaatcatatatcagctaatcaaagagatagatgcatatgtgctaattaattaaacaatacatatgaaattatacctcttatataaaaccatcgacaaagagttgtgatgaatgatgatttctgtatattaatgatttttggtgaaacatataaatgattttataaatatgaatggtttgcaatacaatatgcttttatg

SEQ ID NO: 62273 - DNA, 1651 bp, Arabidopsis thaliana landsberg
gtgtaacaccagaactatatgtttacgaatagcctcagaccattggtcacatcctgcttgaaagattggctcttgggtattatcaaatccatatgatggtgcagatgagattcttattgaccttatgcagtcagatgtaaatggcgtatccattaatctatcatactgaagatcttcggttcccttaaatccagatattgcgcgaaggcatccatccaaaacctacatacaatcctgtgtaagttcttatttgtaaacgtggcccaaagacattgctcaaatggttcagctgtcaagctaggttctttccaagagcagacaaaatcaaaactaaatctgagcatactaccaatgagcaatgaatacccctgctccacagaagttagggaatttagaatatgttttcaatttaaatatagagaacatagttatttgatatcatgccttaatagcagctgtaaggactttatccccattatatccaacagactctctaaccgaagacttccatgtcgttggagaatcttcaacaacagcagactgcaaaagtttatacacgaggatagagaccctttcccaatatgctggcactaaggttggataattgagagccacagctcggaggacctgcgcgaaaaccatataattttggatcaaaacacaggacaggtaatgtagcagctctcattatcaaaatctgtacatagggataaatgaaagggaaacaaaaagtcagcatattcctgaaccatgacccagtcttacataagttactccctcagcaaaaaaaatgttaaaaagttttcttaatgtacttacagagttcagacagcaccatatgtacctgaatttattctgtgtctatccttctactttcataagaactccttagaagggaaatactataataagaacaacctaatacctgaagagcctcaatgcatgttgatgcgtcagaaaattgctcagcaaaacgaaataaagtagaaagaactcctgaattccattcacatccattgaatcctgaaatgacttcaaacaagcatgtcaaatattataataagattctggttaggacagtagtcataatgaacaggcgcaagataaggtcaacctgctgatgtctcatccaaaagcatattatgcactttcatttgaggaggaaaggtggaaaatgcagctgacaggcaacctattgcggcaacctgtataaaacagatcatgacataggtatggcattcacaggaccaatatttataaaagaagctagagttcagagaaaattttattcagcaagttaaaagcctgagttcccagctcagtataaccaaccatcaaatgtgggaaggcttcgatagagtggcgaaaatgataatcattggggaatggtattggtgtgggttaggtattgggtccagagctgagaatcctctattagaaatagtctcaatactgtctttggtttaatcaatgaagaaagatctttacttggttcttaccatacctcttcttttcctccgtgaatgaaaacttaagattgtttggattaggaattcagcgaaaagaaaggcactagaagtctagaacatattttatagattggataaggactgcaaaacataaacagagacaaaaaatctcccaaacacga

SEQ ID NO: 62274 - DNA, 127 bp, Arabidopsis thaliana landsberg
aaataaaaaaaaaaagaaggaagaaaaaaaaaaggaaaaaaaaaaagaaagaaaaaggaggacggacggaaaccaaagaaataaaggaaagaacaagaaagaaaaaaaaaaaaaaaaggaaaaaaag

SEQ ID NO: 62275 - DNA, 1599 bp, Arabidopsis thaliana landsberg
tcaaagcatacttagggttattgtgattactgttcatgatttgatcacgttaatgatagattggttgattatgaacaagagttgtggcaaattgctttatagccaatgcttctttggtgtttagttatgagatcaagttattgaaccgatttgagatagatgtatatttaggcgattgctttttgccatgccttgatactgcttcaagaaagttgagctttttatgtgtaaatgtatacacaatgagaaatttcttagccactattagtttctgtttgtgtctatagaaacagagaccagccacctacctatacatagctgaacttagctcaggctctgactctgataatgcaagttgctattgatgattagaaaaaggcaattagtgcttactttaatatagtgcagtcaaagtcaaagtcatttactttatttgagttacttgctttaagtaaatgtagttggatcagtcttgtggtcttcaattgcttaagttggtccatttactaaagattttgagtttcttttttctcaggagcctggagagatcgaagaggactttgctcaagttgatacaaaaaagttaataaccagatttttcacttcgcgtaacccacgtccaccttgcattccaaagtcagttggtttcagaggtttacctgatccaccttctttgcccgcttggctcaccgaacaagatgtcaggttctacggagacaagtttagccaaaaaggcttcaccggtgggctaaactactatcgcgccctgaacctgtaagtcttatgaattctagccacctattctacatcatacaatcatcttttcatggttaatcttggacttgaatcaatctggtcttatcctaacctgcagaagctgggaactaacagctccatggaccggtctacaaatcaaagtccctgtgaaattcatagtgggtgatctagacataacatacaatatccccggaacaaaggaatacatacatgaaggtggtttgaagaagcacgtaccgtttctacaagaagtggtggtaatggaaggtgtaggtcacttcctccatcaagagaagcctgacgaggtcactgaccatatctatggcttcttcaagaaattcagaacccgcgaaaccgcatccttgtagtagttctccgtctgcacaatgtcaaattcaatgttgattaagcttgatcaaggttacttactgtcttagagccctactatgtaatgttttgaaggatgctatgtgtgtattgtgcttgtttaataatttagcaaaatataataatagaacaaataatttctcaaatgttggccatctccagttcaatatatccttaaacttttcttatatccaaattaattttcaaaatgttgaattcctatggtttctagaaaacttcaattaagcatagatgattttttttaggtgaaattaatataaaagaactgtaatatatgtacaattctatcaaaaattataaatctactaaggacatttatacctaccaactgaataaattcaataaaatatataataccaatgttatgagaaatggcagctgaattggtgaattaatttttcggcagtggatatt

SEQ ID NO: 62276 - DNA, 1192 bp, Arabidopsis thaliana landsberg
caaagactaaagaaaaagaaaatatgcaatgaagagctaaactatgcttctcagcttttcaatactaagctccttcttattttgggtcaattgtcaaaaaccctaccaaattctacattcgtttatatggacatctacactatcatcagtcagatgctagaaactcctgcggcttatggtaaattatttattgtgacaattcatataacactttgttatttataatatctgttcatgcatttgaattttaaaatatttgcatgcaggatttgaggagacaaagaaaccgtgttgcaaaacaggattattaagcgcaggtgccctctgcaagaagtctacatcgaaaatctgtcccaatacatcgtcttacttgttttgggacggtgtgcatcctactcaaagagcttataaaactataaacaaagtacttataaaagaataccttcatgttttatctaaataatagtattacattatttatctcatgcgaaaataaagacttttgctatgtactaatgatgtagaagatgtgggcccgtttctgtgactaaaaatgtagttaagcaaacaacattttgagatagtaatgtaagatttttcttttgtgtcaaacgaatccccatcgagtcatgtttgtattagtttatgatcatgtttgtggtgtataatggctaaataaatttgatctgtacgtaatttcttaattcttgatatttgtatgagaaattcagttacttttctaggatttatatttgatgtgttaagaaaactaaagcggtgagttttagactataatctcgttttattatgatagatgagtgcgacttgatctaccactttactctggtagacaaactctttgcatataagctattaaaatcatagagttcgaggcccgttatccgataaaaataaataaatttgaaaatacaaataagttcatatgaaaatgggtatttagatatttgagaagttgaaaccacatccgaacaattttttttacatcggctaccatatttgataacatgaaaatccgaaccaaatgtgttttgagtaggggtacatccaatgggttcttatcatttaatttctaaaataatgtatggtataatataggaaaactatggggatatatcaagaattcgcagacattgattgatggacttcaaatgcctcggagtagtaccttaaa

SEQ ID NO: 62277 - DNA, 678 bp, Arabidopsis thaliana landsberg
taatcataataattaatcttaaatagttaaagtgatataaaattttgaaaaattctaacatctagtaaaaaaacatacgtcacatatggttcctgattttttattcatcatattgaatctttataagtgtgtttaatcctaagattgtttactttttcaacatcttcgttgcaagagttaataagtagaagaagacaaatgagttggacccaacgaacacgaatttcttcatgccataaatatattccactacattgtttgttttcgtatgaattccactacattgacatctgtttgttgattttaaattgataactcatttaactcattaaggtagctgcatatttcagacttcatatagacttttggtttaccacgctaagagacgtcgatacccactaatatgcggatgtgcgtaaaaaaactatacagtaagtaatacaagacctttgtatttcacttattaatttgatcaaattttttcaaactagcaattgaccggaaatatccataagttgatataatggaatttcactctcttttttcttcaatctccagaaagttgaatgaaggactaagaactatatcaatttgaatcatttcaacttttagattgattgtaaatgagttatcttccaatgatgttatagaaaatagacacataacatcatctaacta

SEQ ID NO: 62278 - DNA, 247 bp, Arabidopsis thaliana landsberg
gattgcaacttctgaccgaatgattcttgtgcataaaggttcggtttatcaatttcgagagaacaaagctacccgaggaaattcttaagcacaatctagaagaaaagagaaaatacttttcagatatacaccttgatgttgagaaaagtgatgctgaggttcaggtgagactatgctcttcttaccgttatactggttctttcaatctctcataccttctgtgcctcagaactgggttttagcttgg

SEQ ID NO: 62279 - DNA, 556 bp, Arabidopsis thaliana landsberg
caatgcaagagagaaaagaaaagaagagattatgagaaaatgaactcacttcttgatgatgctgttagcttttctcttttcaatttccctcatgtaagtctttctattttcaacgaatgttggtaaccaactgataatagtccactctgttacttaagaacaaagatctatcttttggatgcgtttacatagtgtttacgttccatgttataattattagctcatattacaaacccagacgtaaacacaaacagataatcatgtcactatacagaatttacctagtatagaagtccatagaggttggtctttgtaccttgtcatagaaaagcgaaggtctgtagttctgtgggatttaacattcggtgtaatatattcttgagatgtagcataaaagtgttggtgggtatatttatagagcaaacctttgcagataggacattggataactcacaaggcttttcggctactcagtttcagggttctctctcttcactatctctctgatagggtctggtgagtacacgtgactggtctcaagaatctcactatatat

SEQ ID NO: 62280 - DNA, 541 bp, Arabidopsis thaliana landsberg
caattcctttctttcttaaacaatgcaaaatcttagatcatgttttaagattcttgaatcctcaaaagtttgttctggttgcgtggccacctttgtttgttcacgtttttcctttttccgatttacttttataaaccctcgcgaaacctatttccctcaccggttttaaaaggcaaaacaatctctcacggcagaggaagacggtggtggccggtgactactcttacgctcagctctctgcacgttctatttttgctgaaaccgttccctcactgcgatgcatctttaaaagttgaatcttcttccatcacttagtttcctttctaaacttctggatctgctcaaatcccttcagaagaaatctcacactggacttcgttgatggcaagagacgtctctcttggaccgtctatcttctgggtggtgattcattggctctccaatgggttttcattgacaaagctagtgagttctctcactcacaatcacggatgctccaaacgtgcaaaacctttggtccctaactactggtctcccacga

SEQ ID NO: 62281 - DNA, 446 bp, Arabidopsis thaliana landsberg
tattatgggaaaaatgggaaagctctgagtataaaagtggttcccaatcgaagaagctttatagtgacacgagactagagttagtagccgcaacgcaacgctaatgcttcataaagaagactgaacctaaaaaaacatatactctcacagactctgaaattttcaactgttgccgtaccagatccttacaagtggtcctactcctatttactaaccatctttattttacattttttactttacatctttcgattttgacacttagagccagtgacaggtgaccaacagaaaccattgtcatcacaagaaactggggtgtgtggctctgatccttacccgctagagaaagctgacaagatcgagacatgctctggccgccagaatgttcgactctctctccacagatgttaagtatctatactctttcatatcctgtattataccac

SEQ ID NO: 62282 - DNA, 1680 bp, Arabidopsis thaliana landsberg
tggatctgcttatgtgaaaatggagtctttttacttgtttttgttcgaatttgtttacaaacgcgtgatctcgagtttcagagatctcaaagcttaaatttttacaatctgatggacttgttttttatttacagggatcttagatttatagcagcaacaaaaaaatgtcaatgccactacaacgtggcatctctggagtacgagtttctgatagcagtgatgatttgagagactctcaaatgaaagacaaaactgaaagagctcgttctactactgataacaacaacttaaccttaaggtttccttttggtttcctctttagtaatcaatattcttccaaacacggtggtggtggcgaaaatggtttttctgctgatccatatagtgcaaggagcaggcatagattgatgttgttgtttctcaagatcagtttggttcttattgtggttattgctcttgctggttctttctggtggactatttccatttcgacttcttccagaggtcatgtatatcacaattataggaggttacaggagcagcttgtttcagacttatgggatattggggagatttctcttggtcctaataggtggaaggagcttgaatattgtaatatagagtctgagaattttgttccttgctttaatgtttctgagagtcttgcactgggttatggaaatggtgatgaaaatgatcggttttgtgggcctggatcaaagcaagaatgtttagagttgccaccggtgaagtatcgagttcctcttaggtggccgactggtaaagatatcatctggcattctaatgttaagattactgctcaagaagttgtttcttctggtagcataaccaagaggtgatgactcgttgcatctctcttgctaaagttgactggttccattgctaagcctcttttttgcctttttttgttcaggatgatgatgatggaagatgaccagatatctttccggtcagcatctcctatgtctgatgaggttgaagactattcccatcagatcgctgaaatgatcgggattaagaaggataacttcatagaagctggtgtaagtcactctcaaattcaaagagtcaatctttgtctctctcatcagttcagtttcttatttgctattttcttcttaatactgtttcaggtgagaactatcttggatattggatgtggttatggtagctttgggcacatctactgtccaaacagattttaaccatgtgcatagcaaactacgaagcctcgggtagccaagttcagctaacactcgaaaggggtcttcctgccatgattggttcttttatatcaaagcaattgccatatccttctctttcctttgatatgttgcattgcttaagatgtggcattgattgggaccagaaaggtaacagtttaatgtcaccccagaatgatttttttcatgtctttaacccgatggaggacccaactttactgtttcaatctgctgtgtagatgggcttctccttgtagaaattgacagggttctcaagcccggtggttactttgtatggacatctccgctcacaaaccctcgtaacaaggatcatcttaaaagatggaactttattcatgattttgctgaaagcatctgttggactcttttaaatcagcaagatgagacagttgtctggaaaaagactatcaacacc

SEQ ID NO: 62283 - DNA, 308 bp, Arabidopsis thaliana landsberg
tagcacaggcatcttacacgaaatagagtctcttttcatcccattgatggggccggtcttgacagatgctctgtggctggcaccgttgggcacatactgatggatgaaaatccacactacggttgatctctgcagtatcgccgaagtcgaataactgagcacggattagctgcattgttttttgcttctaacaaaaattatgtgaacttaacactattacctctttgcatgcaattaacacgtttaaccctggctaagatgtggtgatgattatgatgatatcatgtacatcacatgtgttcaaataa

SEQ ID NO: 62284 - DNA, 1055 bp, Arabidopsis thaliana landsberg
  unsure (1)..(1055): unsure at all n locations
ttactaagcggagcatgatccacagttagagagagagccttgtctagggtttctacagagagaaaacttctctacagagattatcgagtgtatttcgccggaagatctgcagccaactgtgaaactatgcatnnnnnnnnnnnnnnnnnnnnnggtggcgataaagcgatctgctgcggcgaagctacggctattggcgaagaatcgagcggataatcgtgtgttgattggggaatctggagctattcaagctttgattccacttcttcgttgtaacgatccatggacgcaagagcacgcagttacagctctgttaaacctctcgttacacgaccagaacaaagctgtaatcgccgcaggaggagcgattaaatcactagtgtgggtactcaaaacggggacggagacttcaaagcagaacgctgcatgtgctttgcttagtatggcgctattggaggagaacaaaggctcaatcggagcttgcggtgctattccgccgctggtttctcttctgttgaacggatcttgcaggggaaagaaggatgcgttgacgacgctctacaagctgtgtacgcttcagcaaaacaaggagagagcggtcactgctggagcggtgaagccgttggtggaccttgtggctgaggaagggactggtatggcggagaaagctatggtggttctgagtagccttgcagcgatagatgatggcaaagaggctattgtcgaggaaggagggatcgcagcgcttgttgaggccatcgaggatggatctgtgaaagggaaagaatttgcgatcttgacgctgttgcagctttgttctgatagcgttagaaaccgtgggttgcttgtgagggaaggcgcgattcctccgcttgtgggcctctctcagagcggctccgtcagtgttagagctaagcgcaaggtaaaaactttactatttttctattttctcattgcatcttcgttcatttagcttgaccaaatgcgttagcttagctacaaaacactcagattcttctgttacggattagattattcttatgtattggtgcctc

SEQ ID NO: 62285 - DNA, 2029 bp, Arabidopsis thaliana landsberg
agttgctcttcttttttcactctttttctcattatttttttctagatttcttttggtcaaaattttccaacgatttttaaaaaaaatttggaaccaaaaattatataatttggctaggataatagggttgacaaaaaaaaaaattaaaaaagtttttgtctttttcattttaacagaaaaataaactaacttgtaatatgggaaaaatattagctaaacccttttaaaaaaattttaaaaaaattgctactaccaaatattatgccttttaaaaaaaaaaattcgttacttatcatattctgtcggttgttattattggctccaacaaaatgaaaatccctttagcaaaatcagtattgtctacattaattttgtttaaaataagagaaagcgtgaaaaaacatatctagatagatagaattatccactatcacaagtcacacgagtcgtaaatatcggcacgaatagtgtgggcgtacgtacactcaagtcaaaggtacatatcactcaattacgtcttgactaccacatgatgccgattatgtcatgacttaatatcaacgtttttttcaaaaacaaattgacacaaggataatagtaatatctcttgtctacaagttttaagcaatgaaagcaaaaagctttacgaaattgtagttaagttaattaaactattcaagatcttagatcacaagacgactaattattgaaacttgagaagcaaacctctaaacaaatattttggttatccgaaatagttttacaatatcttgctctattttaagagcgtttatgtaatcattcttcactgcaaaactgtactatatatatttggaaaagtcgtttcagtcgtctaagttctatcacataacaaaacttttgttactagaatttcaaatcgaccaagttgtatatatactaatatcatcacaaatacatacataataatataaatgaacaatttgtggcccgttcgagtggatcatatcggagaccgtgatgcttgcaaggtcccaggaggttacgcacgttacactccaaacggtctcatattgcttttcagatctctgtaacggatacaatttctcgcttttttttttcctctctctctctctttctttactcttaaacatagagaataacatagagatgctttatttgactagtacatctcatttcttataaactttgaattttatgggttttgaatgtgatttgttttcttatagattattgatctttcttaggatgatttttggaagcttgtagtaagtagttttcattttgtagccagtgcatgtgcatggttttattaatcaattagtcttgcagatatttttttcctttggtttatttatttatttattgactatttaatttgccttgctgatcattgggtttcaagagagttttgttttccaatgaaagattagtggtgttttcagtatagagaagttagagctgaattagaagacaaaactctctatagtttattcataaattgatctctgcattagaagtaaataccaaagtctctctctcatatatcagatgtagttgtttggattgcataccctagagaatgagaattcgaaccaaaaactacccctacaaatcataaaccgaaagaaaagaatattgattttgactagatgtcaactttcttgagagagatttttaagagcaaaaaaatgtttttgaattgtgtcatacaattcctaatgggcctaacctaaactctgatgggctgttggtgttaaggttaatgtgtacctgagatactttaaactgtaaacttgttgagtgcaaacagttgttatacattttgtctatgataacacctaatgggcctgacctaaactctgatgggctgataaggttaatgtcgcagctgattatatttgaacttttttcatttaaatatttgtacttggctagtaaataccttgcttcagcatgcaaacaagctacaagagccaaatgctacccaatgtgatcttaaaacgtaatcggtaacacaaatgaatat

SEQ ID NO: 62286 - DNA, 866 bp, Arabidopsis thaliana landsberg
atataaataccttatattaccatccgtttacattcatctatgcctacatttcacatgttacgtatttactcacggtcgggtgttctccacataactaacgttaacctcctatattattgtagacaggggttgaatctagatggaatgacacgatattatctaagtaaaaacctgtccatgagactagaggtctttttcaaaatatttatgtagatttttggattattcaactatgactcaacccagagaaagatataaacaagctaaatttaagtgcataaatataatttaaagccgcccaggaccattttttaactaaactttttccatcttttctcagttgttgggtatatatatattacaattgagaactaattttaacatctttcactctggagaaattcaattgggtaatataaaaattgcttgaagtttactaagtatatgttttttttcaaatctttgatcagtggaacacgaaacctagttaagtcatgtttagatccggcaagcaaacggataaacggggaaaaaggtagcttggagctcaacaccaaccagaaagctatttcaatatcaaaccaaaaatatttttattattctttcttttctaaaataagtatttttgatttgaccttgaaaagtactatatataattatatatgtcgtaaatcaataaaaagagggttatattatatattaattaatatcataagactataactaaaccacatttaaattgcaacacagagatcgatcctaatgaacaaaaataaagcaaaagattaatctttgaaacatgaacactatcttcttttctaaaagtacgtacaatatgcatgttaatcaccacttagtaacaacct

SEQ ID NO: 62287 - DNA, 1267 bp, Arabidopsis thaliana landsberg
  unsure (1)..(1267): unsure at all n locations
gttatcataaacccattcaaacagagatttcgaaaagaacccctgctgcctccttcgcggcacttttttgttccaaatccccaattgagctggacagtctctaagcacgtgaagcacagattcaactccacctttacaaacctgagacacattcgaggcgctaagatgtcttcgatgccgttcctcatctgtcataactatgtccagtttggttatatatattttctgtttatacttatatttatatatatttttcctaaatataactattacttttgattatttgttaaacatgtccatggatttaactcaatctcaataaatgcttcttagtcttgtgtctctttatcataatttgttgttgaataaattttttatttaccattgtaaaaaaaaaaactgaaaatttgcgtaaaatcattgtaactcttcttttcttttctttttgactttttgtcaaacgttttcttaatcattataactcttcattcgatatgttttcaattaggatcacatctttcactatgatgttgtctactgctaatatagtctcgttaaatgcttttgagggttacgtccatttaccatattcttcgtaaatgtatcttatattagatatggttaaaaacatattttcaaggttgtctcaatctattagagtcatgtctctgtgtcataaactttgatttcacctttagcagataattttaatcttatgtttttatattttttcatagtattttataatatacatcattttgagttcaaattctttagtaaattttataaaaatttagaatattttatcgtgcaacaccacctataaaaaacctatagtccaccctttttatcttcttttccttagttattgtatcattaacaaaaactccaaaaacaaatacaagaaaatatgtaaaccaaaagccaaacatcagtaaaagttacaaattaaagccattcatggtctaaatttctaaaaagagaaccacccgctaacctattatcaagtcaaaaggatagttttccatgaattcatagttgtggtgcgattttgatacagtagattaattaccatgaaatacatcatatcaatttactaattttataaatatcatctttggatagttcccgacgttcaaatctacataatgcaataatgcatgttgtttacaacagcattgtgtaattnttattaataatctaatcattttaaaattttcttatttaatttaaataattaaatatttaataatacttatgaaaaata

SEQ ID NO: 62288 - DNA, 303 bp, Arabidopsis thaliana landsberg
agaccacatatacaacttgttcaacacataacacttgtaactgtacgtgatgaatcaatccagcatcaaccccagaactagaccggagattcatacaaacagccgatcactcactgctaaatcaaacgctgggtacacctattgtgctatccacgtctttcttcgaaaccatcctcttgccacagattttaaccacatcataagaggaggcttctgcaaatgtatgttgaaactggttcaactaaaccgaaaacgcttaccgaagcggggccattgacaaaatcgaaacatggggactgatcg

SEQ ID NO: 62289 - DNA, 1091 bp, Arabidopsis thaliana landsberg
ccgagtgtggaaatcggtaaactcattggctgtgtcgagaaggctaagccaaagcttggtcaagtgttttagatgttggtcgaggagcaaaactgcgaggaaggggtgttcaagaaggaagcatctgagttgattgattccattggatctgatgtaaagaaagcatatttgaattgcttgattgatctctgtgtcaatctcaataagttggaaagagcttgtgagatcctacaactaggacttgagtatgacatttatacgggtcttcaatcaaaatctgctacccaatggtccttacatctaaaaagtctctctttgggggcagctttgaccgctcttcatgtttggatgaatgacttatcagaagcggctcttgaatccggtgaagagttccctccgttgcttggaatcaacactggacatggaaaacacaaatactcagacaaaggtctagcagctgttttcgagtctcacttgaaggagctaaatgctcctttccatgaagccccagataaggttggctggtttttgactaccagtgttgcggcaaaggcatggttggagtctagacgctcagctggaggagtttctgcgtagctcttgtaattggtatgtagctttgatattgtctatgtggcttcgagctttctccactatttagctttctttctcctgataccggatactggatcaggaaagattttgtaatgctagcaaactcgggttatacacattttgaaacaatttagagaactgattaagtttcattctccttagtttcatttcatggtcttctctgcatatccttctattgactttaatactggggcggtggtgatttgactttgccttcccctggaaagcatgctcttttgctctatttattttacatatttaagacccaggttgacatttgcatgtgcaacaagatatgtttttcaactgctgcttacattagctgaccgtaataaagaaaagagttagtgggtacatgatggtctgcacgttggtccgagagctgaatataaatttgtttgattcatggcatcatcacatcactatcaatcatgggaaactgcattcaacacgtt

SEQ ID NO: 62290 - DNA, 400 bp, Arabidopsis thaliana landsberg
aggatcgacacgcgatggaactgcacgccttcgatcggcagcaacaagcggttcagccctattaactcggcacggatgccgtctccgagttgcgttcgcgcggtcacgtccaatcacgctgggaaacccaccttgccaacaaccagccagtgatagcgcgtcgcctgatacggcgtcggcagccctttgaacagaccgacatcggcgtgatgaatcgcgctggcctagccaagcatcacggcgcgcgcgcgcgtgaccacgcacacgaatgactggccgatcgcttggtggcctatacacacgccgaggaccggaaagcgcccatacagacgggcgagcaaatccagacaaagagccgctttgtcaggcgagcacgggcccggggagagcacgatggggc

SEQ ID NO: 62291 - DNA, 457 bp, Arabidopsis thaliana landsberg
  unsure (1)..(457): unsure at all n locations
tgtgctctcagttaaggttagggcagatggtattagcatttggctctcttctcttcatgaccatctgtgttcgcttctaccaattcactgctttctggtaaataactcctaattccatattctatattctattatcaaccctaatataatcttagtgacaactctgcagctacttggtgacgatcatgtctttagctataccatggaatctgacgttagcaatggtagatatctattgtgttattctccagcaaccatttcaaaagccacggatccttctcgctatctctattggtgattgggtaacgctattatatatctaatgcttactgagaaaaaannnnnnnnnnnnnnnnnnnnnntcaccaattttcggtttcgcaggtggtgtctgttctagcgttggcttcagcgtcatcggcagctagtgttgttgatattctgcgatcaaacgaat

SEQ ID NO: 62292 - DNA, 722 bp, Arabidopsis thaliana landsberg
aacccctgtaggcaaagtactcaaggttaagaatctcatacctggttctgtatagatcacggttgagttttcttcatccggcgacccggtccattcacaatgcaattccatggcatacgcctggttttataaactcaatctgtttgcaggaataaaaacatttcttaaaagcattcatccgagttatttgtgtactactgatgcctctgcaaactgcatgtatgtgaatttccaactaacatacctgaacttccccagaacatggacctgtgatgggcttggagaagtcaaactccatgactgtgaattccttgctaagtttctgaaaattgtccaagaaaaggaaccatctttacattcccaaagtttgccaatacatataaatctaacaacttctgtttacctttgtctctccacattgccagatgaagaagggcaaacaaggactgtctttaccagaaggtagatcaccacatccccctaaggttgtattcaccagagtatggtcaaacccttctacacttcccaggcaacaacggctcttccagagatcctgcatcataacccatttcatgaataaacaagcaaacgcatttctgttttagaatagctaggaaacgagcgacacagtacttacaggaagatacatcgcacaacctctcaaaacccctttatacggcattaccactgcatcttctgacaggacagaatcaagtagagtt

SEQ ID NO: 62293 - DNA, 808 bp, Arabidopsis thaliana landsberg
tcaaatacagatgagtcatgtgttgagttataaagttagagtttagcagagacctctcttgtttagcttaataggtttgtgagcattctcatctgattatatttgatttttttgatatatattgtaaataaaagataaagagaacttgagttggattagtctttgattgacacccacggactcactcaatctgttaacacgcccacagttaaaaaagccagtggagtttgtcacttttttagacttcaatttttgtcttcttttccaatccatttataaatccgtcaaagtagagattcaatcatgattcgtgctgtcgaaataaaatgtgtctatgtacataactgcaaccataacaatcaatagaggatacatatcacaaaatcaaatttactaaagtttcatatttaagaaattgaacaggattggattaagacaaaaaaaaaaaaaacagtcaagaaatagtatgagtgacgatgagctcgctgtttgaagataaatctaaggaagcttgtattcctatggatgaggaaggaccttccattcttactgtgactggcttccctaagagcttcactccttgtttccaatacttatcatctgtacgcagagaaacaaatccgctaattattccccttatagatcgtgcaagccctgaaagtaacatgttggggaaaaagccaatcctctactgaaaccagctaagaggacaatctataaaaactgccctttagttgtcaaaatttacaggggtaaccggaagccatagcccgccaccgatcaaacttttgatcccttcaagcagaga

SEQ ID NO: 62294 - DNA, 1417 bp, Arabidopsis thaliana landsberg
cgaacttttatgtttgtcagatttccaaataactagtcatttcattgatatcactcaacacagtggtccatcttttaataagtactcagatgcgttttgaacgagcgaattcggtagtgcccaaaaaaaaaacaattgaacgtcgtttatttgctaactaagaaatttctgacatcgataatcaaaacataaatgaatcgcttttgaaaccactcactgtcctaatcaataaacgatttggtattgatcactactgctgttataacgagatttagaggttcgagtgtgtattcgattctaatcttttcaaacgtacgatttgatatgttaacgaccagctaatacagttatacctccatccctcgttaaaaagtaaaatagatgatttttttctatggttatgttacatacatgcatgtatatatatcttccaatattagacagtttagactagattagctagcgttggttttacccggaaacccttcatatttcccttttcctaacaaatacaagcaatttggtagaaatataatgacggttcttgcaacatatattacatgaaaaaagcatatattacatatataacatggtaaattttatgatatatatattatatacctggtttcatgaatttgtgattaatttatagaagtaccaaaacaaatatcagaaaacctatttatttctcattataccacaaatttgaaagtctctgaaaccaatatttgtaaatttttgctattatatatttatggtggtaattttgtaaaacaaaatataatatgagaacaatccgcccatacattacaaaccatattgataacaacaaataaaatttagcatcaactatatagcaatgttttgtgaaagctagttataagatagtataacacaaggctttgcatgtatacataagccctcattttgactatccaaattgtgcattcggagggcctttgggagagattaagacgacatcatttgcttttgttcttttcatggcctgatgtatatattgatctcatcatataaatatataatctactatgaatatttaattaattaccatataaaatttgttaagagaagaatatgaacaaaaaatgtaaaccaacttccaagtaattattaaattacaaaaactaataattcagatctgtcttccatacttgcaatttcctgattggtttataattccaataactttagaaaataatatctcctaataatagtggtattgataagaatttttttataaaaagatttaagcatagccccacacttgacctaaatagaatagtgaaaagtgtcaagtggcctgtgagtagggccatgaccacgtgatttagtttctcacatttctatttttcctactcttctttctacatcctctacttctttcacaattcacact

SEQ ID NO: 62295 - DNA, 2906 bp, Arabidopsis thaliana landsberg
  unsure (1)..(2906): unsure at all n locations
aattgaaattaaatagcacatggattatggatacgtacatacattttccacttcatttacatatctgttttatcttatgctactaatagacagcttagcttatacaaatatatacaattataaaccaactaatacaactgatttaacattcttcaattacattaattcttttgtttcacacaatcattatcctaatattcacacttagatctcgcgattcaaccatatatcatcttctacgatatgatataaagattagttcgaaaaatctagtttaaaattttgagatcaaggagaaacttttaaaactctgttctaaagttttagatctaccctcaatcctcgaatataggcgcagcattaggggatttatcatcaatgctagtagtgttggaacgggtacgctcgaataaattaatttgttatggatttttcttaacatcaatgtatagggcatgaaatcatgaattttaatttttcaggtgtaatcaattattgattaaattatattcctaatatatgtaactgtagtagtttgtacgtataaggtttgctagagcatatagcgatcaccgattatatattattgaattttccaattttatcataatcgttttacgtactatcgagtacatatattactttcttaaaaggattaaattctccttataagcgttgaatactttatgtgaaaccacactcattggttttttgaagaacattccacagtacaacttaaaacgcatgtgtgttcttctcgccaggtaaatgcgttcacactatgcaccgacctaagtatttcttacataaccaaacttatgtcttttattatttagattcaaggtaataagtgataactatatttttttgttaaagaataagtgataactgtgtcaaagaagaaaaacataacaccttttataacttaaaagtgagtaccaacattctataagtttagtgttatgctacgagtttggggtcaaaatatcaattatcttttacgttctagacttggcctaaatattttttttaataaatctctttctctaactcataaatttaagaatgctcattccaaatttcggcaaatttattcgattttaaaaaaaccattcaaagcaatataaattgtaaacaaaatttctatgatatcaagacattatatattgtgataaatagatattgattggcaacatgatgattgagatgctctttctttcactctactgaaatttgttggaaagagtttttatgagtatccaaggtagatgtgaaagatagagagacccaccacttgtgttccccaattgtcatatctatgtggtggctctcgcagtatcaaacatatagacatacattttttacatttgttagtatatggtatcataaataatatatagtatttgaatncaaataaaagaaatgggacctacaatattagtgccacagacctgtcctacaacaaggtctttcacatgcttgtattgggaagatttgaaagagtattaacacctatctatctatcccctttggcaatatgcttttcttgcagaaaataattgaaatgtctttttaaaaaacattacaatttatatataaagaaaagagaaatatttgatctgaattaagcttctccaactagctccgctgctcccatgtgcactgcttcctctccttctctctgcctctttcttgggatacttcaactctccactctttattttttaaaaaatattttttgtttgatacttttcttttcttgtatgttatatattgacccagtcatatattaatgtattttttaggtaaattacccgtagttgttattaaacatcaatcaaagtctcttatcttttattaaccggagctaaagcaatggttcctttgttcacaattattatcatgcggcaagcaaaatatctagaactagattatctagggcacgtttgagcgggtatcttgataaagtaatcaagtgaattatgttacttcatatgcaccacaattttgctagagtttgaatcgtacaatcacctttacttacaaagcacaatgtctttgttgcataccaaaccattacctacaaatgtgtaaatttattgcgttcaacaatcatccccttttgagatgtggtgttaagtttcatgggcctatataaaagttttgttgtctctttagtgctgctctccacagtgtcgcgcgcgtgaagaatacattctaatgatgctcgcgttaagtatttccttgtaatagttttgaaatcacgtgtgttgagcctatgggcctaattatttgggcctttaaaagaccacataaattttttcagaaactacggctccggttcgcagccccatcagaacgtagtagccatgaaaatatattttcaaaatatcgagaagaagaacgtgagatacataagcaagtatatttttccttacatcgatttttcacatcggaaatcaaacctaacttcttctaaaagtgaactattgaaacttttttttttgggttaatatatgcattagttgttcttttttccaatatattttttttggttaatatatgcattagttgttcttttttccaatatatttctccaacaaaaaggttcttacttcttagaaatgcctacaataattagctaaaccttttatcaaagtaaaataaaataactaacctgtttatcgaaattaaattgtgggtattaattagtatatgtaaacaaattgggtttgaaaagtcaaagaatgcggaaaatgtgggaaaggacagagaggtacttactacattgtcattgactggccttttttgacaataccgttaaacagtgataacgactttaaccgtgaatgtaattcttctgttcatcctctttctctttctttttttttttcattaatgctttt

SEQ ID NO: 62296 - DNA, 878 bp, Arabidopsis thaliana landsberg
actaatttataaacgtgataagctataggaatacgatagtacttaatctacttgactttgccaagctcggaaatgctaattgtagctatctttcaatggcatataatctgctctgatggttctttttttcagtagaatcattattcatgaggccttgagaaaaattgacagctcattaagtttgttttgtgtattacagctatatctcttgggaactgcatctgtagaatcactttcagaaggagagtactctaaattgacatcggtacgagcttcttttcctcataaataataagtgaatttatccaaacaatctaaggcctactagatcaagttcctttgattttggagttctctaacttaaagtacttgtatattcggatgcttgatatcttgatgctcaattttgtagtatgtttggtttctgccgttatgtacttattttcatattgaagttctcttatttggttgcatttttttggcaaagatattttcaggtcagatctgtgataaccgaactgagagaacgtcttcagtcacattctatgaagtcctataggtctcgcttccagaggtgatagttcctctctagtccggattttcagatgtgggctggttacctcttgattcatgcataaggaggtgactagttttggtatgctttttcactgaaatgcttctctcttcttgtagaatacatgacctctgcatggatgttgatggtttttttggagtggatcagcagaagcagtttccacatctacaacagtggcttggacttgctgtcggtggtagcatagaacttgggcacattgttgaatcaccggttattagaaccgccacttctatcgctcctctggctggaaagacgttccggg

SEQ ID NO: 62297 - DNA, 605 bp, Arabidopsis thaliana landsberg
ttgatgatttatctccagattcagcaagctcattagccttcttctgtaaacatgaaaaaactactcatgtatcttaccaacatataagaacaaagaaaaccatccatatgaacttatttactcacaattgtttcagttgtctttgtattgactgttgtaccatcttttttggttcgtgacttgactcaaactttcagtcttgtaacttcagatggttcagatctttcttttttctaaggaaaaaaacaaaaatcacgccatatcaaacttaacttatcaaagtgattaattgaattcaacagaaacttaacttaaacttaccaattcttctgctaatctaaacattcctttacgtctgcaaaagtgagggatctaagtggatcttctctccttgtattgatcactcacaacctacactagtatgtaaactgaagcttagtaaaattataaagagaaaattattaccagaaattcgggacttgttttaagcttcacaaaatttcctccattctccaatggaaatgttttatggttgcaaaaatatcttatccgcgttgttcttacacttaatcaccttctgtaccaatcttgatttatataatctc

SEQ ID NO: 62298 - DNA, 458 bp, Arabidopsis thaliana landsberg
tcgcactctttcttcttctctctctttaccaaaaaaaatttgtgtgagacaatgttgaagaaaatgctttgtgctttatatttgttcgttggtggaggggcggcaacccaactcttagagatctaatcgtggtgttttagacgagttaaatatttaaataaaatcaaacaatatatattagacatatcgaattatagattcataattaataaaatttagattttcatattttaaaaatagatttggagtttaaacctgtatatatatttatatatatatatatatattataattatcaaaactaaaccattaagaaaatatttggagaaaattatcacatgtggggcagattctggttcaaaaatctattgacgtacatgccaaaataaagtaattgagaaaataaatagaaggtttgtaacataataaattatatattgagacaagtcatccctttc

SEQ ID NO: 62299 - DNA, 148 bp, Arabidopsis thaliana landsberg
acatctacgtacaagagaaacatattttattaccgatatatatatagatgttaggtttataacaccatctatagagaagacaacttttacctaatgatatttgcccaataatctgagggctacaagagaggtaagacccgcccccagg

SEQ ID NO: 62300 - DNA, 596 bp, Arabidopsis thaliana landsberg
  unsure (1)..(596): unsure at all n locations
cgacgccttgtatagaccggcatgtcgtaaaacgtccagccgtgtccggccggccaggtttcaaccgtgtgctccacgccggcgtcggtcagcgctttctcgaggtcggctttcatggcgtccggaaaccccttgtcattcgcggccccagccacgaatacgcgcgccttcatcgcgttggccagcaggtgggggctttgcgcatcgtccgcggccaggcgcccgccgtggaacgatgcggccgccgcaacgcgccgcggaaaggtgccggccgccgccagtgaaaaacgtccacccatgcaatagcccgtcgtgccgaccgggccggccttcacttgcggctggttcgccagaaaatcgagcaagggcgcgcgtgtcggacatcacgttcgccacatccgcccgggccatgaactcgtccttgatgaccttgaagccatcgggtgaggcaaacacctgctttcgatccatcacggcatacggcccggagcgataaaacacatncggcaccagcacgtaataacccaactcggcgatggcccgccccaagttcagcaacgacgggcggacgccgaacgcatncatgtaaacgatca

SEQ ID NO: 62301 - DNA, 351 bp, Arabidopsis thaliana landsberg
  unsure (1)..(351): unsure at all n locations
ttcttcttggtataccataactaccgtagtcaattcctctttccagatcatttttttccctgactgttgggtccaatccatcgtaattggttaccgtaaagacattggacatttcaaaatacacccgtaccttttccagcttgattgtcgaagtaagattaccgggcannnnnnnnnnnnnnnnnnnnnnnnnnnnnnnnnnnnnnnnnnnnnnnnnnnnnnnnnnnnnnnnnnnnnnnnnnnccgccttgttaccttgaccggtactcggtggcataccaccgggtacaactccattgggatttagtcactcggatcccaggacttatctttccattccctgcaataggc

SEQ ID NO: 62302 - DNA, 1733 bp, Arabidopsis thaliana landsberg
tgcctcattaactagtgccaattgttctagataactaaaatcattctttgatatcttgactaatggttcagccgatagggcaagctagtggggcacaaggaaccggggaagagaaacgaaaaaacacaactaagaaaaagaagaaaaccgggcgtgcaggtaaccggtttctaaaatgtcacgttatgggttacttagtgtggagggcagcttatccgtttgttcattgctaatatttctttatgccattagttatagacatggtcatctagtaagctgtgtgggagatgtgacctcttggaatgctgttttgatagagttgattgcgtagttaggcgtgtagtaacatttttttaactcacatctctaaaattgtggtgggggatccaaatgacttttattataacatggcattgatgtagattacctgttctgcattgagtttgatttcagaagctagtgtcaaaatgagccgaatatgtatggttttgaatttgcaggtgtatagtgaggagcaactatgggagacgatggagactttgaggaaagtagtaggatacagtgttgcaaggagtgccacatgtgcagaggagttaaaggctctctatgtcttcaccggtgtagtggagccacctcgctcaagcttaaaccaggacacttatgatattgcacatcttactattagacttcgcttcctcatgtctgttatcggaataaactagtttgatggtgtgttttgtgtgctagattcacgagatgtgttgtgtagtactgaatctcaactttgtatgtacttttgttgccacttttggtcctagttttactattttgaatgttttatagtattacatcaatgggattacacatttacagtattactaacctacaaggttatgaactattgaaagttgaacgctctcgtagtattcaaatacttacaatgcggtttgcacacgtggagaaaatcagaaatgatcctttctgcgactgacaagatcgctaactagctcattctcatcttcacactgttccagcagaggcttgtacgccggattgtgatccactactactcgtaaaatctttgcagcttcatcactctgcccttctttgtacaaagcgctgcaacagcaaaagtttttatgatttcacattgctcgcagttcagtagcatacatgcttctgtacctatttcctaaactctgtattgtgatgacacttctgttcgctgtaaaattagtaccttgaaagaagcagcaatgcctcaaagtaatgctctttgcttttaggatcaccaggttctctcagtttcgctactctttccaagtgtatgattccgcttttcagttttccctgccagaaacaccgaatgtcaagatccaaccaattcacaagtaaaagccaatacatacattcacaaattgcagacccaaaataacaatagtatcttagtgttaggaaaattggaactaagcaaaggagttattactgactgacattcaggacctgagctactttcataatcataactatcgttttcaaaaaatgatggttggtcaaacctgttgtacgtatgcagcaccagcccactgagatgcaagcattaaaagttcaacatcctcagcatcagatggatcctcatcaaggagctaagaaagaaacaaacgaactgtgctgcttagtaaaagagtcacacgctctttatcttactacacgagtcaataagcagaaagaac

SEQ ID NO: 62303 - DNA, 753 bp, Arabidopsis thaliana landsberg
taagtctaaggttatttaaaatttgagaataaaaacaaatgtactaatttagtgaacatgaatagacgttgcctcaatattaaaaaagatccacaaatggccaaagtcaaaaagtatttgttatagaacgtgacacgttggaggagggaagactggtcgttaaggggctttggttgatcgaaaatgacgataatatctctcaatcaaggcgctcacgttaatgtctcagttccaactacccccctttcaattcttttccacaaactctcaagtctcaccccttcctttgtagtagggtttggatatatacttttatccgtttatccgatatgttatgtagaagttgaccttgtagtttggtaaaaattgaaaatctttgttcttgcaagaatctattacatatgttctatatagattaacatgctatataattgtcacttaacagttatattttagtggctggtgtagctatccacaaatccataacaagtcgatttatcatatataactcattaactatagcttatccacaaatccgatctttcttcgaaatagaactgctaactgccttatcattctttacttcgacgaccgaatagagaccttccaaaaaaaaaaactcaattcaaccgtaaatagattttttaaaaaatactatagataataggtgacggatacacgagttttttaatttgagttttatcatgaaattattgcggagtaatggaaattgaaaatgaaaagagtcaacgt

SEQ ID NO: 62304 - DNA, 770 bp, Arabidopsis thaliana landsberg
acataaatttgagagatataaaactcttatattgcagacaaaacctgaatattcgtattcggttgttgcagatggatcgttcttcaagcgtttgcagaaattgttagatccgttgcagcagagacttgcagatggatgccatttgacaagaaacacgagagagtgcatcttggaagctggttttagtggaggagttgaagtacagaccttttctatgtatagcttcccttggatgacaagacctcatatctatggactagcttacaactaaaactatcatctttattcaattacactaaaatgattggctttgaatgttttgattcgctgattgctgttattactaaataatatggagaaaaatgctaattatgtgtaattaaaaagatttgattttgtggacagaatctgaagtagagaaaaacatatcttcatgttactcttatgctctgttttggtatatgagtaatttgagcttttgataagttaaaagaatggagattctccacttctcaccttcttcatcaatctcgacgatcatacatagacctcgaagaaagattatggctttgagagattccatcaaaacccagatgaatctcattacgacagagtctgtttcatctttcaggttctgtccttgtggaagaagacatttcataggagctgctatgacttcaatgccatttcttgcaatctctccctctcacgcttctacctcaacggtttcttcctctgttttgtgtttaataactttacggtttatctag

SEQ ID NO: 62305 - DNA, 773 bp, Arabidopsis thaliana landsberg
aatgtattacttctttattatttaaagtgatcattccaattttatatatagaaaaattatttatttatttatggcaaggttgcaacatataaaaaaaaagttggtatacaaacaaatatctataccagaacgcacaatcaattaagttttcatcttctatatatactgatctaaaaatattaatataaggtttgggataattcaatttaatcacatcgtttataaaaagcggttaactctacgataactaaataaattgtgttatatgaaaaggggaagtggcaatgtaggtaatggaattgacgttgatggcttgaaaaagatggccttatcttgcggaacaaacaattacatacacgacacgcactatatacaactcacctgtgttggtctctgttgccatcttttatgttattgttttccgactgtcgccttcctttaactaatattataattttaaagatgttcataaatcacagtagaaagcttgtttttgctaaaatgaacatgacacggatcatacaaaaaatatattttacactatagctatataccgatttaatcttaggtactttgaatcgtgctaaaactaaacggccttctcaaaaccctccctcttttcctccctccctcagaaacccctccatcgacaaataacgttatgcaattctctaaacaatgctcgacaagcatgtgtttttagtaatgctacaacttatttctcttttcaacgtcctaagaggcatcaaaaagatcaaagatcttggaaccga

SEQ ID NO: 62306 - DNA, 549 bp, Arabidopsis thaliana landsberg
ctgaaatcttgaagaagaagtaaaactattagtaatatactaatatcctatcttgacccaaaaagcataaggttactataactcaatacgcataacattatggttcgtgctacttaagctgcatttcactagatttattcccccatatattccatgaaaagatatgtcattagtcactcatgaattacatactatttatttatctttttcgagctaataaaaccacaaagaaaatgtattcatattgtttgtcagattgtccacgtaccgcatttggattggttttttcttgtcacgtttggattggctaaagttgatactttacacattggttgaatatttatttaaatatagttagaaacaaattttggcttacgtccatcaggaggtgatggtgtatataaggcttgattatgaacaacacagaccgagacatttggtgctctaatcagatttctaatccagaagatttttggtccacagaccacacatatatctattctgggtgactttgacccttcctataatagcaggtatgatcacatttaa

SEQ ID NO: 62307 - DNA, 1401 bp, Arabidopsis thaliana landsberg
acaatagtttgtcttttctttttcttaaacgaattctaattgtttttattaatatggactgtataaatgcaattatgcgtcatggttcatatatgggtcgcaatttttcggtatacaaggcatgtgctctaacatattacagaatatatatacccctcttgagctcttcttttcttttagaaaggtatatgtaatgtatttttttattatttttttgcacaaaacgaataatactcgagatgaatcaaattgacaaaaagtttatagctcaatagggacctctcatcttgactttcaaatttagtattaagaaaaattgtaataggtaatctatcgtttctgttactctttatcacttaaaaataaaaatattataatatcttgtaaaatagtgttttatcttataaaaataacattttttgtttgttttaaaaacacacgataaatgaatttgcttatttacaattttacgatatgccgtgtttgcatgcatgcatgagtgcatgtactctccttagttatagtagttgttttaattttcatcaacgcaaatattataaacgaaaaccataaataaagctatgatatttatatgacaacgaaagttaaaaaaacaaaacaaaataagaacgctacattttcggggacaatagttatgaccaccgtcgattttagctcgtttgtattcaaattacatcccatgcaaaaagtttccccccaaacacagacgcgtgtatatgaggtatctgacgagaactaaacgatccagtattgatttatccgtaagtaaatacacaattttctactctattacttttatttgatgatctcttgatttttctgcgaaaccgtatcaaatttcctcaaattacaatgttcatggagattctcatcaggctacgcgccaaaacgacgagatgagtgcaaaagtgaatcaaaacatgttctgaatcgttttttcaggagttttgatatttggcctatcgatcttgtttgttagacttagatcgatttgtaaagatttgtgtatggatggaattcaaggagaactatagtttgtccgattgttaatactttatactatatgaaaccacattgattgatttagataattcttacatattcgtaacacaaaaacaagtaaatacatttagatatctttgcttagatgtgctttgtgaatggttttggaaccatgtccacttcagtagagcctgcaagacataaaatccagatgagttaactacttcaaaagactaaaaagatgtagatatcaaaatgaagaaatcagctagataatcttgttacacaaatttagcaattttaataattctgaactttaactataggctaacccaaaagttagtagaagaaggggggttatactatttatgttttttg

SEQ ID NO: 62308 - DNA, 757 bp, Arabidopsis thaliana landsberg
gtaaataaacctaccagtgttcacattaatcattcctcacatattttggactttttgaatgttatagttagaagttataaattaatatagaaaaaaggatggtccgttgactgcgtaagacctgtgattcgaattcctcacatatttcttggtcgaatgattcgaatcccatctgtgatctgtgttgaatctttttgctctctcatccttttcatatttcctcattcacacactcatgcgcctactcagaggcgtgatgtgcaattgtgcatgattgttgatgccaaacttatcattgatgtgggataccctcttctttagtgaattaaagtcgttagttcacatatcatttcatggtagacattttcatattaacgagaaataatcccaacaatcattcactttttcttgttttcaatttctttttgtataattaaatatgtaattctctttttcttttcagtatatatatatgattctcgtttttgtagtttttgtaaatgcttttttttgtgtgtatttgtttctcattatcaaagtcatctatcaatctctttcggacaaagattatcacttctgaaagttttttttttttttttaagtagttgttttcttcttctacaatagctacaaacaaatcaagaaaatgtgatagaagggtctcatcacaattgataatattaaaaactatatttaatttttcgaccacatggagattaaatataacaagatttggttctaatttgttagtaaatag

SEQ ID NO: 62309 - DNA, 538 bp, Arabidopsis thaliana landsberg
  unsure (1)..(538): unsure at all n locations
tcagttcactgtttaaatgaacattagcacattattttctaaaagtttttttttttttttaaggtggtatttttgttattctggttgagttcttttatactaaggagaaaaaatggagtagagacaagccagtgtaccgaactcgcctaacttgttgactttagaagaatcgtacgacgtcaacgtgtttttggctttttcattcccaacggcttactttcgttggcacaccataatgggccttagcactaacccatcaacggaactatcaataatgggaggaggtgcttctgtaggccaactgtgtttttctggaacggctcaacgttgttgctgtaaatggcagggtaaaaaaaagccaacaaaaataactccgttacttttctactttcttttgattcacaaattcgttccatggacttaccattttgtgccattttccctctttgaacggcacactatttcttncgtttgttttgactcttttggggatgtgttttgcgattctctaatttcgtttatagaaaaaaggaccgag

SEQ ID NO: 62310 - DNA, 716 bp, Arabidopsis thaliana landsberg
aaatccaaaaattgtgatgagcttctgcaccgatgcccctttattctacccatttttggtctgggtctggtcttcacgtcggctcttggtacactgccactataaattccgaaagctgctcgtcgaatctctacattactgacatgtttggttagctatctgttcatcgtcttattcaccgggcagaatcattcaagctagctatctattcttgagaaaagctttcgaaaatattgtactgccacttcacctttagaaccttaagtaaattgttcgataccattgccattgtaagaaaggattttttattttttccggtttaacattggttttcattttaacttttaacggatcaaaatattaacagagaagtccgatagtgactgactgactgactgtgacgctttttgtttttagctaccgataatgtttgttttccgttaacggcgtattttagtgtgcgtggacatatacgctcaagtacgccgcacgcttctcttctttttgtcgcgcattcaaaaaccgaaacgatcagaaaaaaaaaagaagaatattaaataaacattttggactaaacaattaattttttttttaaataatttctcgaaagagaaaaaaaagagagagagagagagatggagcttctacagtactaaaagctgagtgaatcccaagaaatctccgccaacggaatattttttttctgggagctgaaa

SEQ ID NO: 62311 - DNA, 522 bp, Arabidopsis thaliana landsberg
gaacatcataacataacccttttttataaccaaataatttgaaaacaagagtaaagcaatgcaatgttggtttgaagaagaataaatgcacaagatagagaatatggcaaagctataaaaaagtgatggaaaaaaaaaaaagatgtgcgtcggctactttgtcaaaggagaaaaaatagcaaaaagagagatttgaggtcgaagatgacactaattaaaagatggcaattgaacttattgttatcttatacacttggaatattcttttcatttgtttattaaaacaaaacaacgaagatcactacagattatgacgattcatacaatctaagattccaataagagtttttttttcaaagtcataatagtgatgatgattatagtggtgcatacatagtaaggaagatgaatgatgtgaagtgatggatgaatggcgtccttagtgtccagcatgccaagacaacaacgcaacacgattacttaattgaatcaagaaagcaaataagggaccccatccaccac

SEQ ID NO: 62312 - DNA, 1552 bp, Arabidopsis thaliana landsberg
agcgttttctttccttaatagagatagccagatgattataatgctcaccatgccaaaaaccttgatccccagtatcctcacattctacaagacgtcggataagtaaacaccatccaagcgctaaaaacctgtcctcgttcctcaaaatgatattcgaaagatttctcgaaacggcttgaaagagaacttcatcttgaaatagccaatttagaagtatcatagctgggttaccatgcttagaatccttaaaccttaatgtctaaaaaacaacaacaaaagtagagaaaccaacacgtaagaacatacaagataaaagaccggacattacaacaatcaagcaaggttttaacttttcacagggtttaagatattacatgttcgataatgggtacaagaatttcactcatggcttcgtctctctcagcagcgtctataacgcacttttccaaaaaccagagtgcctcatcgatagagcctaacgaaaacaaacagattataaaccccaaaagagcatgtgtaaacataaataaacacagattaaggataaaattgaaattgaaaacagttattacctgagacacccttttgagaatcaggagttagacgagaaatagactctcgtagctttttagggcgagctgagagaagcgtactcatgaacctagctacagtgacggagactagagactccggttctgatcttcgtatcaattcctcctccatttccctctcaataatcagcaattccaggtatttaatttattgctgattgaaattactctctactctaatttgtagcaatctcgcggagacgacgacgaacagaaaaaaaaaaaaaaaaaaaaagcctgagctctgttttatttcccgctacaagatgaaacgacatcgtttaagtacaaaaagagacagaacaacaacgtcagcgttttgtatttcacaagtacgtcaccgtttaaacttagggctaggacagcatctttgtgtctacgctccacgtggacattaatcatttgttcattttgttgtttaactaaaatcgtcgaagaagatctgagagaccatctcgcttcagctaattcgccgccgcttcctccttctccggtaaggttcaggaatggcaccgtcacatccaatgcttcacctaaatccttctccttcactgtttccaatcctttcaaaaccctaatccccaacaaatcaccatctctctgttatccaactcgcaacaagaaccatcaccgtctaggtttctcgataaaagccaccgtatcaacaccaccttcaatcgcaaccggaaatgcaccttcaccggattacagagtcgagattctctccgaatctctaccatttatccaaaaattccgaggtaaaaccatagttgtcaaatacggcggcgcagcaatgacttcgccggaacttaaatcctccgtcgtaagcgatctcgtgctcctcgcgtgtgtcggtcttcgtccgatcctcgttcacggtggtggtcctgacaacaaccgttacctgaaacaactcaacatcccagctgagtttcgtgacg

SEQ ID NO: 62313 - DNA, 1683 bp, Arabidopsis thaliana landsberg
acattacctgaaatatatctctgcatttatggaaaatgacaatatattatagtataagtttttggtattgaacaaatatttttaaaatggactggtttggttactttaatgttaattttgtttgatacgatactttaggttatgataatcttatttagatttaatttgtgatttcttatcataactatgaaaagtgcatatatcaatttggttactagacaaaataatatcaatcatctcttgtaatttaagattgaaataattattggctatagttttagtaatttatattaaattttcaataaatagtattaattctaataattatttttgaatgacaataatgaagctgtaataaaaaatctaattagtagttttaatattaccggaaaccaaacgaatctaagttatgttggataagattatataatattacaatggtatctaagttatgttggctgcaagagaatagagaaagaaaaaattgaactctggcccgtgtgagacagtgggacaacaagccagtaccgggtcctccacgccacgccacgccggtccactgcctcaaacatcccacggtccatgctatttttgtaataaatgagaataacaaacattatgcttttatacatctgacatcaaatttataatttactgtcttattacattttgttgactccacagcttttattactcttttcaaatctatggctactcttttcttgtaaataatgcgaaaaatatactcacattgactagaaaaattactcgtacaaaatcatatatcgttaaatgataccaaatataaataaactttttgaaatccatttgcacgatctacaactatttcatatatgtttgtaggagacacatttttggtaagattgattttgtttttctcgctattggatatgacctcataccaataaagttcacgaaaaccttcagaaaccaaaaatattaatctaatgacttgttttgccatcttaaaattcatttgagagaactattaaaaatttgaatgagttactaatataacatatttgtttgttttcgtctatcaccagagtagtggcatgttattccaaaaacaaaagtgggcttttccttgatgtacggtttgtattaactatttaacctagtgatttatttttcctcaatgttaagtcattttcgtcaaacaaaatacgagaaaaatgattatagtgttccttttattaacttggaaaatctgtctccctgtttaacctatggacctaccaattttcttctaagcttacatataaatatatttgttaacttttgattaactagataatttgatatcatgttataatagatttatgcaaatgttatagtattatagtaccatcagtttagatatctaaaccagtttaatttaattcaaggtttaaagtttagatttgattaatgagtttatgattttaaggtttaagtttacatttgatgatttggatttaaaatttcagatttaaactatttcaatctcataatttaagatttaaatatagaaagaatcaaagtgagctattaacaatgttgctgagaaaaataagtaaatgaaatgtctcgaaatttagaaatttctgaatcacatcacactactgattgaatattcatttcttttaagatttttttcgaaacatgaaaatttggtctaca

SEQ ID NO: 62314 - DNA, 765 bp, Arabidopsis thaliana landsberg
gtttgcggatattcatcggcggaaatacgatgcacgctgccgaacatccgttgcgattgcgcgattcaacatcctggtcgcagacgcaaagcgcttcccgacgcaaaacataagaatccaagcgcaaaaacttgaatccctgacgacggatacttacggacaaaactcacccgaatcccggctcttgtctgcgatctcgaaaaaatccggatctgccgcttcatctctctacagagacaagattgctcgcgtagaacgcaagctcggccagagcccaaatcgggataacgaccgctgcttcaacattgaaattgcagccgagcttatggcgatttttccaacccgcgaccttttgaagatcgtaagcgacggcatcgaagcgtcgtcgttctccatatcgaccgagggttaaggcagatgctcgagcaattcgatattgacctgccgccttggacagatgacgtatccaagcacccgttcgtaacggcgcgcgtcaaagatgtggcgacgatattgttccaacgtgtggcgaagggcgaatatccattcggcacccgccttcctgcagagcgcgatctcgccgaggaattcggagaaacacgcgcaaccattcggcaggttttggaattcttggccgcctacgacgtcattagccgcagggcgggaagcggcaccttcgccgcttatcagcgccccgcatcttctcggcgtgccagcgtccctttcaccggggttctcgacacacatgcgttggctgagacggct

SEQ ID NO: 62315 - DNA, 1646 bp, Arabidopsis thaliana landsberg
  unsure (1)..(1646): unsure at all n locations
tgtactttgcaagaaagatcgtcaatgtgtctttatgcaatgtatagtttaaatttatggaactgcatgtatattttgcactctgctgataacagaagttaggtcaatagcatgtgcaacatgtgatcttaacaaagacattttggacttgagcatattgttttactcctattgattgaaaagttttgaaaatatgattcagattaattaatatgatagcaaatgttgggtttttatttagtcaattaattcaccaatatgttcattgttagagaaaaaaaaaaaactgaacagtgacatggttttcataaaaaatcacgaaatcagtaaaccatatatattttctaaaattaattttcaacacagaaaaaaagaaacactctctcaaattagacttttaaaacttcattcaattgctttttccccccatccgattcgcttgaagccttgaaccactaaaatcctaggtgtgcgtttactttggtttattactagcattatggtgatgattacttatgtggtatgagagtattaaacacaattgccattttcgaaagaattcatgtgtttttgactttagacgtttgaatctctcattcaatgcatttcatgtttgagttgttcttatacagaaaatattggataaatccgaaataactgtcagatatacaaaaatgtcaatatttcattattgtgtcaaaaactctgacgtcatttccaatttacggaaagttccatagtcgacttttgtgagattatgaatacaaaaagattttttttttaacattaaacacggattggaaaaacgagttaagacgcaattaaactttaccttactaaataaaaagtcgttgccagatgacatggacacgaggaccccactttatatggcctaccttttattgccaggctgttattattttccctctactattgtaatttttactttccatttnnnnnnnnnnnnnnnnnnnnnnnnnnnnnnnnnnnnncatttagaaccgttggatctaaaagaaaaatctgcaaataactcccggttttctctcaactcattttctgtaacgggtgccatgtcactaatttcgttcacctgttaccggtttctccggtattctcttgactattctaccttcacctgtgatatttttcttttttttttaaactaaaatatattttcctcacttaattaaaatcttcatcgcattttgtataaaaggcagctctctgcctcgtgctccatccactgattatcccgagagagttttatttttctttccgagaaaattcgagaaaaataatctgggacaaaaaccatcgctcatttcttatagagagagtctcttcagcttctcttctctttcactgaagtttttgtatttatgatatcggtgtttcattgtttctcgtgcttattcagtttttctccgatccgttttttatgggattgttaatgattcattcccgtgagtgagtgtgtgtgtgcatggatttaataactttctccgattcatcttttgcaggaaaacttaaggaaaaagcttttgctctgtttttgtccagatttgtctgttgttgttagctaaacaataaaatcttgaggccaacatttgaagatattttcaagaaaatgggagtgaaagtag

SEQ ID NO: 62316 - DNA, 1553 bp, Arabidopsis thaliana landsberg
  unsure (1)..(1553): unsure at all n locations
gaagagctcaattcaaagttgagctgcaataaaaactctccatcacagcagagcttgtcaatccaaaccgaagtgggcaatgggtcagctcctacttcgtatttcatttctggtctggacaatggctgcttgacaaattccataatgccccattcatcatcctcctcccaactagccaaggattcacccttaatggaagaggtaagtaacctcacgcatctctcgtttatgaatttggattttattgcgttgctttgtaactttgagctgctctggtgcaacnnnnnnnnnnnnnnnnnnnnnnnnnnnnnnnnnnnntgcatcagttggataatttgtgcaatctgatgagggaaagctcagcagaaaggtcacgcctagcaagaacagggagcagcaatagcggtaacagaggcagatcaagcaaaagctccttcttgtccaatgtggaatctaacaagctccctcttgtgttaaccgtggctatttgcagcataggtattatagtgatcaagagctacattaacaagcggcaataacatctattagccactatgggttttctcttctttttttgttcttttgttttggtatttttctcactggaggcgttttgtgagcttccctggtttctctacgtagacaatgacgccagttctcttcccctaaattagtcgtttggaagacgttctcgattatttattcaataaagtttaggtttttagtttacaagtcacttctttgggtttttacaaggatcaagacaagacctggatgcagttgaacacagggtgacagggagattgttaaaacttaaaagtaccaaatacaaaaacaacgttatagactggtagactcatccattattatactcattcaaagaaaaaattaagagttgctaaattgggacatgtcattgtaccaactttcataacacccaaattcaaatcaagtactattgaaggaaccgagtcttcaaagtggcaattgcattgacaaaacaatatacaacccatgaaaatcgttctacgagctagaccaagagaacaatctaatgcaaccacttgacattacattgggttgaatgttgtttgtttcatcataggtgatgaatgatgaggacgggtgagctaagtccatgtaccctttttaaccattatacatatgcatatagacacaaacacctactttataagtactacatatatgctctaccagaaatgctcaagccatgcatgtttggattctccaatggagctgcaaaaaaataggagcagagcagagatcctgattcccatcatatagctttgtccaaccaggctggtaatctcaacgaagatttcattcctagtctgtgttaggaagatcgagtatagcagatgcagcaacaacacaaagaatccactgttaagtaacagctgttgagaatcaaagcaaaatgttatcggcttcttttattaatttcccgagataaacagagaaaagcgggataaagagattgcgtaccactgtcccgaatatcatataaatgaggctcatcgaaggcattatgt

SEQ ID NO: 62317 - DNA, 740 bp, Arabidopsis thaliana landsberg
acccatctattttctataaatatcgctaattttgtgtgtatttatttgtatagaaaaatatgaaaatagttggaaagtcgtactgaagaacattaatgaaattattaaataagtatgtcgtttcattttgtttttttttctgtaaacatgccgtttagttaatgtaacattttcattaattaaaaacgaattagaaatatccaaaaacgcatggggacaagtgtgtcgtgaacaacttgtctagtgtgactccgaaattggtcgatgttttgtttctgcctcgatgtcttttatatccttgtatctatttgatttttttttttctaagaaggaattatattgtacgtttgaaacatgcggataacgtttaggagacaagaagtgcttaaaacatttaaactaaccaaaatttatttgtaatgttgaggaacttacaattcttgtcgcgcagataaactataaaaattaataacgtaaaaaaaaaagcgtttttatcaacaaaaaatacgtttaacattcattacaatgaaataatcgacaaaaacgaagggcccgcgctgtactcgattgatatatcattcctgtactattctatttgacttcttgggcgtgtaatcttcaagaatattgaacttaaattagccgcagagatttcatccaaccatctgtaacctattgaccaatttactacaaaaaccaacaaaactcctaaattatagtactatatggaaaatactttg

SEQ ID NO: 62318 - DNA, 458 bp, Arabidopsis thaliana landsberg
taaatatggatccataaaaacgttgtggacttttaaggtcctcaaagaaagttactttcatgtttcatgacatatactggtggataagataagtgaaaaccttaaccgcggcaaaccaaactgaaattgtttacggagccctgattcggactgacctgattggtggaagtgaactaggaggctatggatatatcttgaagcacacattattgattttcaaaggtgctctgatggagatagatcttgatccactgttacattacctagcatgctaccattcatctcataaatgacaatgtgctgctcctttgacctgcattattctttaagcccacttactagctcgttgcctatgcaaacatataacagaaaacccttctattgcatatgtctgcaccaaacatatgcactcatataatgtttcacgtggcagtgtccttagactattatgatatacg

SEQ ID NO: 62319 - DNA, 1251 bp, Arabidopsis thaliana landsberg
tcgaaatatctgaaccctcaaaacctaaacacaacaaacaaacaaacaaacaaaaaagttcctgttcgattcctcctctcattcattctctgcttgttcctcaaatccttcaattttctcatcaaatccagatttgcgaatttaggttttcttgaatctaatcgttctcgatgatttcgaaagatcaccttcatcatctggatcctctgggtacaaccaaatcgtaccacatgaatacctccaccgtatcgccgccgtctccggcatcatcaatttcgttgtcgcaatcggcgtggctggaggttcgtttgttctacgtccgtatcgctccttgcgtcgttgagaacgtccctgacttcctcaccctccgtcaccctcgtcgcgaaaccggtgcttctcttgaggttaacggcgttcgcgttccttcgtcgcagacggcgtcgcttaaactccgccgtgacagagtcgaccgggaatcgtcggaggtgacttacgtgagcactgagaccgttcgcgttaccggatgcgttgatttcgaggtttatgataacgaggatatggtcttgtgtgggaacctagatagaatcgaaggtgcttggaacaatggaactgtgagtgatcccaagactggatggggcatggattgttacattgctatgggaaacggacacgtgtcaggtccttctgcctctgtgtttttccagccaaagtttggagtctcgtctccgtccgtcgaggtttatatagctggttgttgtggtggtgtcccggtgatattgaccaagacgattcaggcgagtccgaggaggaaggtggctaggcacgtgacactcgacgctatccctgaggatgaggaagttggcaaagagcaagacattggtaccattggtgatgaattggcccgtcaaagcaaagtacaggtatgattctgatttcacaattctctgtttggtgattgtccaagcccttaagttacgattcttaataacttgggattgagatttgaaaaggttgcttctttcgtctagttttgtgagttatgaatgctgtagcagatatttagttattaagatcactcgcaagtttctggtgaatttagctcctgcttgaatgttttctttgactctacagctgaatttgaaaattgtagaattgttgactgatcagaaattgagatatggatataggtcaatagactctctttgcactttttttggtgctttatcttgtttgtcgtttcgtttatgcaga

SEQ ID NO: 62320 - DNA, 550 bp, Arabidopsis thaliana landsberg
agctagccatcattatcattctcccttgcacttcttcttacccacaccaaaaaaaatgatagattgttttaacaaatatgaaagtaaaaaggtgaaaaactagacattcgttcgcgtagatgatgggagatgtgtaatatgtggatatgaataattcaaatggtacactgagtatattgaactagtgttcctaaaacaagagcaaagaccaagactttactataagattcatagaacgaggccctttcaaagtttcctctccaacaccacaagagtgccttctttgttccaaaccaaattttgtcctttctttaaaccttaagcggttcttgctctatgatttaacaagacgctggtttatgtttgttctcaagtgcacctattttcttagtgtcgcgaaagaagtaatcgaatgttaattactaaggaaaatatttgcatgtgagcccgttatatgaatatttcatgtgtgaaccagataccgaatttctggattgatgcttcgaagcactcatagaggagaaccacatatatctacaacacacacaca

SEQ ID NO: 62321 - DNA, 2081 bp, Arabidopsis thaliana landsberg
ttatccttgaccattaagaaaatcttaaaagttcaaagcacatcaaacaaatataaactactcaaaatcaaatttaaaccagacttaacaaagatacactgcttagctggatccaatgttttgaaaaagacttgctagttcctcggaatattattataagttcaataaaaattacaatataaacagaatccgcaacttaattatttatatcttttggcttgtatcgttttatttttggtcaacaatgatatcaacgtttattgtttatacattattaagatttatatttttctattcgatcaattttttttataatgcattcatagattcaaacaaaaattgagtttatgtcgttaccattcactcaaattttatttactatttcaaattttcacataaaggatagtcaggaaacaaaagctatagaatattataatttctagtaaacattatttggcataaaaatgtaaaaaaaaaagcgattttacaaacaaaaaatatactttatgaatgtggtattctttttattttttcgccaaaatattatttattttgatagccgaaacggcaaaacccaaaaggcccaaaacgaatcttaaatctggtccgggtcatggataatacaaaacgggtcaggcctcgtcatctgtttcaggcccaatatgatttagtaaggactctcaatttggcgggagagagagggaaacagaaaagcttctctactaatctctccaccgtctaaagaatctttccgacgccggagacaaaaacaaaaaatggcaaacaaactcatcggagaaatgggtcttcacaccaaaatctcaaacatcttcgccgcaagaaacatcatcaccgccaaggttttcctttttttttctccgatgattcattcatttattaggttttcgaaatttgggtataatagtaattgaatataggatgcattatcaatgacggaatttgaactaatggagctgttagatgttggaatgaaagagataagatcagcaatttcattcatcagtgaagctacttctccaccatgtcaatcagtaagctctctttttttgctatatatgattggtttgtttttttaatctaaagttctttttgttcatgtaatgtgttcaaaggctcgatctttactggagaagaaggtcgaaaacgaacatttatcaggtcatcttcctacacatttgaaggggttagatgataccttgtgtggtgggataccttttggtgttcttactgagttagttggtcctcctggtattggtaaatcacaggttagtttcttagaagattgaagattttattatgtctcattgttgtatagttaagttgaaagttggtacctttggtgtgtttgcatacagtaaaaagttttctctgctacgcagttttgcatgaaacttgcgttatcagcttcgtttccagtagcttatggaggattagatggtcgtgtgatatacatagatgtggaatccaagtttagttcaagaaggtaaactgtttttttttgttttttctcacatggtatatttatgtgcatagtcctcagagaatgtatatttcagggtgatagagatgggactggaaagctttccggaagtgtttcatcttaaaggaatggcacaagaggttgtgtgtggaacagctatatggtttattctttgtgtttatgtctttggttaagtcttctcatattccagattgcttacatataactatttgcagtgcagatggctggaagaatccttgttttgcgtccaacatctttagctaactttactgaaaggtccgtaagattttgctcatcattgtgttagttaaacttaaaggaaatacgaaagtgcatcactgaaacgttgttagtatataaaattctttctttctaattggcagtatacaagaactcaagaattcaattcttcaaaaccaagtaaagcttctagtgattgatagtatgacagctcttctttcagggttagtctaatttctatttccttgctgatcattgtcatatcattcttgctcctttggtgaccttagtaacaaggtattttgcttttcagcgaaaa

SEQ ID NO: 62322 - DNA, 1928 bp, Arabidopsis thaliana landsberg
gtatttcttcatcttctttcttctttaagagtctttcattttccactttttataacatgcttataactgatttttcaacttttgaatcacagtttcagttatagatattcttggatgatgttcagttcggggttttggttttggttttggttttggttgatagtcatgaaaatgcatgttctgttccacatggtagggttccagtaaaataataaaagaaccagatttagtaacatctttcacatgaatgataacatatttcacatgtttgatgcatcaacttgtaatatggatgatagtcatgaaagaatctaatgggccaagaaatgtgaaagagtctacatgactatcatccaaaaaagagttgtagcaatatggatgggccaagaaagtgcaagacttcagcttgagcttgactttaagagaataagtaatttccctttgccctttggtcatgtagtactcgggttgtttacatttatcaaacaaatatcagagttgtttattgttatttgggaaaatctttaaactttctacataatctttgagactagtgggaattaagagtggtgatgtagtggatcaagattaaaaaaagttgattgtttaaaacatcgagtatcttgcaatacaaaacaaaacccttaaaccaatcaatacgaaaaagatgaagatgtcaactttccttttcaaaaatatgcaagtttgaatccggatggtaacatactgatgttactagttacacaaatatctaggctagatgtcctaatcatcttcaaaatattttgttgatgttttatcttaaataatcaaagtttttcaattattgtgggtgttgtatatatttaacataatcttaatccataaacaaaaagtaatataaaggtgttgcgggaaaaggttacttaatggttaagaagtttggcttatgatcatcccactttgtgaagtatggcatgaactttctttttaccgatattagagccaaatgaaagcggtttcttaatcgccaagttccaaccaaaaaacaaaaagcccacatttacgaaaaatactcttaaaccaacattttgaattcatatgatacaaagcttcaaatatccaaatcgaggaaattatttttaaaaaaaaacaatacataacttttaaatataaattgcgaaaaaaggtaaagccactcatcaaaattcaaaagtgatgagattaaagcaagtgaagacgcatacattatcacattaaaagtagcaaacacaccaagaaattagataaaaagataacaaaataattccatccactttctttttcttttgttttgtcaagattttgttttttgtatttcagtcatacgtgtgaatgtatatcaacaacattgtttttaatgtataaaaatctcaactactataaagtagctgaatgatatgtgattaagatatatatcgagagagacaagccagcaagaatttttagcacatataaacacacaaaagattcaaagaatcatctagtaacaaataaaaaaggagagagaaggaaaatgaacagaatgagcaatacagtgataggattcttgaatatcctaacactaatttcctccatagttctattaggatcagctctatggatgggtaggagcaaaacgacatgcgagcattttcttcagaagccacttttgatcttaggcctagctatcttgatcttgtcagtagctggtctagtcggtgcatgttgtgacgtggcttgggtcttgtgggtgtacctcttcttcatggtcttcatcatagtcgcactcatgggtttgaccttgtttggattcatagtgactagccatagtggtggtgtggttgtcgatggtagggtctatcaagagtttaagcttgaagcatataaaccaaagcttaagacaagggtggtagatactaattattggt

SEQ ID NO: 62323 - DNA, 620 bp, Arabidopsis thaliana landsberg
gacatcctaagagttacgaatcttgaaacttgtgcatcatttgaactatacacaataactaactaaccatgattgaaaacgttgtgaaataattcaatcccgccattaccttcgtataatgattggtaatagtctcgactgacgatatgtatatatacggcttggaaatctgtactaaaaaatgataccgaaggtttgtggtacaagggcattcaatctatcgctttcttcttccgtgacatcattgcctaggtttattgctgctctccgtagttctatctctcttgtggtccattggcctatgtaaatctatcttataacattctcaatttcttgatattcgaagtgtattcaaaaccccacaacactcctatcatgctgttctatattttctcgttgctctctacttattctttctgtcttggacgttgccttccagcatagaagcctcatcaaatcattgaagcttacacctacttgccacatagacatacccgatctcagaatatctatatatctatttcttaatccaacttgtttgagctagtgtgagagaagtcatgcaagagagtgcaatccccaccgtactatgggtaatctcttgccccattgttgaacat

SEQ ID NO: 62324 - DNA, 364 bp, Arabidopsis thaliana landsberg
agctggaactcctactactactgtgagtttgatgagtttttgttttggtgtggagttgttgttcaagagaataagagtgtttgttttttcttttgcaggggtttgtgatgaatatgcagccttcagaagcagaagctgggtatgatttaaggttgcctccaatggcagatcctgatgttatgaagaaaagaattgctgaagaatgggctccttctattaggaacatgacctactcggtaagtagatgtcgttgtttctgtgtgtattgctatctgaaatgttaatatcagctaaagtccatactctatagtctatagcgttatacagaactgtttttgtagttttgttttgtgaagaagcatgg

SEQ ID NO: 62325 - DNA, 327 bp, Arabidopsis thaliana landsberg
acctatactcagatcagagatcgtatcaaagttcttaacttttgctttcgtcattagtaaaatgtatgtttgagattcctttcagctacttttattaagtctcaatagttccacattagattccgtttctgttttgattataatgttcattatagttcttgttattctactgccattaatctgtctattagggttatagagaagctgttcgagcctggttttgtgaaatatgaccttagatagttggatgaatgaagaagcatggtttgatagactgaaaatccttgatataacaccattgctagtgatcacctgttgcaagagttt

SEQ ID NO: 62326 - DNA, 303 bp, Arabidopsis thaliana landsberg
aaccaagcagattgggagaacgatttggcctactctcatacgactccggagatccccctgtgaagagcccgccatgttattaagtctgacgggattagattgacacgttttattgtgcgtcaaatcaaggtctcatgtgtagttaactgacgttgcgatgaataaactccataagtcggataggatgtccgatgacatatttcgaaacagatattcaaggtactggatgtcatcccagctattcaagatgcaacatgcgtcggatctatcaactacggcggcaatgaacatcgaacttggcac

SEQ ID NO: 62327 - DNA, 1069 bp, Arabidopsis thaliana landsberg
tctctatcgtctcttgttttgcctataaaccaaatataatgtcttttaaaactttgagccctatatatatagattaacaaacttgaaaaaaaatgctcataccgcgcaagaaacagagaggcggcgagatgggattgaacggcggaggttgaaggatagattagtctttccatggttggaaatcaaagctggcttttggaaactaatccttgttgttgcctatttgtttcatcaaacacacacaataaaaaaaagcattgcattcataagaactttgttctgtaattttcataactcaagccaaattcttagccaatgaatgtccatgcacaattattcacagccaaaagtaagcattcacttccacaatcataaattcaattgactgtagatctagattacaaccagaacacaaaaccacggattttaattccatgtgttgccgatcacagaatttgaaactagaaataaaatcattggaacaaaaacataaaactgatcattactaaagcgaagatcttctatgttacacataataaacatgcgtcaggagtttatatacgataacaagagcaggcatggaaacaacgggaaatgatcatgaatcgtaagatcaaagcgatctctaaggcaattgttaaaatgaaagaagaagatttgattaccagacaagaagtttgcaatgagacagaagcgctgaattgagtcgccattgtttcgtgaaacacgagagagagaagagatctgtcgaaagagatggggagagagggcggagtgtacaaagagcgtgaactgctctgcttgctgctttcatttataagctcttcccctcccttcacccgacgtcgttccctaccaatcacatgggctttccataatgaatgactcagcccatttcgcatttcacgtgccaatttaaccggattattctattcatacagctttttattctattgacgaaaatcgaaccaaaccgtaccaatcagatcctaaccgaagcagagttagtcaagttctaagttctgaccaacaacacaaaccccatgatgcatagtcaaaaacttggtag

SEQ ID NO: 62328 - DNA, 527 bp, Arabidopsis thaliana landsberg
  unsure (1)..(527): unsure at all n locations
ggatataatgttaaaatacgataccaatatcaagtatttatttttggttagcaaaaaaaaagatcaattattttcatttattacttcattctaattttaaaagttaaaactaacgttttcaattagacaggcccgtttctaccaaaattaaaagaattaaaaaatagacaggcccgtttatagtatttttagcccagtatctacgaaatccggcccaactacatcttctcgcatgttatcgtcccttttaaactggtgcatgagatgtttatgtactccgttttcgaaaataaacaactctaatatggagagaaatgagaggtctttattaaatatcacgttaacgagttgtgtcatgtaataattactgacggttactatatcgaataattacctaattatcgggtaataaattaaataccaaaatattaaccattatatggtccatatacagtgatctagtagttgaataattggttacgttcaaatcttaattatngggtgaccgatataataatattttatat

SEQ ID NO: 62329 - DNA, 669 bp, Arabidopsis thaliana landsberg
ctgccatagattacatttagcttcctgtgtttttatttgctactaaagtttctcctctggagatgattaggtccttgctgcaacccaaacttccggagatgcaggaaagaaatggtttcagggaactgctgatgctgttaggcagtttatatgggtctttgaggtcttcttttgtctttcatctcttagtaagtgttcttgtacattgttggaaacatgatatggcggtgtttctgtaggatgccaagacaaagaatgtggaacatgtcttgatcttgtctggggatcatctctatcggatggattacatgaactttgtgcaggttagttttatttttcttatttgtccacactgagcttcatgtaaactttgtttcatttctcgtctttgcagaagcacattgagtccaatgctgatatcacagtttcttgtcttcccatggatgagaggtgtgtctgaggatcattaacattgtttcttgccttgtttattcgatgaacttatttgagcttttccttattcacagccgtgcttcggactttgggctgcttaaaattgaccagtctggtaaaatcattcaattctcggaaaaaccaaagggagatgacttaaaggaaatagtaatgatttattttgtttgtcaaaacgttcagtttcttgcttgcaat

SEQ ID NO: 62330 - DNA, 524 bp, Arabidopsis thaliana landsberg
  unsure (1)..(524): unsure at all n locations
ccnnnnnnnnnnnnnnnnnnnnnnnnnnnnnnnnnnnnnnnnnnnnnnnnnnnnnnnnnnnnnnnnnnnnnnnnnnnnnnnnnnnnnnnnnnnnnnnnnnnnnnnnnnnnnnnnnnnnnnnnnnnnnnnnnnnnnnnnnnnnnnnnnnnnnnnnnnnnnnnnnnnnnnnnnnnnnnnnnnnnnnnnnnnnnnnnnnnnnnnnnnnnnnnnnnnnnnnnnnnnnnnnnnnnnnnnnnnnnnnnnnnnnnnnnnnnnnnnnnnnnnnnnnnnnnnnnnnnnnnnnnnnnnnnnnnnnnnnnnnnnnnnnnnnnnnnnnnnnnnnnnnnnnnnnnnnnnnnnnnnnnnnnnnnnnnnnnnnnnnnnnnnnnnnnnnnnnnnnnnnnnnnnnnnnnnnnnnnnnnnnnnnnnnnnnnnnnnnnnnnnnnnnnnnnnnnnaaattaatacaaaacaaatctaaaatgcgttttattccgaatttttgaagaagtgatcggccttgcatagaaaaaaaaaagacaaaaag

SEQ ID NO: 62331 - DNA, 552 bp, Arabidopsis thaliana landsberg
ccgccagctcggcatcggccgctcggacaccggccggattttcctttagcagatcatgcgtgacggcgggctgcgcgtccaggtgcaggccgggccagtgatcggagagcagccgggccgccagcccccagtccccggcggcctgggcgtgccggatcgcctccgccaggtacccgcgcgccgcgaaccagcccgaagcggcgccgtgcagcgcggccacctcccccggcgcggaccggcgcagctccagccgcagcagcccggcgaacagctggtggtaacggaaccacgaacgcgccgggtccagcggcaccacgaacgcgttcgcgtcctccaggtccagcaagatccgctccccgccctcgtccccggtcagcaggtcggcgagctccccgttcacctggtccaggatcgaggtccgcagcagcagtcgccgcaccgccgcgggctggcggtccagcacctccgtcagcaggtactccgccaccgtccgctcgctgcccgagaacccggccgcgaaccccttcggatccgggtgcccggtcagcgaca

SEQ ID NO: 62332 - DNA, 559 bp, Arabidopsis thaliana landsberg
  unsure (1)..(559): unsure at all n locations
gggaatttcatgcgatgttcctnnnnnnnnnnnnnnnnnnnnnnattccgctcgatagcgaactatttcgagatctgaccggcatacccggaatgctacaggatgatcaggtgcacgctaccgctgaaggcaacgcccaggtagcacagaatgtatcaccgnnnnnnnnnnnnnnnnnnnnnnnnnnnnnnnnnnnncacaagaagaaatgtccgtagtttcccagatgtgacacggccagcgggcgaagactggcgacgtgtcacaacctcatggcaccagccggagaaattcctctgcaacccgacgcgccgtcccatagagatcattctttatctcgcccgatggcaacaggtccgaaatcaccgccagagagtccgcccccgcatcgatcacgctgcggcaattttttcttgtaatgccgccgatcgcaaccagcggcttgtcggtaagggcgcgcaccgccttcagtcccgtaagtcctacagtcggatcaggattgattttggatgccgtcggaaagatcggcccataggcaatatagttgcagcttgtctta

SEQ ID NO: 62333 - DNA, 112 bp, Arabidopsis thaliana landsberg
  unsure (1)..(112): unsure at all n locations
aagatttacttttannncacccacatgtnntccgtcgaccagcgttgggtgtgttgttatgcgtttttntgaacacactatcacatatttcatagaaaaaaaagaaaagcaa

SEQ ID NO: 62334 - DNA, 568 bp, Arabidopsis thaliana landsberg
  unsure (1)..(568): unsure at all n locations
cgaacctttactgcacaatgagaagtccgtgattttgttcttttcgaaaataaaagtctctttggttatagattaaattacgtcaatcagatttattcatgaatataataataaagctgattaagagaggaagataatgtttatctttcttttcttacaatagaagttgctatgtatatgttaatatgtttattaaagttaaagcaaagaaaattagatgaatcgtttgcaacgataaatggttgttttgtttgagagttaagcaatgcctaaccctaagcttaagcaatgcttgaaccataaaatgtccccattgagctgaaacgaaaaaattaagtttggttagagctacacatgttcttaatctttgtttactgaaaatacaattgtatacttacttaataatcacaactttcactcgtcaccagatcatttgatcattgcagggacaaagtaaaactcgaacacgttctgatgcaaattaaaatgtcgctttttttacaaaaaaatttacaaggattaaactcacatagataacaaaagcatatcattttgttntatgtaaatt

SEQ ID NO: 62335 - DNA, 956 bp, Arabidopsis thaliana landsberg
gaaaagaatcctgtgtcctggtctaaggtaaacatttccatttgcaatttttgtttacttctctgttttctctttcggttattcaacgattttatctaactctgtattggtttatttgtttgcgtgcagtcgagttattacagaaactcaatctccaagttacttaagaagcataaggtgattgtattcaatcacactgattctcggctagccaacaacagtccgcctccttccatccagcggcttcgatgtcgcgcaaactatgaagctcttcgttactctgaagatatagagaatctgagcaatgttctctcttcaagacttagggaaaacaacgaaccctacctcgctcttcacttgcggtacaagctacccctattactccatctctctaatgaatgaatgatgctgattgctgagagaatcatcaattaacagaaattttcattataggtacgagaaagatatgttggcgtttaccggatgcaatcacagtctatccaatgaagaatccattgatcttgagaagatgaggtttagtattccacactggaaagaaaaagtgatcaatggtacagaacggcgtcttgaaggtaattgccctatgacgccgcgtgaagctgccgtcttcctcaaggcgatggggtttccttcgaccaccaatatctacattgttgcaggaaaaatctacgggcaaaacagtatgactgcgttccacgaagagttcccaaacgttttctttcacaacacattggccacagaggaagagctttcgactattaaaccttatcagaacagattagctgctcttgattacaatttagcactcgaaagcgatattttcgcttatacttatgatggaaacatggcgaaagcggttcaaggtcaccggagattcgaagggtttagaaaaacgattaatcccgataggtacggtttatgtttcttgcgtgaaa

SEQ ID NO: 62336 - DNA, 1296 bp, Arabidopsis thaliana landsberg
atcctctatccatggacaaagtaatttgtgtccactctctaactttaagctgaagactgatgccgctttttccactgtcagatatcaaagagaagatatccaattttagtgaggacacaccatataactgtttatcagagtatcagttacatagagatgattctacgaaaaataaaattttaaccataccttgttgcttagaccaagaagatggggctgaaaagtaaagatgagctccacaagattcacaagctatagaatctgcgtcatcattcacccaccctctcctcgcacaatttacagcactaataacctaccagcacacacaaaaaaaatagaatgagctaagaattttatagctaggaacatacaacaacgagatagaaatgacttaaattctaacggaaggaaaattgtggtttaaaggtcacaagaagcaaacctgtggcttggcaaaccaagtcatggacttgaaagtagcaagcctcctcataagatctcctctatcccacggcctgcaaagaccagaaggcgatgttccagcaggaaccttcaaagctgaagacctatcaatggtagctaatacaatctttggctcaaccaatgctaacgcagatgaaggattttgacgcttcttgcctcttgattgttgctctacagaagaactacacaaaccaaaggatatatacataagctgacgcagaatcataacatgaacacaagctctgatgcaaatatcacaaaatcaactaacatctgaaatcaatccaaagagcaatgtatatgaacacaaatacaaaatcatctctgagattaagcaatttatccacacttcaatcagcgaaacaatggaactcagataatggagatgaatcgatgcacagtgtaaaacagtaaccagcaagaagagactgacctggtggaggaagaaggaagctgagatttcgatggggtaaagagtttatccatgatttggtggaatctcttctctgaatcttgtgccattgtttatcttccagaaaaatcgcagcttcctctagctcgtctttctgatttcgtcctcctataatcgtataaaccctaatctaatagattcgcttccaccttcttcgccgcggctcaggtgaaggagtggtgtttagatggcggtgacggaacaacacgaaaacgacgggatctgctgacgcttagacctttttatttttatagcgcaaatcgcacgtccccaatcttttatctattttaggaacacgaccgcttattctcacctcatcccatgtatcacccaaaccattt

SEQ ID NO: 62337 - DNA, 1210 bp, Arabidopsis thaliana landsberg
tgtgaatctaggtactcgaagaccaattttgttgaatgagatgtcgagaagccgccatataaaaaaagtagaaaagattaagatctcgagattcgggagcggatattcccagaagttcatccctctcttgaaagtcataacctcccatatcccgtgcgaatttactatgtgagggtgtgactcgcagaagatagacgagttcttgtcttcattgaattctccccatgacacgtcccaataactcatgtctatctcctctgtagccattttaaggagaaagacaaaagttaacgaagagacttgcttagggatcaagaagatctaatggaatgatttagggtttgtaattcgattgggaaagaagaagactagggatggttttgttataaacgttgactaattaaggtcgaataaccagcaaacaacagatacgcatctcaggtacagttaatatttacccattttgttttctttttatagcttcattcttctccatctcttgttccttgtcaacattagcacacgtatgattgtacatcgtctatttcaccaatcaacaacgccaaagctatacatataacgatatatatttagggaattttgcatccacttgcacactttctcagggatatatatatttttgttttgacaattttttctatgtttggtgaaataggaacttatactttaaaatcaccatacaaattaagtcattcaaacagctaagcatgcaaattaaaccaaataatatagcaaaggaaaatggatactaaaagagtcttactaatcaaggcagggtaagataaataacaatataaactaaagaatattgtacctaggtcaggataccaaattactctcttataaaatttctccaaattcaaaattactaattaatgcttgaaccctacgtatacgtaaagcataatcacaggattaagattcttccaagtagttaggcattaaatattcattggctagtcgtatttgtggtcttaagactataaagaaatgagaacaagtgtaaatcacctacaaaccattttgaactcaattcctattggttggtaatagattcctctaaaggttttaattgggtaatttcattgaatgtatactacgtgcgtgaaattctcatcatttttaatgatcaaattggtggcaagtaggtcttttaagactatatactaatttgctatgtaatttattt

SEQ ID NO: 62338 - DNA, 1527 bp, Arabidopsis thaliana landsberg
ttctgagatggtattgctcaagctgtgtaagcattgtactaattgaactagttcagctttttctttttcattgcgagataaagcatcttttgatatacaggagaacaagctcttatgcacgagtgaggatcatctccaatgtttctctgaagttctagagatcaaaaatgacccggtaaatccctgagttgattttagttggcacacacaacagtagtttttgcttttgctgtagagtggtagagctggttcctgttcttggcatcatctgattttagctagtcttcttattgcaggttaaatatgaggggtcagatattatcctgcagaactcaaaggacattcaagagcagatttattctgttgattacattccttctgattactttacagagaacaacacttctgtagcagaaaatgaatgcttccgcaagattcaaccatggttcaaagatgccagatttccccttctagaagtggatgaagtaaacttgagcgaactatcaagcttatctgtgcttgataaagtatttactgttcttgagacgattgaaccccaagacactaatgcagggagttctctcattatcaattctaaggagcttataggctcaaaggattatgatctattggatgtactctctacggattgctatttgaacaagagtggccaatttgatgtggtaccagagtatatgttttctcaaatggatatagtgcctctcctggaaatatcaaatgctgaggaagttcagggaaaggcggctgtaccagtatcttatgagttattccagatcctggatgtggatatgtctgatgtttttgatatcgtcctttgtcttcaaaaagccattgaaccagaaatgtgttacggtatgttcagtaaagagatgtgcttctaggatttcgatcaattagttgtcagttccgaacttgccttcacagatgatgccttcaagtcttggcctcctcctgttttacatgattatgagatgacaagatctctggagttcatttatgaggatgttttgtcaaagatcaagcctcaatccttgtctgcctcaaatgacatatacttgccgtggaaccttcttgaggaaagaaaccacaaccattgtgattatccgtttgaagaaatagttacattcaacattgattataactgggaagcttcagaaggagacaaatgggtttatgatttcattttctctgaagatgctttctgcgagccacttgtagagaaatgcactgaacctttctatggtatatctaaccttgatgagcatgctcctgttaatacttcgcatgggttattggaaaaccctttccaaaaaacaggagcaagggattgcgcagtggatgataatgctaagaaggctacgctgttgttcaaatcaatgtctgcttttgatgacttaacatttttcatggatccgaagaaggctgtgattgaagataatctcgagtctagagtcgaagctgctaagactaccaaccataaatgtatgtctattgactcgaaggctt

SEQ ID NO: 62339 - DNA, 607 bp, Arabidopsis thaliana landsberg
acctcactctggaaagggatggcttcgacggctcggtattcgacagcttgtcggacaagctcaaggagttcatccgcgacacgccggaatatcgccggttgagcgagaaaacgcagtcctacggcgatcagaaaggccgcacgtcctacgacgagatgaacccgccgtcactcgaccagatgcaggacgaccgggagctagaggatgtgcccttctgatgctttgtcgtggctgtggatacgatctgccggagggtgctttctacaggcacccaaaggccgccagtggcttcatgtcgatttgtcgcgagtgccacaagcgccgcgtcaagacacgggcaaaaacaaatccgctcgtgcaggaatatgaacgtgagcgggcaaaaacaccgaaacgaagagagtacgcccgcgcaatttctacgcggtggcgggagaaaaatccgcaggcttacaaggctcacattgccgtcaacaacgcggtgcgagacggacgcctgttcaaagagccctgcgctatctgcggcgcggcggatgtccatgctcaccaccgagattatgcgaagccgctcgatgtcgtttggctctgcccgaaatgtcaccaccgt

SEQ ID NO: 62340 - DNA, 829 bp, Arabidopsis thaliana landsberg
agaggatccacagtccaaaaaagcaggtcctgttgaagggtagaaaaaatgattgcaacgatgaagttaaaatttccagatcctcctcttttatcctctgtattctgccagaacggaaaacttctgatatctatggtattatctcacctttttcctgcggatattaaagtttgaactctctcattcaactggtcgttgcatactataaaggtccctggaagaagatatgcctcactgaagaagggatccacacacaatgcatctgcccaatcaagatcagtgaccaatatctcaccaatgtacttctgaagataaattcgaaggtatatcaccaaccacgctaacacttgagatatcttcttttgatgtgttattctctgtgaattgacttcttttcttccgtcttaatatagcttggaggcatcaattctctgttgggaatagagtactcttacaacattccattgataaacaaaattcccaccttgattttgggtatggatgtatctcatgggcctccaggtcgggcagatgttccttcagtagcagcggtattgattacatgtctattcctttgtatgttcattgcatctggttatcttaggatctgattatttatctgtttactttctcgatctctgctgcaaggatgttggttcaaaatgctggcccttaatctcaaggtatagggcagctgtaagaactcagtcaccacgtctggagatgattgattcgctctttcaacctatcgagaacactgagaaaggagataactggttcatgaagtatgtgaaccctagttttaatcaattttaacaactcaagatgt

SEQ ID NO: 62341 - DNA, 652 bp, Arabidopsis thaliana landsberg
tctgtcaataaccatagaacaacactacaaaccatataagaaaattgagacagtatctacaaaacctacaatgcctttcctcatgccacagcttataagctcacgggaaatgtgactactgtcgcatggaaaagaaaagttgacgatagcccagcttttaatagctcttggttctagaagcatctgtaaagcaagaaacaaagggtaaaaataaaagggaaatagtgatgcccggaaatctttgcagacaattaccttgttgttaaagttccaccgtccgttgcaaggttgaaaatcttcattcttgccaaacttcagctgtatattacaaatgggtcaatatgggactataatttccatggtagatcatatctttctatctgcaaacaaaacataaacaggtttaccattgggggcttgagaacacggccttcaacttgagtcatttctttttcaatggagatgccacatccagccaaaaatgggtccttgtcatagcagtaggtatgcattgcctacaattctagtcagtaacagtatttgccatccaagatagatcaagcatcatccgaggtcagaaaacgaagctcacatcattgagtgttttaattctcttaaaggtttttgtcttgaactttcaacaagtaaaact

SEQ ID NO: 62342 - DNA, 249 bp, Arabidopsis thaliana landsberg
gtgaagaatttattaaggaacccggagaagttttttttttttttgacctagatcggtgaagaagttgattaattgttgatcgcacaaactataaccaacaaaaaaaaggatttgaagaatttggagattctcttatcgggcaatgcaaataacttcttagtgtggaatcaactttcatttacaagaaaataaaactaacaccaaaaccaaaatcattgaaaactaaaagaaacaaatatttcactaatt

SEQ ID NO: 62343 - DNA, 525 bp, Arabidopsis thaliana landsberg
ttatcaatcagagtataaagtaaatccagacaccgtcacacatatctttgtttccaatgaattgtacggtctaaagaaaggaaacgctggctttgtatgctctcatggtcccaagaagtggcggcagagcaagccaggagaccggtacattttgctgaagttcaagcacaacggtatggacaggttcacatccacaaattgccatctccggtcgaaccgtgggtttgtgaattttcatatctttatgcaaccagacctctccgctcattgtttccctagttatatttgtaagtactcaattagaaaagatggagttcattacaagcatgagaataagttctttcgatggcggcagtatccacgctctgccaaaggacgcagtagttccaaggtttcattgagaaacattttgaagaactaactttgtaagaaattgtacggactgtatctctactatataaatataagtatactgatttgattaaatgataggctacatcaatgcacatatttcttgaatgcata

SEQ ID NO: 62344 - DNA, 398 bp, Arabidopsis thaliana landsberg
aacggatgcggactgatcctgtgtggacggttacagttatctgtgaccagcttactgggccaacttgcaatcagttttatagggggagtgtttctgaattggggcgtgccttgaggtgggactgtttttgcggtccgaaaagatacaaagcttatcaattagtggtacggtcaattgttgtgtctgagcgaatgctggggagaaccgtgtaaaattggatgctagtggtagtgcatccgtgaccacagctaatacgctgaggtatggacattggtactttcgtatctccagatagtatgacccgagctgaatcctcggacatagatatgatcactccaggtctcaggtccatgcagctgcgacgaatgtactatgaagacgcgaccaagatacagctt

SEQ ID NO: 62345 - DNA, 598 bp, Arabidopsis thaliana landsberg
tgtccgaaaattatatagcttctctcaaacgtgagaatgtcttctagaaccaaacttcgaatttaaatccttctcattttcaatttgcagatcacattctcaatggttactcgtattgttgaacatttcatgaataatatggtttcggagccagttttactttctacaaattttttatagttgagttaaaaacttgattgcttcttctttttgtcttttcgtttgcggttacaatacttgagtattgtcaaattttccgctattcaactaaatgactcatgagcttatcaagtttatcccagctatttaacttcccatgtttcatatatagcaatttattaatgcttttaaaaaaccaatcatcatacacttgaccgctttttattattttaatctataaaggacgaacctcatttttgcatatgattatcttttactattcttaacgcctaaaggtatacattctccttatctctgaagaactttaaaaagagtgagaaccaaactaattgaaaaaaaaacaaatttgataaagatcttttttaagtgtatcaatttttacaggatgtgccatatatttatgggtgtaggccaaatt

SEQ ID NO: 62346 - DNA, 580 bp, Arabidopsis thaliana landsberg
tcatatggattcttagaaaatataacctcttacaattactcatcaatttataacctatcacacaattctgtcgatgttcaacctctacattaattagtatgcgagttaaaaaaaaaaaaaaaaaaaaattagtatgcgaggttaataacaagaaattaaaatttatgccttttctttatctaaagtatatatatatttaatgtttttctatgatttttctttcggtagtaattaacgttatcaactgaaaccttaagtctatgataaattctggcttatttttacggcactagctaattttctaacgaataaactaagaaaattaacaattgatctctaactacgaatttagagaagagtctaaaaagtaattaaggggcttgattgggtcgtggaggacattgagaccggtgaatgtcctctccattggacatcacatctcatttaccaaacagtctctgattattggtctcccctccccaattgtcatactactatatagttttctagactcgcaaatcttattaactacgatagatggatttatgtcattttattttggtaatgaaaaaatcacttt

SEQ ID NO: 62347 - DNA, 1386 bp, Arabidopsis thaliana landsberg
ttacatgtgatgcgactacactgttataacttataaccacatttcaatttaagtctccttcaaatttattgttaattaataataaaaatgtgctcattcgtaataaatcccccaaccaataccagagaaccaaacacaacacaacacaatatctttcaactcaaaatctttttcttttctttgtatcctcctcatatttttattcttttgtaatgacaggttgctttagcttgtctgaagcaatagaacgaacttacaaatccgggttcaaaagatccggtctacgacccgtaaccatcgacttgaaagatggaaccgtagtcaacttttgggtatccaaaaccaaacccgaatccaaacccaaacctaatctcctcctcatccacggcctcggagctactgccatctggcaatggtacgacgtagctcgccgtctctcacgttatttcaacctctacatccccgacctagtcttcttcggcggatcttccacgacccgacccgaaagatccgatattttccaagcccaaacactcatgcgggccttagaagcccaatccgtcaaaaagtttagcctcgtcggtcttagctacggcggattcgttggttatcgaatggcgtcgatgtacgcagacgcggtggagaaggtggtgatatgctgcgccgccgtgtgcgtggaggagaaagatatgaaagccggtgttttcaaggtgtcggatcttgatgaagcttcgaagattcttgtgccggagtctgtgaaaaagctccgggaacttatgggttacatattttacaaaccggcgttggcaagactggttcctacttgtcttctccatgatttcatcgaacatgtgagctactttcttctttttttacttcttcaaccaaatcatattacgacacgtgtctacatgtcttaagaacatatactatacgaaaaagtgatttaaatgttgaaaatctagtaagtgcgaatatagtttagaaatagtaagatttgaacttttaaagattctatctgtttgaagataatgtacttaaattgtcaacttggagtttaaagtaaaatttgtcacattttgagttaatgggttcattagatctatcaacataattgataattccactaacagatcttatatagtaaataaaattcgttcggtagttctttgttgaatactaagacacggtaaaaaacgagtaaacattatattcgtgccaataagaattattttggtgttcttacaatgtatttaacttggtacaatgtgaaactacacaggctttgacaagagataatatggaagagaagagagaactgattaaagccataccaaaagacagaataatctcagagattccaaagctcaacaggtatcaaacaat

SEQ ID NO: 62348 - DNA, 1738 bp, Arabidopsis thaliana landsberg
gtgagcttttgttgttcattttggaattttagtgaacctcagtttcttaatttaattgtattttagttttaagcgtttactagtctactcctaaaagtgaagactttaggcgatagtgataagcaaatgacaagtcctacacgatttacgtgaccacactacactgtttgtgttttattaccagaacgatgtgagctgtgagctcagatgtttcttaattcttaattcaaattactttttccaaatctacttttttaagtcttatgtcaccacgggtaaattttacttcttgaatccacacactactaaattccacatgaaatattaatttttctgagacaatgatgtttatctgtcatcacgtatttgcaagcaatcagatctttccttgcgacaaaaatataccaattacgatgactgttacctaaaattatgattcacagtattttggtttaatgaatgattacataatcagcgtgctacgacttcaagtaccaatctaagcatagtaacattacacccattggcacaaaataaagtcatcacagacatccgctgaccactacctatagtgtaatataatttccaatttgatagttacaggaactagaaagagtctcttaaagattaaagtatctcagacaatcaacaaatctcattttaaaaaaaatcaagttaccaaaatatagtcaacctatgacaataaacagtaagcttagagtaaacaaaactaagattacaaccatataaaattcgagtctatgagcttccaatgatgttctacaaactctacaaacaaaatgtctaatacttcttctacttccacactaacttctctctctctctcgttcatcaggtctcaacattagctctgtttccggcaaggataatggagatttcaagtccgcgactgaaagcttggttgaagaggagccgagactggaacgtggagatgaaagggaaccaggaaagaagggcgatcggagaaaatatgagcatacccattgcagcatcatatatacgcccaaactcacggactgtttcccacaagcccaggaccctaagcacctgtttccatgtgatggctaaagagagtagagcccagccggtcgggataaaaccaaggacacatgcaaacatgtctggaatcgatagatctgtcattgcaatggctacaacgatgagggcgatgaatgtgatcgaagccactccctgtagaaaacgcagtgccagcagaatgttgcttgattttctgggactataccagaaaagctgaagtaacaaggaggcatgataatgttagtgtcatgggttaccaaaaaaatcaaaatctggagaaaacactaatgaacatcttagtacacaccttaaacaagaacacaataacaaccaaaacaacccacgagtagccatagagctgcaaaacacaaaagagaggattcagtcaggcacactcatgcaataatagcaatgtattggaatgcaatagctcaactgaattaaacgaggatagaaggaaaaaaagcaagcattaccgcaagtgaagtgtttttcccagtgagatcgagcttgtacacaatgccatattgaaacatgaaaaatctcaggctcaaaatagtctccaatatccttcctcttaatgtttggatatgcgcctgtaaaggaacacaaatagtaaaaaaacttagccatacagaatacggtaatacatcaaaatacaaaatttggacagacctgt

SEQ ID NO: 62349 - DNA, 1378 bp, Arabidopsis thaliana landsberg
  unsure (1)..(1378): unsure at all n locations
gtaagatttttgagatatcttatggaagaaattgttatatgaaattgatgagtctcaggctatgcaagtctctctttttataattagttgagagtgaggtcaaatctataattgaggaaatatatataaaatatattttcctctctttttttcctaaataagggaagagaaagcaaaagtaaatataacaaaatcctaatcaattaattaggctcttatcttatcttttaatatttgacccatatactacacatatgctaataaaaaatattcatgagattttatagatgctatcttaatattcagaaaaatattaaccatatattgttatatttatatattggattcagtttcacctaacataaaatttcattttgggtataatatagtgagattttctatttataagtttttaaaataattagctctatgacaatgtcataaataattgttttcaccaaaaaaaggtcataaataattggctttaaaaagaattatgacaagaaaaaaatgtatgtcagtattaaaaaacaaacttttgtgattagaaataaaattaattaaagtgtgattggacaactatgtcttaaaggttttttttttttttttttgtaaaaagcttattaatcccctacaattttaaaagtccatcatccaccatttgtctttccaatcactctatataggttctttgttggtttcagattttattttactttaataatgattttcatatctaatttgttttttttgttttttcatatatgtgacaatatatatagttgctatgcttcataatcttttgtaaaaaatagttcaggatccttgattttccatgaggtcatgcactaagcttatcctactgaattttttcacaataactctcatcttagttacggagagtcgaagaacaataccattgaaaaatgagaaacaagagctcaagaaactactcaaccatattaataaacccgcaataaaaagtttccaagtaagttgagctttttcttaaactttctatgatgaaatttatgttgtttttctacaaacacggtctgtgatacaagccatgcaccgtttacgaccattgtttaagagtagatatgtgggatgtgtgcaataaaaaaattctagggagtttatatgtcataagagactaaatgaattagctaaagtattactattacattgtaggaaataactaaaagtcctaactgaaacatctatttaacggtactatttcctatttcctttttatgctgnatctaaaccaatttgatattaatatgtcttgagcaaatctgcatcttggataaaaaaaaaaaactgaaaggccaaaacagttagagtgcaacaattcaacttgcatttttttctt

SEQ ID NO: 62350 - DNA, 425 bp, Arabidopsis thaliana landsberg
acttccatgaaaatggcctactcgaagaggaaaaaatatttttggacaaagacttgtaaaaagaaagaaagaagccgacttggcctttgtagaacagcctctatgaccacatgcatgcatacagggctacaatatcgcgatagacttaacggttaatggactgataacatgactattagaatatgaattggaatgcggaccatataatgattaaatcatacaatgcacaaagtgatattatgagatgagaatgatgttgagggacacagccgttgactgacaagagacagagacttatcatttacttgcaacccaatcctgtatgaatctacttgatttacttgccaagaaattattgcactgcgacaacttcctaaatatcagcaaactttatagtagatgattttgccatacaccaaactatc

SEQ ID NO: 62351 - DNA, 1866 bp, Arabidopsis thaliana landsberg
gaagtcgtttcaaacaagctgtctagttcttgaggatgattctgttggttttcatggaaggttccttgttcattaaggaagtcagaccaagtgaagttaacctctgaattctcctgagctatggtagaacaagttgaagagaacaatggaggagacgagttaaaagaagacgaagaggcgtacacaaacgtagactcaggcttgacttggttcgatgaatctgtcataagcttgattgcttgtaaatgaaacatgagatctcctgaatcattaggttgttgttgatgaccatcatcattgagcgagtgattgcgtccaagagatccggcttggttccagggattagggtttaggtttccaccaccattgatgttgccgtattcagcaagtacgtgagaaaagggacggtgagtgacatgatctatccccatttccgacagtttcttcttcagttttgtgttccaaaacatcttcacttcttcttctgtctttcctggtaaatgttgtgcaataagttgccatctatatatccacacaaacaaaatcatcagaatctgtaaaatctcaaagagttttcgagtgattcgcgatatctacacaacctgcttcccattgctgcgtgcatcttgataatcagatcttcttcttcagaagtgaagctctcatgtttggttcctgaatgatcagtctttctcactctgcaactctttccacatctcctaagtcctataaatggtaaaaacacatatacatagatatatcatatcaacatcatacaattaaaagaaaaagagaaatgcttttgtaacctattttcttaggagctgcacatccgtttttggacgcagacgcaaacacaaacttttgggttgtgtcttcttcgtttgtccaaggattctttgattttgaagaacaagatctcaccattttcctttaaaagaaacaaaattataaaggatgtttatagctatagtattggagaaatgtattaaaagcttttctttagaaagattgagaatgaggcatgtaataataataatacaaagggagtgttgtgaagaaggaaggggttaggcaaaatgggtttggaggtataagaagcgtgtgtggcaagaaaggcatgaatatatattttcatctttcttaaattacatatgcatgattctttaattatacaatataaaattatcatttcccttttctttattttgccacatctttggttccaaattctccaaaatttatcaaagaataaacatttggccaagttctatagcacaattcattataggttataaaaattgtttcgtaatataatctataaacaacttttactgaaattaaagagggtaataagccatcttttagtgagtgattgacatattgtacaagtttttctagtagtaagtggtaacaattaaaacagttttttgttatttttaaattagcaccaatgtaaaagggaaaatacttggattctctttttttgtaaacccatttgggttccctatgacaatgaatttagtgatcacaacaagtttgtgcaatcacataccaaataatttaaatacatatgcatagacattagtaaattgtagttttgatcaaattaataaccatttatgtacatatatatatagcctatatatatctaaaatccaagttattaatttgaaggtatgtagtttcatgagctttgaagctcacaatatgacctgggataaagcaacaatagtttgtttcacagccattagaaagatttgcttcatggtagcataatcacattcagcagtctcaaagctgcgtcgtttaaaccaaaatctaagaaacccttgaacttgttccttatgatcaaaaatacaaaaa

SEQ ID NO: 62352 - DNA, 733 bp, Arabidopsis thaliana landsberg
agatgtgatcccaatacctttggccacaccattgacttgagacaacggtatcctttgttttcttcgttaggctgagttgttaaaagaaaatacaacttttaatatataaaactcagtcaattatattttattttttctcctacaattgtgattaaagaaaaagaaattgtaattagtatattcacaatttgtagaaatttcatctgatattgatctaccaattttgtttaaattgttttggagattaaaataattcaaggtttttttcatttagttaagaattccactaattttgtataatgaaattataatcccactaaatcttctcggggcgagtcacaaaaaagatatgttgcatgcgcaagaaaatttagttcgaatttgttttgtatgatttgttttgaataaattctacgtggtagccgtatgacggtatgagatggtgcacacatagtttttcaataaaatagtagttaaatacgaagagaagggagattttcgattatcgctaaggtcaatttgttcattatcatcaattttacttttcaacatcttaaagtattttgagagcgacatggcaacaaactttcttgccaaatattttaaccttaattgacaaattcgtttgtctatttttttatttaaaatcttaaacctaggcctctccctttttccttttaaatcccataaaaaattagttttccgaaagaagccttttttttttttggaggga

SEQ ID NO: 62353 - DNA, 572 bp, Arabidopsis thaliana landsberg
catttgtatcaatgatttttccccttctaagactcaatgtatttatatccaaaaaactcaatattatttttatcaaaaaggtactatcataatattttagtaaaatataactaatcatgtgtgttagtgcaatatattgagaatttataaattttaggtcaagatgttttgctacttagtcaagtaacatatcgctagaaaatgtgccaaaagtttaaattaaattatgaaatattttaattgatcgcgtagaaaaatataatgctctagcttataaaaagtttcaatttatcagaggaaacatcatattaattttttattctttggcttcaaatttttgttatgtcgatgaaattaatattatgttttatgggtaaatgtacatataatatatatagtgatgatgagtgttaaatacatttctctctgatacccttatgaaattataatcttttattcataaagtcattatagctcgtcataatcacatagacaaaaagattaaggttctttaattcttacccctattcagtttgtatagcaacaaattatttctctttaccaatggagga

SEQ ID NO: 62354 - DNA, 709 bp, Arabidopsis thaliana landsberg
cttttagattagagttggtcacaaattctgttttatgaagtgtataatgttaaaatcggatgagcaaaaaaaaaaaaaagtgtaaaatactttaatattcaccgggtttggtaaaatggtcatcaaattttgaaggagatagattgatcacttatatctatgagccatatgtgtcgtacattcgacgagattgtgaattcaaatcatttttattaacacttctatattctagatttgtaaactacttactatattcccaaaatatcattgaatacaaataacaagaattggaaagctgatcatatactatttgttatgaaaaatcatcatgatacatacaaaaatggctacatgttctccataaacacactagcatctaaagatgataaacagatcaaatataatgttttaagaagagaaataaaaaatctaaggcaagtatacatctaagggatttagtcaaaacgattaaaatcggggattggactgtgggcatataaaataggtaggaatagtgtcaaactttaatgatgaagataaagattattggggagtcccaacacattcacccatccgcataaccacaaataaaattaatttctctctatcattctcttatgcccaatgggtctcttgtatttaatgtcacatctattaaattcatatcaaacgtttctatatatgtgtcacggagatatcattgcggatt

SEQ ID NO: 62355 - DNA, 1619 bp, Arabidopsis thaliana landsberg
gaactcgttgatacaacgccgttcatcggcgacaggtaaacagttaaccgacgacgttcgttagtttccgcggcgagttgtgaagggagtgagatttgggcccttcctaagcccattactccttgggctccactagcgagcccacgtaacagccacggtggagtacaagcgaaaagtagatcaacggttcccggagaagtaacagatccaaacgacatgacgtcaccgaaaagctctcctctcgccgtaatcccaaaggcgtcgtttttaacaagtaattcgcaatcggcgttttggtctttacgcgatgatgatgatgatgatactcgttcatttccaacttttgcctttaagcagccgctagagctaccggagattaggttccttgacgaggaaacatgtcttgaggaacaatcaaaccagagaattgagccggccagatcgactacgagcttgactggatccggtgagtcaccgagtcgaatctgtgcgaggtattgaccggttggaaggtctttaacaacagggaaaacgaccccgttaacggaatcagagatctgagatttagaaatgattagagcggagagaaaagagaagaagaagagattcaaacaagaagaagaagccattagaagtgtctgtgatgagttttagaggaaggaaatggatctggacggtttttaagtattaagcgttatggtttgggatgcggtgggccgacgctggtttattgtgaatgtgaaaaaactgaaacgataaggattggttcattttaaggtaagtgctgagtagacttgttgtgtcgtttcgctctttggtggggactttttcttttctttttattttgttttggtcaatgtttatccattttattaaaagctcaaaagaaaaaggagacgatttgatgatttttggcacgtgtgaaaggatgttttataggaatatccataaagtttataccctatgccagttggagtagttggcttggtacttgtaaattttgtgatgttaacatgtattatgaaattaagattgggctcgtttatatatgggcgtcttcagaaacttatatggcccaatggtttgcatgcgttatatataaaacaaatcaacggtctttaataacgaaataactagagccgttaatggtttaattgaatgaaaaatcatttttcttcatacagcatatgaactttacgatcctgcaagactttttatgatcaggtataaaagaattcaacactcattttgcatacattacgtaccaattaatgttaaatgatacttaaactagcatactaagatacaccgacccatctttctccattgttttcaaataaaaattaattgttgcaatataagcaatgtggtgttatgaagattaatattgagctcatttatacgtgggcctggcaatatggcccaatatgtttggattcgttatgtaaaattgtaaattaagtccttgtcgatgaaaaaatagagtcgttaatggattattttagcgaaaatcgtttctattcctataaaattgaaaatacaaatgatttgatttaaattataagatctttcaagactttctagtatgtattgctgctatattaaggattaagatcatg

SEQ ID NO: 62356 - DNA, 553 bp, Arabidopsis thaliana landsberg
agaacccttttaactgtattggtcatatggtgcacattttagatcaactttacttatagcgtggcttttagagtgaacaaagcaatgtgcggacccaaatagagaacgaaagtatggagaccagatcctatacaagaagatagaagtagtaagactaatgttaattgcttcgtaaatgcgaaagaacactacgctatttgagtgactaaccaagaccaatagaagatgcaacaccaagtgctatccaccacaagccatatcggacatactctaatacttcttcaacatgctgtaacaataaatacacatgtgttagacttagacccttctttatatcaaaatacaatccaggaaagtcgaaacgatttataccttgccatgaggtccatcaacagtaacaagcaaaccaccagataccactaacaaagtggttatcagtataaaccaacctccatgagccaatagatacgatatggatcgcttgatgtactgaatagtagcctcaacaaacaacttcaatgtattcaaaggttgggtcgttaatggtagattc

SEQ ID NO: 62357 - DNA, 242 bp, Arabidopsis thaliana landsberg
gttgttgggtaattagatgcacgcagagcttcaactgctgtctccactcgtgccggttagacaagtgtcgttcttgcggttctgtaaacagcacgcggaaggtgtttgggcagccatggatgtctcaattgattccattagagaaggttcttcttcaagctgtacaagattaccatacggttgcctcgtacaagacatggccaatggctactctaaggtaaaattattctttctgggtgatg

SEQ ID NO: 62358 - DNA, 545 bp, Arabidopsis thaliana landsberg
ttaaaatttaatgattatgtattctatataaaagttggcaaattatattattcttatattacataaatctatcttatagtttacaattgttattgagtgacggtataccacgagccaatttttctttatacaatctttatctaaattaggctgattcgatttgtctaccattggtagtgttaaaacattaagaaaatgaaaatttaacaagtattgaagtggcggattaatgatattttaaaaatttgttaatgtaaatttaaactcataaggccaaattacctcggcccgcaatatattgtgttccgtgttattttttctatatgttcaaatattcataatattagagtttttattgattttaaatatattaattataatatgtaagacttttttaaaattaaaaattaaaaatttccgctaaaattaaacaacttactaaaaaccgaatacaaacttttaaatttggatgcttgttaagttacacttcttgctcattccaatttgaattcatatatgactaccaatcattgtctaaacatttt

SEQ ID NO: 62359 - DNA, 662 bp, Arabidopsis thaliana landsberg
ctgcccgagagcgctcggcgcgggatcaaggccggcggccgcgttctcccgcggctttgagcagcttctcgtagagcgcttcgagccggccgatgtagacgccggagctgtactcggcctcccgcagctcgtggccggcgcggccgaggcgacggcggcgatcggggtcggcgatcaggccgagagccgcgtcggcaagcgcggcggggtcgcgcttcgggacgaggacgccgttctcgggtccgaccagctccggcaggccgccgacctcggtggcgatgatcggcagttccgccgacatgtactccatcaccgagagcgggccgccctcgaagtccgagcagcagaccgcgatgtcggcggactcgaggatgtcggcgatgtcgcggcgcagaccgagcagcgtgaccacgtcgccgaggccgaggcgcgcgatcagcgcttcgagcctctctcgttcgccgccgtcgccgacgaggaggacgcgcaggttcgggaccgtcttgacgatctcggcggcggcttcgaccaggaccgagtgggccttctccggccgcaggatcccgaccgtcaccatcaccggttggtcggcggcgatgccgagctcctcgcggaccttgccggggacgccgcggggcatcgccgggaggccgttgcggagc

SEQ ID NO: 62360 - DNA, 660 bp, Arabidopsis thaliana landsberg
tactaaaaaaggaagggatagattttgattagttgggtaaaatttccacttcggaggagatttttaatgtaaattattagtaatgtctttttaagtcgaagctaaatgtttttagtttatgtaattgtcgcaactctctactattgtaagttgtaaccaagacaagtttcacactttcgtatctatctctcttcacattaaaatcaatacagacgaaaaaggaaagatatatattatctgtataagattatgtattgtcaatactcaatgccagagactgtctcttaacaacaacaacaacagaaaaaacaaacgaaaacaacaaaaaaatctaaaaaagcttcataaaaaatgaaatctaaaaaagcaaccagcttttcttgaaatggcaaaagatatttttccatttgattttactttatttgaagggttcaaataaactttgagtgtttcttgtagccatttaatactaacctttattataaactgtctaaaaaatattcaaaaaaataaaggcgtatgtagatagattctaatttgcatgagaaattaagtaatacagtggtaaaataaaaataaaacgaaataacgtaatttagtaaaataacatgttatcaagcaaaataatttaatatcatataataccataatccataactg

SEQ ID NO: 62361 - DNA, 601 bp, Arabidopsis thaliana landsberg
tgttaccgatgcttctttacctgctttttcgtattcttcccatggagcttcacctgtcaaaacttgtgcatacaaaatgtacaaaatcgtacagataactaatgatccgagaatcccgataggcatatcccgtttcggattttttgctttctgtgcagctgcagaaacagcatcaaattcaataaaggcaaagaatacaatggcagctccaccgacaacttctcctccaaccgtgctcgaaaatttctttgtgattttcaactccttcaggaatcaaataaggcgtgtgattggacggattgataaattgccagccaatgaagatgaaaacgagtacgatcgcaactttgaggaataccatgatcccatttataaatgccgattcctgtgttcctttgatcaataataaagtcactaataataaaatccccagtgccggagcattcagataaccggatgttgtctgaacaatgcttttcacttccggagttaacttagccaattcaccatttgtaagaatgaccacaccgtgtttagcggtccgtgccaattttttgattacatcgcaatttatcaactccaatgctttattgacattttc

SEQ ID NO: 62362 - DNA, 1731 bp, Arabidopsis thaliana landsberg
  unsure (1)..(1731): unsure at all n locations
acggggtggggcaatttaatgaagcgtacttacaatacaattttttgccttgatatacatacttcataatacataaacataacaaatatatgtggcaccaattttgttggtgttttatgcaatatgcatctcaatggcaattaaattccaacaaacaaagaaaactgataattatttgctttttatttaaattttgtagtgtaaagaaaatgattgaacatgaatttttcaattccaaatttcttcaattgttgttgtcaattgtcatacctatgaatatatgtatgtccatgataattcattagccaatatatccatttgagagatgttcattagctactatttttcctagttgataaggtcttaattaattatttatttaaattgtaaatggtctttattttgtgctgctatttctactaaaaattttattaaagaagaagttgacaaaaaaataaaagaaaaataaaaaataattgatcgcactgtcaaaccaaaaaaaattgaaaaccctaaattggttgaatgggaaaatcgatggtcagattcgcagaattcgccattagactctcttccgagaatccaaccagaccacacagaccttctccttctccacggaacaaagtcttcgtcaagaagacgacgagagacaccacgtcacacctcgattactccaatctggttaagctggagaaggcgggatcgcactcgggttcgaatcccgctccggcttcgggttcggatcctattaaccgggttcccctcgctcaggtcgtcgaggattgcgtcagacgctggttccaggatacgctcaaggaagccaaatctggtgacgttggtatgcaggtcttggttggtcagatgtattgcagcggctatggaatccctaaagatgaaaacaaggttcacttttttgctctaatttttctgggtttaggttgttttcttatagttcttctagagttgatataaaggtttgattttttcgtctctgtgtctacattgtatgcctctgattaggttttgttgtgattggtctgaattagggttcttaaaatgtatgtggttagctctgatttgaagatgtgattgtgattctgattcagaatgtgtgattttgatctgtaaagggtcgtgcttggattaacaaagcttcaagaactagatcatcagcttggcaagtgagtgataagcctccaggtaataatatatgatagaacttgtgttgtttcaatcttttattgaattagtggaatcttgtgaattgtgtgttttatttgggattcttgttcttctaatgtcagggtataatgcaagcgattcagattccaatgataagaaagattgatgatcatcttttgaatgtttgtattgccattgactttgatttgttagtttctctctcctttgtttaactctacttgatttattcaaatttgaagcttttgtatcatcccaatggtcaaaatgtgcccctcaagttatttattaccaggcagtgaagtaattcaactgtgagtctgttgtagctgaaatccttgcattgccaatagatttttgccaggctttatgcttgttctttgtccccagaagtagaatcaaacagtttgcaaagaatgaatctggaatctggaatctgcaatgtcacttgacactttttcttncagggaatctacattcttgttctaaagattatctcgcactaactttttgggtttgaatggagtgaaa

SEQ ID NO: 62363 - DNA, 1559 bp, Arabidopsis thaliana landsberg
agcttcttgggatgcttacatcaatgacttcaactccctcattgcctgaaagaagttctccgcttggtgcgagtcgggccagtgcgaaatagaggttgatatcagaagggagtgtcaccgaagcagtttctcggaagaaattgtaacagcttttaagtagggaattagcgatctccaaattcccctccacaactttattaaaaatcagtacgttcttaatcttggacagaacagggcgccattttgcctcaagcatttgggattctaagggatcctcgaacgaagaactccagaattcagactggagatcaacacaaagcacccgtctgttttccagtaaaccaaatgatggagttattgcttgactttcctccgaggatactggctgcaagggagttatcagtgccaagcttataatcagagctcggcaccaagcaagagaagcatgtctgccaacttttgccgaaaaactattagacaactttggattcttgaaacgctttcgaatcttttcatttatggtttccagggtctcaaccttgttgtctagctcaagagatacgatgtattgatgtagatatctgcaaaaggaaaaatcaatatccgatagcaagaatcgaatggtcaggctggaacaaattcatgcttcatgcaaaattgatcacctgtataagctgctctctgaggtttctggacctcttgtttcaggaaaattgcatatgtctggccatatgcttccttgttctataaagagggaaaatattttctctagctggctatcagggttgattattgctcctgcagactcaacccgactcatcgaggaaaccagtgcttttacgtatcttcctattgcaactggtacaaggtcttcaacgcatagagagaactgggttcaaaatttgtagagtgcaacattaccatttagcaaactatattcagcttatgacaatttgatgatgacatagcacgtaaagagcatcaaaacttaattcctctaatgctactgtaatttaggagatgttagacaccaatgaaataactaaaatctaccaaattaagccttcataatacaacaatccattgcacaggctttgaccacccccttggatcatcagtcatcaccacagtatcatgcagtagaaatctagaggtttctatatggtattaccatcaccaagtcaaagcctgacttagggacgtttatttccatagaaacaggatcaaatttcatgtcatgtatgaaaaagtgagtactaagggtactagcaaagtatttgatagaaatgatcaagtccttaccctcttatctgatcgaagagaattaaaggctcgttctagtgtgttgacatcttcagtttcctccaatagtctcaaatagaacagtaagtatttgcgaatgcaagttatgaatttccgtgaactttctggcaggttaacttcaagagccttcttgttcccagccaaacctggagtttttcgcctaaatagaaagagagaaaaatgtacttgaaatcgtcagtgattcatgattggttcagttagtggagctacttaca

SEQ ID NO: 62364 - DNA, 726 bp, Arabidopsis thaliana landsberg
ctgagcgagtgtgtcaatcataattgtgatttatccaggtacattgcacgatggctgcaagcttataattaaataactaattatgaaaaataagtaggttcgctataaagtggacaccaacttgtgttcccactaagaaaaaaagactaaaaagtagtaatactcaaatcttaagggtagattagtcatctaataaagggaccaaaaaagattcttacagtcttaaaatgctctttgattaattaatagtctaatacatgtgtcatttcgcactaatttcacgtgcctaaaaccaaagaaagcttacatatctttttatgaatttgatgccataatgcattaaccgaaagtaaaattaataaaatgttcttaatagtttgcagacaaacaacaaaactcacgtgggaaaataagtagtgtgagtgccacactaaaaagttagtggaaaagattaggtgttttagaaaacgtttatgtatgtggttcaagactcgcgatatatattttggagatataacaagtaacacaacaaacgataaatagtttgcaagtttttaactaaattgaattcaaatttttatacatgagctttacttttactacttttaataacagctgacgaaaataaaaataaaagttcaagaaaaaaaatcgatcagtgaagctaaataacaactgaaaaaagtgtaaaacattacacatcacaagcaatggcttaagaagaga

SEQ ID NO: 62365 - DNA, 1102 bp, Arabidopsis thaliana landsberg
atatggaggcactggagatccctggccttgattgtaacctgcctgatatggaggtggtggagatctcgggccttggttataacctccttgaaatggtggaggcgcttgtgttccctgaccttgtcctggagtggcatagccctgttgaggaccatagctccctccaccaccttgcattggtggttgctgaccatactgtgtgtttctttggaagttttggggaccaccacttcctcctcctgaacggtcaaatctaggacgaggtcttgctctgccactctgaatcggtggtggcctgtgtgttatcactccattctcgtatttatctcctgaaaacaagaaacataattttgttgatagagtcccaacaacaaatatccaaaataagaccagtttgtaagaaaaaccagctcacctccatactctttgttctggggatcaatgtaggaatctggcaagatgaaaaccactccgggtagatctgtttacatataccaataacagagtcaatatctggtgaaaaaagttgaattcaaaagaaaacaaacataaatgattcgaactatatacccttgaacttttctgattcttgttcagtcatgattgcttgaaatccttggtaagtagttgtgctacaagcatacatcctttgcttagcctcttccacgctgactcaaccataaacaccaaaaatgaatcaatataatcgtcttaaccaatatcaataccagaagaagatacacaaaaatcaaagcagagctatataacagtgaatggaaccctagcaatggtaaagttctcacatttaagtaacttactgaatgatttttggacaatttagccaaaagcaacgaatctaagcagtgacaaaaattcatctactaacctgatgccaagtccttgggcgcaagtttcttcataagcagagaccatttcttctggagacttagtagtttcctctttggagaaatccatagtgataagccagtgattataatcacatccttcgaacaacacagtgtcttccgtgatctcatcaccttctctgtaaagcttggactgcctcgttgaaaacagtctcgccggtgctcgagtagctact

SEQ ID NO: 62366 - DNA, 591 bp, Arabidopsis thaliana landsberg
gtggtcggttaccgggtgaccgctaccgccggggcgctcgcggacggagagcaggacgcgctgcccgtattgagtaaccgcacgctggttaccgaatcactgccactatattccagggggcccgggacgcaccggattcactggaatgtgctgacagatcagggcagccacgaccagaggcagccccagtcgctgacgatagaatacacctccaacccggtgtggtacgccgtcatggcccttcccttcatggatgacgagctcgcgggtcatcagaacgccagcgcgttattcaatcgctactatgccaacgccatcagcgccaccgtggccggcagtctcccgggattcgacaagaccatggaggcctggatacaatcggattccgacgccctgaagagccctctggaacgcgacgagtccctgaaaacggtactcctccaggaaacgccctgggtggccgccgccgaatcggaaagcgcccagcgggcgcgtgtcgcacattggttcaccgacggcgacaggcgcctccgcctgtccgaatccctggaagcgctctcgggcctttagctttcaaacggcgggattcac

SEQ ID NO: 62367 - DNA, 628 bp, Arabidopsis thaliana landsberg
ctaagattgatgttaagactaaacccatcattttgtttgatgtttttcaacgccttttgtagattttcgagtgcactatcatagtttgagtagcaagttttgagccctcctccacttttccggctaatcttggcggcttctttggccttgatcgttcttttcatcagctctcttatggaaacctccgtcgctgcgttaacattcttttggcccttaaccactgatctgcacaacactttgaaatctgacacggagcatggatcgcgtccgcctcccataaccctctgagccattgctacaccgctttggctcgcggtcaggaggaggaggatcaccgcggtggcaaggtggagatttgtagacatttttatgtaaaattgcgtggtatttgaacaccggttgttgattatttgaacaaatagagggtggttgttatttataataatgcatacgctaaaagaaaaaatgggtaattttagtaagttcttttgaggaaaagagtttcaataaattgtcgccggtgaataattagagagacatatcaaatttagttccttggttaattaggcctaatgatgggttatttccttcttatttttatttttgctttgttctgaaaaaacgcaat

SEQ ID NO: 62368 - DNA, 629 bp, Arabidopsis thaliana landsberg
aagttcgtcccacgctcagctttttcttccacgaggttaaattttattggagttagctaagatcttagtatttatatttctactgtacgatttggcattcgactatgatcgaatgtttatattttatacgattcggcattggactatgattagtcatcattttttgaacaaggtctttcacaaagcggcgtgattatacatttttgttcggaccatacacattattaccgatacatcatcatgatgcaaatgatgattaatgcctgcatatgcatgtgactgtcgcttttcttatggcaaaaagggcctgagatttactattttgggctttatatgggcctgataagaaagaacattttgtgtgtttataagcaaccaactgggatgaaaaaaaaaaaaaaaaaaaagcaaccaactgaaaccctcttaatcatacaatgttcaaaacattccgaaactatacacaagagtcaaaaaaaaaaaaaaaaaaaatctaccgtaaactcaaacattttttcatttttttcttttttggtatcttggtcgaattaaaatattcacatttggcttcatcatcattgtttgacaagggtagagagagccaagcaattatcagccatttcatgcaa

SEQ ID NO: 62369 - DNA, 335 bp, Arabidopsis thaliana landsberg
ccgggatgcgtatgcgcgcaacgcctgttcggttgccgcgtataccggccaggcgacaggactcgggtgcaggcgtggtggatacggctgcgggccgggggcttgttcgaggatgacatgcgcgttggtgccggatattccgaacgacgacactgcggctcgtcgcggccggttcctctccggccaccgggttcgggcggccagtagcgccagcccggatcgaggccaatcgatgtgccgggtgggctggtccgcgtgcagtgtttgtgggagcactccgcggcgcagcgcctcgaccagtttgatgaccccggcggctccgaagccggctgagt

SEQ ID NO: 62370 - DNA, 307 bp, Arabidopsis thaliana landsberg
  unsure (1)..(307): unsure at all n locations
accttattggttgaggtaaaacttatgactcttatttttagaccggaggccaaacttgggtgggggcccttagagcacactggaccgcccccgttcacagtaggactnnnnnnnnnnnnnnnnnnnnnnnnnnnnnnnnnnnnnnnnnnnnnnnnnnnnnnnnnnnnnnnnnnnnnnnnnnnnnnnnnnnnnnnnnnnnnnnnnnnnnnnnnnnnnnnnnnnnnnnnnnnnnnnnnnnnnnnnnnnnnnnnnnnnnnnnnnnnnnnnnnnnnnnnnnnnnnnnnnnnnnnnnnnnnnnnnnnnnnnn

SEQ ID NO: 62371 - DNA, 577 bp, Arabidopsis thaliana landsberg
agtgcctggtcggcgtcgaacttttcgttgaggatcacgctgccaccggcaaacagggcgacctgggcaaacagaaaggcctggttgtgatacagcggtccgggcgagtacaggcgatccccggccttgaaccccagcgccagggcgaaggggtgctgatcggccggatagcggaacgcaccgggcgagacgaccagcttgggtttgccggtggagccgcccgaagcgatcgccttgtaaggctgcggtacggcatccggtggcggctggtcgggatagccgtcgagtgaatgcatgtcgcggcgattgatgccggcgagttcgccggcatcgctgatgatggcagccggtgccgccagtgccagcaatgcatcgcgctcggcctccggcatgcgatggctgatcggcatggggcacgcgccaagcttgtaggacgccagggtagcgacgacatgctcgaggctggtgggaacatggatggcgacaaaagactgcgcacccacgccgtcttccggcaatcgatgcgccaaccggttcgaccacgtttcaagttccctgcgagtcagggttggacgtg

SEQ ID NO: 62372 - DNA, 978 bp, Arabidopsis thaliana landsberg
  unsure (1)..(978): unsure at all n locations
ggtgaaacccttcgggaggagggagtgaatgtgcagcgcggaactttgcggttttaagtgtagtaagtcattttgtcgccatccacagtcacttttataagttaataattttaattaaaacatcaaaaataagcaaagttttggaccgcaacaatattcttaatcatataaaagtaaaattgaagaacacatgtaatagggtgtggttcgtatgcagtccactatctttttttgtttaatatttattttatataagataaatgattattaataataacaacaacacacaaattaatattttattatttctaatatatttcaaaaaagctttattcaatatgtaagtgagacaatgtacatgtcttttattttagttgtttatagtttcttataaagatttaaatcataaatttataattaataacttaattntacatttaactctattaattactgaatattatacactaactaataaattagtactagattattttatagaattattaataaaaaatctaaacttataaataagttcactcgttacatatctttatagttattattaatctttttagtcaattctatatatttatatatataatcacgcatctaatagttctacttacacatctaatgatttatttcaatattttcgtacaattttctatcagttcatgagttttaatttataaatatatatatatatatatttatttatttattcaaagaaaatataagagaatcttgattttaaatgtttgcttatttggtcattaatcattagttatatacaaaaatgtaattatattagtattactaatctattttaatatattaaatatttagctcgtactgtttattgtattcgtcaccattcaaatatttgtctagaatcgcataatatgtttttcaccattcaaatattaattcgcacatttgctccgcactaaccgaacttgttccgcatgatgcgtt

SEQ ID NO: 62373 - DNA, 1735 bp, Arabidopsis thaliana landsberg
agaggctccagcggaggaaactggctaagatcttcccaatacatacaagataagcaaaccaagacgagaaccccgtggatgtatttgtcttcgattggtcttccttctcctttccgctttattattttgaacattatcggcctcacaaccgcaaatgcaatgacgaggaataaggttatctctgtaagtatagccaaaccatcagctaaagttgctgaacttctagaaacgttcgcaatcaagagcaggagtccaactatatcagagactaaggctgaggataaagcaacccggccaatagatgaatggttcatgccaaggtcacgcaagagtcttgcgatccccgagaaggacgtgatgctttccattagtagcattacatcatactcttggaaagtgagaggtcgattcttagctgatttgagattgaaaagcaagaagccaacaactatagggaaagtaaccgctgcaactccagtgactcttgcttttgcttcagccttgaagattctcttgacgtccattcttacacctttgaggaaccagaaaatcaagaatccaaatgatccaaggcatcctgctacgtcgattctgtttttcgtgaccaagatatccgcaatgatcgagttctctcccgataaagtaactagaacattcaagagtagccctgcctgcaatgcaacatcgattttctcagcagcaaacacacaagttttgaagaaaaaaaaaaagacaaacaagaagaagaagagctcacaagcatcatagaggataacttgggaatagaaagacccaatttcttaaacaagatattaaagccttgccaaagaaagaagacgagcaagatgacaatctcgagcttcggaagacgatattgccaaaaatatagacctgccgatttaataataagtttctcccaaataccatctgaagagagcttagggggatgctcctcacaaattaacccatcatatcttacagtttcaccataccaagccatctcaaatatccattttacttcaggactcatatgtgaaatatcaccgcctcccattatgccgccgccacctcccattcccaaaatctcgttgccgcctccactaaaagcccccgacatcccgggtcctgtcccgttccccatttccatgacttcaaaatcttaagtgagttcttgtcaaaatggggaagacgataacaaaataaatgttgtgttccttttgataacaaagaaacaatttgtaaacaaatgacacacagatgtatatgctgtttataggttatgctgtttttaaaaaacacactttggacatctatagacatatgtagttttagaccctttttgagttgtttctccactataaatagtatatgtcttcagcttcttataagttataaaccacagaaagaagtcaactaagaatctaccagaaaaaaaggaatttctttaaataagatgactgtctttctatgaatgaaaacagctttggtcacacataagataggaaactatttctagatagtttcatgccaagtttgtcactaaattggtcaaaatatattggcaagtttaacattttcgcataagataataacatatacttatatttttttaagaactaatttgccaatcaaaagtagcaataaagtgaagaaaaaaagtctaataaagtgtagaaattaatcaaattttaagtcctaaagttggaaaaatggtaaagaagcactcaaaaaaaaa

SEQ ID NO: 62374 - DNA, 549 bp, Arabidopsis thaliana landsberg
tcgctgagtgcgcgccagacgcgttcgcgcttggctttcagcaggacctgtttttcgatgcggtcggtgtttgcgttcatggcagcccttcttgcggcaacgatacatgcaaccttcaggttgcatgttagaaaggacgtcgcgaatatgcaaccttgaggttgcgcgaagcggaatgccggtgcgaccgcgatccgtttatccttggcggattgccccggggccgctccatgaaacgcatcctgccgttgctgctgtgtctgttcgcgtggccggcgttggccaccgcgccgaaaccgttgttgctgacccacgtcggcctgatcgatggcaccggctcgccggtgcggccgggcatgacgatcgcaatcgaaggcaggcggattaccgacgtgtatcccgacggcagccggccggtgccgaaagaccggtagtgcgcgatctgggcggacttacgtgatcccggcctgatcgagcgcatgtgcacataccgatgccgagcccgacatgcccatacaagacgttctgcagccctgttgctggtggcgt

SEQ ID NO: 62375 - DNA, 309 bp, Arabidopsis thaliana landsberg
  unsure (1)..(309): unsure at all n locations
nnnnnnnnnnnnnnnnnnnnnnnctatttgtattgtacggcaccccaagagggtatcctgcacttttaccattacaggacgatgcgcctggggggagacagtacatttaggaaccatcatcagctctaacaccttggctatggtattgaatgattgtggtgcatgcatgttcatctcatcctcatcacagttagtattgttcggagacctgacagtcatattttttctgattgtgatccttgtccttaatctgataaagcgattatccatagacattgtgagctagcatagagtgttatcttatgaatc

SEQ ID NO: 62376 - DNA, 601 bp, Arabidopsis thaliana landsberg
ggtagaaaagaagaaacaatgtcttttctctcctttaaatcatcctgtacaggaaaagaaccatcagaatctaggaggactatttcccttataactcaaagtgaaatgcaatccaaactaaaacctacgtctttattatgatacatttagtcaaaatacacataaagtaaaaaggttaaagcacataaagtaaaaaggttaaagcttcttacagtccttgatgcatgagctaacaggaagtataaacaatcaagtttatggcgtttggcagagacatggcatatattgtgcatcagcacaagcaactcctcgaggttctttgaaacaaatccatcagaactctggcaatgtataaattcataccaaaagacattagtcaagatttatttgtaaatgagagagcttaggtcaatggctttcaaggaccttaagaaacagcatcagtgtttagaggaaacactgatgctgtttaacataaataaaataagcatatattatgcagacacaaaatgtcatcattgcatccaagcgaagaagatttagacgctaagcaagcatagaatcagtcggctatgcacaaaagaaagtaatatacatgacc

SEQ ID NO: 62377 - DNA, 545 bp, Arabidopsis thaliana landsberg
  unsure (1)..(545): unsure at all n locations
aaaaacccacaaaacccaaaaaaaaaaaagaaaaaaaaaannaaaaaaaaaaagaaaaaaggagaaaaagaaaaaaaaagagaaaaaaaaaaaaagaagagaaaaaaaaaaaaaaaaaaaccaaaaaaacggaaaaaaaaaaagagaaaaaaaaacaaaaaaaaaaaggaaaaaacaaaagaaaaaaaaaaaaaaaaaccaaaaaaaaaaaaaaaaacagaaaaaaaaagaaaaaaaaaaaaaaaaaaaaaaaaaaacacgaagggaagaaaaaaaaaaaaaaaaaaaaaaaagcaanaccaaaagaaagagagaggaagaaaaaaaaacaaaacaaaaaancaganaaaagaaaaaaaaaaaaaaaaaaaaaaaagaaccaagaaaaaaaaaaaagaagaaaaaaaacaaacaaaaaaaaaaaaaaaaagaaaaaaaaaaaaaaaaaacacagcccnaaaaaaaaacaaaaaaagaaaaaaaaccaaaaacacaaaaaaagaaaagaagaaaaacgaaaaanacaaaaagcaaaaaaaaaaaag

SEQ ID NO: 62378 - DNA, 1422 bp, Arabidopsis thaliana landsberg
tgtgtttcgaccaaagcgtagttttagtctctaaactctgtgtgttgtgtgacaggtgatgcacgagatctgtgaaaccaactcttcaggatgggttttacagaaagctcgatgatgagtttattaaatcatcatgactagattttaatggtctataaattttgatatgagtaaacggttcagtagttatgagatattcatattttgtttttcctttttgaaatcaaacaaccttttttctattactcaactagagttggtaagacaagccacaccaacacaggaaaataaacataagaagcaacaaaagaactatacaatacacatagacggctaagttcaaacttgacagagagtgttctaatgttctctattgaaatcttaagcatattcgaatatattttacatgcaagaatgtaaaaaaaaaagaaaacaacaatgtgaacacatgaaattggaagaaagtgtaaatacttgaaacttttcaatctaaaggttttcacagtttgatgtgatctcaaataacaaaaaaaggtaatacgaactcataaactgttgttcaaaaagggaacaagagaaacattgtcaatctaattcagtttagatgaagaggctgcaaaacccgaactcaatcttgtgtgccgtttcaccatcctcatctggagcagaagttccctcagaatatgtgcaccaagtcatacgcaaatctactccattggtaaggcctcctactgggccagccagagaatatagagagctgttttcgagttgcgcatatacttgattctacacgaagtaaacaaaaaggccatttctatgttaatcacaggttcttaagaagctaatcatttttacctacaccataccatagatgtttttccataaagctaatcaacctttgatttagttttgcacattatcataaaatgagtatgaccaccaaattgagtttaaggatacgtccagaacagcacaaacgactgcgaaaaagaaaacaacaccgcgattagtatgagattaacaggttggatcaacaacatgtatcttgaagcaacaaacaatgtaataagaaaaggaaatgaagatataccataaggccaccaagaaaaccgtcaaaaagaacccgattccacgaatcaaagtacaagtcagctgagaatcctgccttagccatgagcccaacagatgtgatcaacatcaccacaaagtaaaatacaaaaccaatcaagccattgaatccaattattcctgctaagacaccagctatgatagacagaaacgtccggctgcaaacacgaacaaaatgagggataacaagtcaaaaaacccgagaaccatcatctttttaagaaaacgaaagagagagaattgtattgaatcagacctgttttgaatgactttcaaattgttctgcaaattctc

SEQ ID NO: 62379 - DNA, 379 bp, Arabidopsis thaliana landsberg
gaatttggtttatatattgtcaaaattttctcaaaattttttttttttttgggcgacgtcttaaaggcaaaccatgaaaaggcgtacatgaggtaataaaactattgatacaaaaatccagacatacctatgactttgccttaacagctttaggaaacagcgtgtatatatcatttctttttggaaaacagtgaaccaaaacaattgggctgctgactacataatcatttcatcttccgataaaaactaagggagcctacacaggaacagtgtgtttggaaaagatgtttgggtcaaacgggttatcatattattaacgatgtaccattctcaagtgcatttttccatttcaggtgctgtaaggttcatgaataccttc

SEQ ID NO: 62380 - DNA, 859 bp, Arabidopsis thaliana landsberg
ggggtactctccatgaaaacttttttttgtagtgatctaagattaatttgtatattctttaaaaaaactcataagcttttttaatttgggtggggtttatccttattttcaaactcagctttattgacttcattgtatacgtttgtaaaagttttaactaatatatcttagttaatatatttgactttattgtatatttgacttcattgtatacgttaatgtattaaacaacttacaacttacagctttattgacttcatatgttatattaaagtacattgtaacagcttaagttaatatatttgacttcattgtatacgtttgttcaatttttcgcgtaagttgttacaatgtactttaattaatagtttgtcttataatttttagtaaaatgaatgtaatgtgtgattatgcgcatcaaaataagtatgaatttcttaattaaatatcacaagtagatattcatacgttcttaccatattgttcaatgatggaataaatagcaagtaattttgaatattgattgtaaaaaggatatatctatatatatatatatatagatatatatatatatatatgttactgtttctgtttaagcaagtctttgttaatctcacaaattccagaccaagagattgttggttatgctcacgaggtctatatgggtcgttattaacgttgaccgattgattggtcattggaggtcctaaagattcactccatccatattatagcgctttagtatcctttttgtatgaggggtttgatggcaaagtataaggttttgcccacgctcaatccccagtacgggtcaaaagcctgtctaaccaagggtaaatcatgttgatctcttgtttca

SEQ ID NO: 62381 - DNA, 171 bp, Arabidopsis thaliana landsberg
tacttaaccataatatcctccatagcctttaccaatcgcgtctgaatgtatccagattctgtgtctttacagcagcaggaataagaccttttattcctcccatagcacggaaaaagaactcttgaggagacaaagccacgcagagtacgacatatctgaacaataactcac

SEQ ID NO: 62382 - DNA, 476 bp, Arabidopsis thaliana landsberg
  unsure (1)..(476): unsure at all n locations
nnnnnnnnnnnnnnnnnnnnnnnnnnnnnnnnnnnnnnnnnnnnnnnnnnnnnnnnnnnnnnnnnnnnnnnnnnnnnnnnnnnnnnnnnnnnnnnnnnnnnnnnnnnnnnnnnnnnnnnnnnnnnnnnnnnnnnnnnnnnnnnnnnnnnnnnnnnnnnnnnnnnnnnnnnnnnnnnnnnnnnnnnnnnnnnnnnnnnnnnnnnnnnnnnnnnnnnnnnnnnnnnnnnnnnnnnnnnnnnnnnnnnnnnnnnnnnnnnnnnnnnnnnnnnnnnnnnnnnnnnnnnnnnnnnnnnnnnnnnnnnnnnnnnnnnnnnnnnnnnnnnnnnnnnnnnnnnnnnnnnnnnnnnnnnnnnnnnnnnnnnnnnnnnnnnnnnnnnnnnnnntcttgtggttttttgaaggacccaagttccggagaaaccaggaacggaggagcttttcccccctttttcgccccaacttttttcaaatgctgg

SEQ ID NO: 62383 - DNA, 1333 bp, Arabidopsis thaliana landsberg
  unsure (1)..(1333): unsure at all n locations
tatcaatgctatttcagaacttctaatttaagaattaaagtaaatttcatttaaatcatgatatgtctgagtctggttgcggtcttgcagaaatttaaaccatgtgttttagataaaatatgattcattccaactaaatgtattcagatttaaatggtgctctcgagaaattgttcgatcattagaagaaactaaatcatttagatgcgaggatactcactaacttgagacttgagtaaaagtgttctaaattttccttttgaaaagtaccagaagattgtatattataatcttttttgtcaaaatcgcaaattctaaagcaaacctttaaagttgttgatttcgtaatgcaaaactcaaacgcaattgcaagcactttaattgatcaaatcaaagctgaacaacgagatccgtttgctacgttgtcactacttttaaagttcaagcaagtcaatacaagaagaaaaaagttaacagaaatttttgattaagcaaagtatttacgatgctctctgcatatattatataaagcacattaaaatcgaatatatatttgagcttgaccattacgcaatatattctcactagctttctttcttcgtttgtcatgagattcattgtccccaagaaaaaatgacatgtgatgtgttacaaaaccttaagacaagtggcatggacggctcccgagtctaatttcgagcttcttcaatttaatcatgtgtttttcgaacaaatcattagaagattctttctcatctgaagaatcaatcatttatgaattatgcataaactatataggttcagccagggtgttttcgaaaagctatactcgaataaggtgtggaactgtggactaaaaaaacacacgatacggtagtccgatccaaataattgcaattcgttgagttatagcctattctaatacattttgcagctagtaataatataatataataaaactttttcataagttagtgacaccaaaaagccaaacgtgacgaagctgataaggataagtagatgataactgataaagataggagttgtatagaggaaaaaatatttgatgcttaacgccattgattattacatttatggcatgctagtggtccctacaccttttagttttctcatataagatcatttttcttaataaaaaaactttttataaaatatatacattgagcctaacaaaataatatcagcaagttaaattcttcttccgaaataacaaattctagttgaaattcgatttattctttgttacaatttgtttctcagacgtcgggctntattgtccgtaacttgcatgtgggactggccaagtgatcac

SEQ ID NO: 62384 - DNA, 1785 bp, Arabidopsis thaliana landsberg
tgctatctttcatgtgtcttagtgtctattgcatgcaagttagtctgatatttgaggctacttagagaaatagatttttggtttgacgattacagaatgagcaataataatacatgcctagaaacaacaaagagaagaataataactaagtacgattttgtttaaaactagtaaactactatgatataggtttttttttacttatttttactttagtaatgaaatcacatttttaagataaatggagcaatggcccacgaatgcatgctttcatgagttttgtaagttttagtattccaaggtgattggattttattttatctttttggctgttaatgagttttctaattaaatcgagtaatcaataatttaatttcatttgtcataactatatacaaaaattatttttcgagtggagaacaagaaaccaaccagtaaccatattaccatatactccgctagaaatactttaatgcgacaggtgcctcgggttgccactattatctacagagaatcgcatttaattcgtagcacatttatagttgtaacctaactttcccacagctaatttgttacaacaactaatcaattcaatgtgacaaatgaacagagcttctagggatttcacctagctcgccagacgcagccgtattcacaaacaatgccacaacaacaccggtggcaccagcaggaaagtctccggcaactccagctacgtccacggataagggaggatcagcttcagcaaaggatggtcacgcagtcgttgctctagccgtcgctttgatggccgtctcctttgtcttgaccttgcctagacatgtcacattagggatgtaatcttttcttatgaagttggttggtgcttttgtttttgtcccttttgtttcaaaacttatctttcaagtgtgtttctttgttcggacatttgttgtaatgagtcaacttcccactcaaatctgatatctctccgcaaatgagtaaatttatgctatttcattttccattattcatttgacatgctaatcataacaacttatttggtcgaaaactaaactttcaaatagtcaagaaggtgtagataccgacttttagaaccttgaattttatcttacaacctatgctccttaagtacgttatcaaatgtacaaaatccaaaaaccataattaaacctcagccaatcccaagtcctaaaagagaagaggtctatttgggtctgtgttgcaaggccaaagcctctgcaaagtgcttggacatttcccttacaaaatcgtcgtggagagaatatgttggagcagaggttgcagaaagtgcgagcgattcaagaacagcacgttgtctggcttttctgtcttggatagctatctgtcgctcttcgtagaagttaaagtcgtcgaggatcgaagaacgcatctcacagctgatgaatatatctaacatctctatacctttttccagtcccacctgcagatataaacacacaaatactatttcatatcttaacatctctatgttcatggtaagatcttgaatatgtttcttcgaaaataaacaaattttactagaagcattttttgttttcaaagaagacatgttccacattagagagatccatgtagagtggagagataactgcccttatgtgtaatcatagaagattcaaaaggagcatcaataccaatgtgcagtaacagctcagtttcattatcaatgcactttgagaataaaaatatgattcaccattgtcaaatctatatgcatattcaaccatttgaaggagcctc

SEQ ID NO: 62385 - DNA, 250 bp, Arabidopsis thaliana landsberg
cccccaccgacacaccggccgagggagacggggggaattccgagggcatagcaaggaaacacaagaaagcctcgatcagagaccgcggcaagcgggccgcaccgaaacagagcaaaaccccaagaaggccagccaactgctgcgccacaacgcaaaacggggagaaccagccagcaaagggatcgagtggcattacacccctaaccacaactcaaccgctgataagcaacaaccagcggggcggaccacc

SEQ ID NO: 62386 - DNA, 356 bp, Arabidopsis thaliana landsberg
  unsure (1)..(356): unsure at all n locations
agtnnnnnnnnnnnnnnnnnnnnnnnnnnnnnnnnnnnnnnnnnnnnnngcagagtgtagccgagaaaaaggccgtctgccacatgaactggccaacctaaaacagcccttccccggagtaccatcaatggcgcacattgccccggagatcttcaacggcctgattctcggcgcgttctacgcggtcgtggccatcggtctgtcactgatcatgaacttgaccggcacgatcaacatggcgcacgggtcattcatgaccctcgccggatatctggcctttgctctggtcagcgccgggacgaactactggttcgcgctcctggtggctcccattctgaccctgatcgtcggtgttc

SEQ ID NO: 62387 - DNA, 1231 bp, Arabidopsis thaliana landsberg
gacattataaaaaaaccttataattaataatcacacaaactatatcctttatcctagatcagattaaatggagcaaaagggtaaactaaaacaaacattgacacatatataaaacttttttttttttttttttaaacacagccaaaaacttgtcaaataatatttattttcgttgcaacgcaaagaacaacatgaccttctcacggtagctggattcaattttctcggtgagtccaaccagttttgcggtgagacggtcgaagacatcgtcgaggagatgttcaccaaaatggttgatgaagagagatcccattgttgcctttatgcaaaccatccaatgcctaacatcctccacgttcgtcggccgtttgagccaggccgttgggtccatcagctccatagattcgacagtgaagcatccatttttcactaccaggactgttacctcctcaggcgttgctgagtagataggtatgttgaaggtatcgacttgctcttcgctgatcaaaccctacatgtcaatctcaccacactcaacaaatcccataataataaaacacacgagagatgtatattgttaggtgtcatttttgttttttgagaatttttttgaatatgaagaaatacctcggaatgcatttgagtgagaacatcagccatggacgtatacatgatactgtcggcaagattggagaaaggcattcctttaggaatcccacacattccaacaaccaaaagacctccacttactatttctgtagccctagcttctagaaacttctccatgtcccgaccaaactgatctctataagccttcacaacttcatccgcggcatttgagtagtgaaccttgcctttattccacgccttggagcttttgtccaacacctcttttggtacactcgatagccagtgtgtggcccccatcgtcactacaatatgaacggaggattgaggaaggacacggccgtagaacgaacccgggactccgaccgccaagtaactccggtcttgagggagagatgtgaagagagtgttgaagtcgttttgtgggaggtcgttgaagaagacaagaaactctggttttgacgagtttgattttcttaagctggtttcaatggatttgatgatgttgtcaacgagaaagaatgtatttggtccagttgcacaaccaagatcggctatgcggaatgtgttggagtcagatgagattagggtttttgcattgagt

SEQ ID NO: 62388 - DNA, 2021 bp, Arabidopsis thaliana landsberg
tgggccataacagagttatgacacgggtcatatccgtcaaattacattgtttctagaatgcgaggtatgattgctaaaaacacgatcgacaaggatctcaagaacatcaacttgcatattgaacctacatacatgccgtatataggcatgtgcgaggagtattaaggatataggaccggttaacttcggttatcactggtttggttgaatgtggtttactaaccacaataatcttatgtatataagtttaatctcgattactttgttagttaagttggttgtaacaacactttaagctgaataagaaaagttgttatcttcttcttcgtctctcttctccgatcttgaatctccgatgtatcggactttatcatggaatacatttgcacgagatccatgttcaaacaaacatgaaaattagtgtattaaaggaccaaatgtttttcttaaaaaaacatttctatgtaattaagatccatatttcaaatttgaacaaagaccattgtgtctttttgctatttttgagccggtcctgcctacattgattcaaaatctcttttatgttcgtatacttcgtcaaaatctctgcatagtcacattcgtctgctgaagagtaccaactcccaaatattttcttgtatgctcttccattaacatcttttctaagctaatgaaaactagatatttgccttaggtccaaaactaaatctatcttctttcctcatagttttctcaatttccggcaactcacattatctcaattctaactagagtgtcaaagagtttttgagatgaaatacctctaaaagccagttagacaaagataagttactaaacttgtagattcagccttgtaactactagcttagaaaaaccttatggatttagaatatggttcaagaattttccatatggtttcaattgtggtttacgggatgattagttgagattgtagcggtaaattgtgacttaaaatattggtgttatatatatattgtttttaacataggttatgaattaaaataataataataactaaagctacagattattgactcttaaaaaaacgaaatagaggaatacattatatagatggtctaagtttgactcgtttaaccgttagctacttaattattaggtgaaaattcaaaatattcaagtgtacaaagtacttgttagattagaaagtttttttttttttttttttttaaattagattggatactttggattaactattctttttttagattctatattcaaacgtatcaatatcagtcatatcttattatagaaatagggtaaaagagttgtcgagagtggagacgtcggggcaagggaaaatgacgtgctccccaccaccccaatgctcacgcgcactatgccccacttaaccctaatttccaatgctaatctatcaattacatttcatttatttcttcatttatttaaagataactacacttattgtatgtataaactgcaaaacatatgatactaatatttactactctagtgaaagaagaaaatgatcctggctagttccccatgccacaacattccaacacaatacatttatctcttttggtcttggggttttacaaattgtatcagagtaaacaagaatatgttttctaaaatagttttccccataaaccgatctttcctaaaatattacaccatgtgaaacccaagacttgtctaggcaacctcagtaatatgagtgtataattaaagttctggcagaaaattataagatgaattcattaaatacgttatggagcttaggactttggcataatcggtattcaatcccactgttgtttaaaatagactcatataaaaattgtccagtatattttatatattaataaaaagagagtacacacatagtattgcgttcttggattctatataaaccctatataaataatactaacttgtgaaaaattaattattgcccactttctctctctctctctctgattgaatcttgaaaagaaaatcaaagtctcaatagc

SEQ ID NO: 62389 - DNA, 1002 bp, Arabidopsis thaliana landsberg
aacgacctttccttttaatcatctacttttttatatactttccaacttacatatgtatgcttttttttattccaaacaatataaatagattaattagaagagaattaataacacgtaaatttcgctgaaaataacagatagctactaatctgtaactatcacggctaaatatatattttatagctatctcctgcaaaaattgtcatctctttagtaaaatatatagatcgtcgaagtgtttaagacaccagcaaaatttatcataacattgtggccctgaatccaaatttcttcttatagtatttgtttaattcagttaatacatatacttatcttaactcgatcctatcgtttattgaaaatatataaaagttcaaaggagtaatttacattgttcttatataagaatctttcttttgctaatatacataaactaattagtaactttacacataatacagaggtatcagcatagaaaactaagtagtcacaaagcacttggtggccgattaatcatatgtgcttagatacaatgtaaatattaatgtgtgatgttttatatatctgattatataatatactctcctttttaggtcataagaggaaaagcgagtttgtgattggagcacttcaaatgattcggttgcatgcaaaaataaatagaatcatatcttccattagatttggattatattccagattctaacgtgacactcacaattgatgtcacgaaatatctacttaatgaacttattgtggttctgatcatttcactatcctaatctttgaaaacaaatctccatcatttcactaccatatagtttagactttttttttaaaaaattccttgctagaaatattgataaaactctagtttttacttaacattttgattgaatagaagaaactccttggaacttgacagaataaaagaattgtttgttcttacatatacaagaatgtcaaagagattccgagtgacacatgaatagctttttgatt

SEQ ID NO: 62390 - DNA, 1129 bp, Arabidopsis thaliana landsberg
  unsure (1)..(1129): unsure at all n locations
aaatagatttctaatacaatatggaatatttttgttgggtaaagaattgtggtatggatttgaataaccattggtgttcttgatttggttaatacaatgtcagatttcttttctgcatattttgtttttgtctttttgcaaccacttatagatcaaaaggtcaaatgcaataactcaccgaatactttgttgcatacttgcataagtaaaactttatatttttcttaccgatgcaaaagtttcttttaatatcgntttttcatattatttttcttgataaaatatgtataaatgttgcgtatatttttgttttgcattaattaaagagcgaagaaattgcagtcttacattgataattctttatagctgaatctcagatttgtatacaaattaaatgttaaaataaactagagtagaatttcgttatattatctaggatcacgatatttaaatttatgggattttgaataattattggtctttcttgatttggtctgcaatgtcagattttgttataatatattcaattaaaaaatatttgtttgcttaccctgtttcggcggtcagatacagagcggtgactagcgcctactacagaggtgcgttaggtgcgatggtggtttacgacattaccaaacgcctctcattcgaccacgttgcacgttgggtcgaggaattacgtgctcacgccgatgattccgccgtgatcatgctcgtcggaaacaaagccgatctctccgttggtaaacgtgccgttcctacggaggatgcagtcgaattcgccgagactcaacggctttttttctcggaagtctcggctctaagcggcggaaacgtcgacgaagcttttttccgtttactcgaggagattttcagccgcgttgttgtttcgagaaaagctatggaatccgacggtggagccaccgtgaaacttgacggttcgagaattgatgtcatctctggttcggatcttgagactagtaatatcaaggaacaagcttcgtgctcgtgttgaaattttgagtgataggccataaaatcaaaagccaattattgggcctttcttataagcccatatatgactcggatctttgtttgggtttttcatgtttagagaattagaggtggt

SEQ ID NO: 62391 - DNA, 226 bp, Arabidopsis thaliana landsberg
gacgcagtgcaagagggccacacaaaatggatactaaatacgtcgaagcattgacccagtgtgcaacaaaggaaaaagaagtggacatgatgacaaggcaaacataaaataccaaagcgccgcacatcataaaaaaaaaaaagggaacaaaagaggacaagaaccaaaccgcaaatacacagaggagaaaaataaaccaaaagaggccaacggagcgaaaccgcaa

SEQ ID NO: 62392 - DNA, 1978 bp, Arabidopsis thaliana landsberg
aaggggtatttttttttttggtaggaaaagaaaggagcttgccctttttggaagaggtacccaatggtaataattgtacccacttcccaccgaaacatgacccaccatccgaacgtaaggtgtaggtaattggctttattcatttctgcaagaaaattgaagtctactttcaaaaccaattcaatcaccatgtacagagagttctttcaatattaatactagctattagaccatctggaatggagagagagagatgattaattccttaaataatgggagagacctacgattttcagatcagtgaaagagtccctaatagcaaacaacttaaaaagaacgcatttttactattttggtactgttatttgataaagaagcttcttgaagatatccaacaataaaaaagtgacataccgatttttcaggccaatgcacacggggcacaaaccccaccattgtatccggagcactttcccaaacgttgaatgcaaaatctaccgtgtgacaaggaaatatgatatcatcatctattgagaagacagcatctgttttcaagtctttaatctctttaaatctgttgttcaaactgtcttctttgtttatatcaaatctcagctcaacctcatgcccatctcgagtctttttcttcagaacattatgaagatactctttcagagactctgatggagggttaggttcactccatacaatgtggatagagtcaagcctagaacatgatgcatagtgggaaacagacttctttaagagatcatatctcttccatgtgttcatcagaagtgtataacctttcctgcaggatgtgataaagaaatccatcaaattagacaataaagcacaaaattatgcagtcaaaccaaaagcaaaagatcaactacttaattataaattacatttactccataactcctaacctttgcacatacctacatgtaccgtatatcaccagcttaacatagcaaagattatgaattcatttgcttttcgatatacaaaagtgtctatataaatcacagaatcattgtagcttttgcattcatagattcattaacagcaaggagcttaagaacacagtttgcttataaatagagctgagaaacaacacaaaccataccaaatcggtaaagccaaagaatctccagtttaattatgaatttaagaaatgaatgaagacaaaaaaggttaaacgaatcgcagttataattgcacttatctaaaatttactttccataaatttcatttcctaaaaaagaatctagtcttcttcaccaaaagttaccatttagagatccaaatcaaatttagactcatatagtaaggtagatgattcagaacgtgtgtgtgtgtacagaccttgatccggagatccgatctgcgacggcgattgaactgttaacccaaggacgagaagatcggcaaacgattgtgaccaagacgaaagcgatgcagcaaaatagaagaaacttagtactcctcgccgtcacgaacttgcgtaatttctgatctccacgacgatacgctaatgaacaagctcccatctctttactaacttctcctcctcccatctaaaatcacgaattcaagtttccaaaaatagataagcgtatgattgaagaagatgaagaagagaaagacgtctcagaagtcaactgtgtcaaaagcgagtcgactcagtcttctttagtcatcatcgccttttttctctataggcgaataatctcgcagatcagagacgacgaattcttttctggtgtagcacggtgcacagtaagagaaaaccataatgccacgtgtgatagtcacaaccgtcgacgttttcctgattccatgatgacgtggtaaactgccttaggctattttgtgggtcccacttgagttttgttagtggagggattaaaagttaaaaaaaacaaaaattttggtagaaaaaacaatttaacctctgaattctgattgggat

SEQ ID NO: 62393 - DNA, 1377 bp, Arabidopsis thaliana landsberg
tttattacataagaaaatctccaaaaaaactcttatcacacaattcattgttgccaaaagttttgtatactaataatatcatctattaaattttacaaaaacaattttagtttcaactggttttaaattatagaaagaacaaatcattgctaataagcatagtcataaactcataatcatgcagaaattgtgtttattttgatcatctcaagggtaatggaaatgtcaatttaggttactttcgttactatttacttttttatcaaacactttcgttactatttaaaaaaatctaaatcctaatactaacttacaaaacccaaatcattattttctattacaaaatttaaaaaatacttggaatttgaaagaaaaaaacgtttttacaatacttacttgtagtgggttgctcatagttaaccgagtgagtgttttcttacataatatgaaaggacagcattgttttagttcatatcatccgttggagttatccaaaggacagcatttttaaacttagtgtaccaatttagaaaacgtcactgcaatttgcaaaaagacatcaaaactaagaagatcatctcaagagcctgacgtaaaaaaaaggtaaatagtggcttggtacatatcctctttcctccaatcaaatttcactcttgtgtcaatatcgactatgcatatgatcctcggtggactaaatgcagatcttccatttttcaaaacttttactttacaatatcgttatcctttatgctaagacccacaaaaattctctatctttgtacaaattttttattactgtattagctaacgtgcgaatatccatttaaaatgttttttaatctacaatctcggccaatcattgacccccaaaaaaaaatatctctctcaatcacaaatcatttcttaatataaggaaaaaatatttttttacaaattggaactcctctttgtctctgaataaatacaccacaaaataaaaataaataaaatcactgaaaaaacaaaacaattgttcctttcttctttactccttcaaaatggataaaattttaccacaaatcctacaatcacacaaaactaaataaagaaacgaaaaaaaaaaaaaaagtaaaagaaaacttacgatatccatgaagcaagtttcttgcttgtaaaaaagactcaaacccattcaacgtcttctctgttcttcaacttcttgtaacgaccttgttgtgtttcaaggtttcatatttcatcttctgcaagctttatgctgtatccatgcctcatacctgaacaaattcatagattgtgtcaccaataaaccattaactaatttgaaatcaagacaacaatgtgttgatcataatcatgcaagaatctcacctttggcaa

SEQ ID NO: 62394 - DNA, 2192 bp, Arabidopsis thaliana landsberg
gtacaaaagagcggaaatgtgcatgagttgccaacctaacgcgatgaccaaactcctgcaccgaaagcagaaacaacatataactctaacctttctcaatgccaatgaccaattcgttcaaaatgtctcactaaatgcttaaaaaatattgggatccctagctctaggggaaatgagtcacgaacatgtatgaggaagagacgaagaaatcaaacaaaataaaaaagacaagaacacatggtatagctgtataggcacatgccaatgcttgggtagagccatttcatttgcagcatactatgtgcagccacataaaaattacatatataatggcacaatgcttcccactgttcgcaatatgatacaaagaatgaggaaacacttttacaaatacctggaggcgctttgccatggccagaaaaggctgcacatcgcctcgagttccaaccacaagtatagcaatttttaaccttggaatggatcccaaggactcagttaaggacttttcaaatgtgattgtggactgccctttcgttggctcaaactcccataactccgacaccggagtaccgttatctataacttccactgtcccgtcattttgtattctgactagctcaacaatgagtttttgctggaaccacaagatattatcaaaaagaaatcatgagaatataataatgatttcagtgtaccgcattcaagaaacatatcctagtgattctaacagcacaaatagagattcttcacttgttaatatccaagattaacaccattgacaatatgtatgtggataaaatgtttgtcttatgttcatgctcaactgaatacatgagggtttagtttcctaccttttcttgctccgataatctatctaatttaagattatgaatcgcaggagaccctttctctgtcaaggaccgagagtactgaatctcactgtcattgataagcatatctccatagagaccaacaggtgcagtttcacagtggtctagtccttcaagaacatacaatcttgaatcagtggttatcgtctatttcagaatacaggtaacacgacggagaaagtaacaatgggcaaagtgcaataacaaggttgaatagaggactaacccctatgcccatcagaagaacgatgaccagaatcctcaggagtagtatctacagaaccagatgtttccaataaactcgctttctcgctctttacaccattatcttcaccctctaattcttgaagtggatgatcaaatacattactagccatcacctttaaaaactgaattcaactaaacagctctcactgcctaaacccacacaatcagctgcagcaacaaaccacctacatatggatcaaactccacaaaagaacatctatacacactcaaagaatttcactattcttatacatttattcaaccatagtgatgctaatggctctcctggcaaatgctgtacacagacgaatcaaagcttgaagcagcgaccagtcaaatccttaggtacagaaagttagctgcactttatataccaaaatccaaaaaagagaatcaaattaaagtattaaagaaatcggaaattggggtaaacagttttatacaaaacgagaacaccatggaacaaaagggtctcacgtttagctcgagaatgagattacccactacgaaaggatcaagctttacttgtaaaactcaaagtataacacaattcaaaagcaatttacacagaattgaatcaaccaacatcgagggtttcatcaacaatggagtttatgatagaaagattgttcctttacctgagtgaattggaaaaggagagaaattgattagtgggttatctctgtggaagaaagattgtttctgggtttgtggaattgatgaagaacaacttgaagattccaaagggtttggagacttttgaatcaaccaaatgtggtgagaccgccgatgagatatttattaataattgcagaatataaatatcaatgaattcattattaatgccaccgaaacaaaattaattggttaggaatttggagtagttttaagtcactgatactacgacttttcgttgtcaaaaaatgatattctttctccttaagctaagaagaaacattgagaaaattaatgttgttattctaaacagatttttgggatcaactagatgattttgtatagttctaggtagtcatg

SEQ ID NO: 62395 - DNA, 1182 bp, Arabidopsis thaliana landsberg
  unsure (1)..(1182): unsure at all n locations
ccaatcccaaaaactggagtatccaaaaaaaacacggctgtttcattcatctcctcacacacaagcttaacactcagtcgcccacgtgtgtactttctcaaccattcccttatctcccaaattgtatttacttcaaaaataaaccgaaccgtatcaaattaaaccaagaccacacttttgtctgatcaccaaaaaaaaaaaaaaaacttttattttttcctcgagacgtctctcttcttcaatttcttcacgattctacttntgcgttatccccaaaattggcaaccaaaaccaaacctctctctcttattgaaaccaacaatgagtccgatcgtcataacccagttagctacaggactcagcgttttagccggtgcggtgtttatcaaatcggtcatggaccaaaagcctatggctggtcaattccctcgttgtccaacttgtaatggtacgggacgagtcacgtgtttctgttctcgatggtctgatggtgacgttggatgtcgtaggtgttctggttcaggtcgtgcggcttgtagcaattgtggtggttctggaactggtagacctttaccggctcagattacggttcagccaccgaatcgtccttattgatgattctcaagaaatttgtatactttgtaaacgattcttctctcttgaactctctcactctctgtcttgtaagttgattatatatatacacatagatgagaacagatttgatagcttctgtgatattttttcttgtgttgggttgttttgttactgttcatagtcaaaatattcgaatttgtcattattggtggctcaaatctttagtattaactattaagaattaagatgatgggtttgatccaatgatacgaaaagttagcttcttcttgtatattgttgtaaatggactttgttggatgtgtttggttcatgtctagtactcaatatgtgaccatgagatgtttcaacagcctcttgttccaatggtatgaaattggttcatgtctacaacctcaaaacgttgtagaggaaggagtgttgtgtgtgaattttgtgaaaagctgcgaatagtaaagaggaaacggattacttataacaaattaaacagctacaattgtagtagatggtctctcaagtctcaagattagaaacatctcggagccaaaaaaaggcttcctacagcca

SEQ ID NO: 62396 - DNA, 569 bp, Arabidopsis thaliana landsberg
accgtaatttttttttaattttcttacatattttggcattttgctccttttctaataaattatacattattgctttaatcaatgagagtataggtgcagtatttatgattgtgcatgaactttctaatatgattttctttttttttaaatgaaaataaagatatgaaagttgttaaatgtggagaggcgtgagagtagggatgtgtctatgttaatttatgaatatgtagctttcattttgttatccacaccacacaagtcgtgttcgatgaatagttcttatccccatcttcatttatatcatttctcactcaatattagtcccagctagcaaacatcgttaaaaaaaacaaagattctatgaggcaatttcgcattctagtgtcatttgacatttgtagtacaaccatttttggttggctaaatcgctctagacaggaccatctcaagtctcaggtcccaactcttgagctatttgctacttatgagcacaaaaattatccaatcgtataattaggatcttagaacaaactattttctaattataaaaataaaatttggaattctat

SEQ ID NO: 62397 - DNA, 1309 bp, Arabidopsis thaliana landsberg
  unsure (1)..(1309): unsure at all n locations
tttcataatactctcacgttgaggacacatcgtgctaagtactagcgatctccaaaggtaaacatgtattatataccttaagaattcttaagatatcaaagaagcttccactcaaataaactaactgaaagtaatcaacccatacattcattctcataagtcagtatataaaaaaagctagaggaaaacatactagcaattatttttgccaaaaaaaaaagctatggaaaagtttctcagcacttttgatattttgcaagaaaaaatgttactttgattgtaagactatattattttccaacagtaacaaaaatcatttatttttatttaaaagtgaaaataatttgaatgttaggcatctttagtaataagagaataatttttctcacaagtaggtaattagtaataatgtgaagaataatgcttctcaattagattataaataaagtagttttgaaaaaggaaagagagcagtctttcttctttagcaatggctatggagggagatgtaggccctccggcgacattgtccccgacttttgtcggccggcggtagatttaccgactcctccactcttaaatctttttaacttttttttttcctttttaatattttaactaaaagcctttttcttgaacacgagtacacaaagaatcaactctagagaataaattagattctttctttcccccattttataatcggttcaaaaatgaaaccacgagacttgcgtgggtataaattaatggacaaaacttgtacttataagaatgatcaagctcttcaatgttttctttttttactgatccttttgaaccttgattgaagtagaaaaggcttgaaaggccttagttgcggtaaacgaactctactcctcttagcttgcgtcttacctacattatggattgatataacattagactgaaatctatactccaaacttatgtgttaggttagatttgcaaatgaggaaacttagatctcgtacctgattttgtgtcattgttattttcagaggattggacttgggcttggtgactagcttcggtttcagtcttttcaaccttctcgtcttcaattgttaactcttcgaccttattgtcttccattgttatctcaaaggtgttgtggtttggaactgatgcctcttcctcgagctttgtctcatcggactctagtcttgatgcttcgtcatggtcttgcacaaccgcatctggactgagagatttacctgattcacttagcanatcggtagtcttagaggataagttaggaagaataatcttactgtcacctgtttcatgcatc

SEQ ID NO: 62398 - DNA, 603 bp, Arabidopsis thaliana landsberg
aactactaatacactatttgtattatatcaccaaaaatggaaactttatcaaaagatataatcattttcttaaggccaaaaagcaaagactataagaagaaggaaaaagaagcagaccagacgattcgtccgagagcggcaaaagaacaatttcccctctacgattcgccttcccttttttcttaaatttcaaattagtagtatgagattttccttgctcaattcctattttagatatatatatatatatacgcaattattttccgtaactgaaatattgtactccggtttttcttttcaaagcgatcccaattaattagctaatgcaaaactatattttattcaagatgggctgtataatgaattttaaaactgttaagatgtgcatgaatcgagatggcccagtgggcccgacaagaggtatctattctgtgcgttgcgtctgtgcgcctaataaacgactgagctttaagtttacttattttctatgaaatgtgagaagcccactagagtccagcaagccagcgacgttccaattcccatttttacccttgttccacctccagtcagacgaacccgtttcttcccccggcttggacccct

SEQ ID NO: 62399 - DNA, 620 bp, Arabidopsis thaliana landsberg
  unsure (1)..(620): unsure at all n locations
gctgttgagtccatgtttgtgaatcttgtgagttttgagtgtcagctaaaactactgattcttcctcaacattggctctatttttgtatccttggggcgtttcatcattaaaatctttcaatacctctgttttttcttcttccttagaaatctcctgatcagttgactcatctagtggtgagttattaccatcttggacttgcagaagtaacacatcactagcattttctgcgtttccacaggcctcaacatttcctctatttttgtattcttgggttgattcaccacaaaaatcttttaataactctgttttttctacttccttagagatctcctgatcaactgactcatctagtggtgacttatgactatcttggacttgcagaagtatcacatcactagaattttctgcgtttccatagtctaaatcaaccaactgtgtatgagcattgctcgaagatgcttccaagacattatgagtcttctcttcctctactagcattgctttctcatcagcacttttgactaattcctgaccattctcttcccttaccacactttctagntattctgtagaaacttgtcccggagaactcttcaaatcactttctgttctttgg

SEQ ID NO: 62400 - DNA, 1853 bp, Arabidopsis thaliana landsberg
ttttttttttgaaaaaaaacactagttccatccacactaaatgcaaattttttgaattatagtagcaagataaatttaattgactgaactattagaactaaaatgacctttttgtacaagataaatttagaaaaaaaaatattttacttctttcagtatatgagaagtatttattgaaaacataaaatgtgataatataaggtaaacttatttttcaaaacagaaaaagattacagaattatttgaaaaacgtgaaaatttggtatttcatttctttttgtaagcaaaccatgacgtataaaagaaagaattgattctaggttttaatatattttaggaataatctcaccggtcatcatacaagtttagcagaagaataatctcaccggtttcattatgtagtatgtcaccatgtcgacaccacaataggagtatatatatgatatgactccaaaagaattgttatttaattaagaaagtattataagacaatacttttcgttgtatttgcggaggtaggtgggtttccagttatacaggtctaaaaatcgaggttggtgaagcttactttacaacaaaagtcctcctctattattctaccacatggaaaaaattcaccaaaacgtgatttacacatactctcacagtctcacttattctaatatttgatatttttgtattcatattttacgtagatcgtttaattttctacatgtcgaataaataaataaacactattaaattgactttaacgttcaaacttaaaagtttacttttaccagccttttttctttactgagtaaatattacctgaaaaagacatttttctaacttcagtattctttgtgtttatgaagaaaatgaagatcttcgtcgcatcacatgttgacctcagatctgccaataccactaggcactacgttactatttaatgaccacataatcaaatcttaaattgaaaagacgattttgaccctcaccgactcacatgcatacaaaaccacctactctcctctccaaaccccatgatcatgccattctctagcaaatattaaatacttaatattctttgatcaaccgagggcacgatgcaataataataaataaatttggtaaccataacaactcctcaatcgtgtagagcttagttaattagtatgtccaccaaaaaaggtttcaaagagaggctaccaactatttcttgtttataaaaatgtgtgtttaatggctcttttcatatgctaaattataaaatttgtgacagagaatatctaagactttagtggaataacaaacttattttttctcattagaaactgagagtatcgaaaaataacaatttgtacacatttcatttggcattttcaacataagcaaaatgggcgaaagagttggatatgttctctaactataatgtgatgttaatttggatatggtatcgattaagtgatctagtcaggatgctaagcaaagaccaccaatttcttataatgttgggataatgaatagtgaggcaaagtgatgctgtagttacacatatgatgagttgtcactgaaattataacataaacataaacaaggatatagtcttatagagggtacggttacacatatgatgagttgtcattgaaaattataacataaacataaacaaggatatagtcatatagagggtacggtgacttcgtgattcttagtgatgattgatgaatatgaactaagattcatccgcaagtaactttaaaatcagattactatgaaaatacaattttaattttgcgttatccgttttcaagtgtttcgtttaagacccgtataaagttttatttagcttggagatatgtgagagacta

SEQ ID NO: 62401 - DNA, 883 bp, Arabidopsis thaliana landsberg
attttcaagaacgatcttgatgtattacaccaactttgtgtcctctccagaaggatactttcacacagtgatatgtaacactgaagagttcaagagcaccgcgattgggcatgacctgcactacattgcttgggactatcctccaaagcaacacccaaactctttatcaatgaaggatttcgacaagatggtcaaaagcaaagccccatttgctcgaaagttccacaagaacgatcctgtattagacaagatcgatagagagctcttaggccgcactcatcggttttcctcaggagcttggtgcattggtagctcggaaaatggcgctgatccgtgctctgtccacggggatgactctgttttgaaaccaggccctggtgctgagagattaaaggagcttgttcagacacttttatctgatgagttcagaataaaacaatgttcatgacaggtaatgatccaagctcaaaatgtaaattcattgtgttttagttgtactcataggtcatagcctcataggtttccatataaagttatacaaaacgatccatgtcacccaaaattttagatataaagcaattacagtagcaagaatggttagagagagcttcaaattaaactctcgcttcagctctggattcaatacaagaaatcgaaagggctctaacaaaaggagtttggagaaaacaataagttacattttgaaatcaaggtcgaagtagagtgttaaagaggattgggaaaagaatcacaataacaactacaatagcgaggatagttgcgatacaagcccatttcctgttgttcctctgaagtactttagccccatgcaattgatcagtccctctcatgacgaaagagctcgcctttgagacaaatgatt

SEQ ID NO: 62402 - DNA, 547 bp, Arabidopsis thaliana landsberg
taaaatttcgggttacctgatcccgaaccgttttttttttttgtatatgacaataatctaaattaagtgttcttaacattttgaattttttaaatatatgctcaatcggtcccgaaagatcttgatctaggtagagatatacttaattaaaatcgatgaatgaccaagccaataaatcaagattcaatgttctttcgacgaattctgttcattttgcggttgggatcatgcattaatttaaaataaaccattattgaatacgctatggataatgatagtgattaattatccaatgaggaagagatttggttggcttgctttggagagtaataataaaaaataaaggcatgcaatagaaggggcagaccaagtggaatattctgcctaccacaacgaagtttcaatcaaagatatcagaggttaatgtcttccaataagcgaccaaaaatcttgattaataattaattatatcgcccaaagccactatgaacttgtgaacgcgttattttgcagacttttctcacctacctacatcgagatcgccttg

SEQ ID NO: 62403 - DNA, 531 bp, Arabidopsis thaliana landsberg
cttctgttttgtacatacgtgaactcaagaatctttgggaatcacatccttaaccatttgacaaaactcccttctctcttaagtttttatttaaattctgttttcaaacgttgggattgaagaccgtcatgtatttaacctaagtatatgagaaacatgaatatagatcaatagccatcatgataaaaccaaatgcgtagaaacgtaattcattccaccacatagtaatcggttgagaggtagacaatagtttgtaccttttgtctatcagggttcgaatcaatcggcttagatcgatagttctcatgttccgtttgagttccccaatgctaatctgatttttatttttttaagttgttttggagacactcaaaaacgtggtttaatatgacaaaagggtaaagcgtagtctccggcaaaggtcaacttaattggaaattattaaagagaaaattgttagaaaaacaagagtggtttggtcggattgaaatgtttgatacatcattcacaaaacaacaattctaatgacac

SEQ ID NO: 62404 - DNA, 913 bp, Arabidopsis thaliana landsberg
cgactgcgtactcatctaattgtcaagtaacaaattctcctgttaatatagatagaaggctacatacaacaaatcaagtaaatctgaaggtttatctatatatttgtcaactagatcattccataatagagctattttaagtacatttgaagatatcatcctacaaagattatcttccatttttttattcctaacttatcactacagtaggttataaaaggaagacattaacctgaagcagttgttgtccgccatcttcaccatcactaaagagtttcaagtctttgttccagttttcatgcaagtatgagccatcagcgttgctctcacacaacccatcttcccaatcctgaagttccacaagcagttaaacatgatttttcagtatagagtttgagtacttatgtgacttatgtgaaaaaaagattgattttacagtcttttgttaaacttccaagggtgttatgatgaaaaagctaaataagtatgaagacaaaggatggcggatacataagagtaaaatcactggaaaagcgttctatgaccggagaacagataacaattggtgttgaggaaaaatataggcataccttcaactgctcacggatagatggagaaaatctagacaattcgttcacttttgagtttcctggtccagtttgtttagagtgaaaggctttatcaatattcttcatcagaaccaaaagctcttttgacgatgtcaacgtactcatcacctatttagggagacacagtagaaccattcagtcacattaagatttcaaacagaagtcttgcaatccatattctacagataaactcatgaatttgagaaaatagcttaagccagggatcaaaccttaagagccatctgagttattatttctggatctgtgtgaaggaacttgtgtgc

SEQ ID NO: 62405 - DNA, 603 bp, Arabidopsis thaliana landsberg
  unsure (1)..(603): unsure at all n locations
tctagatcattttttgataaagatcctccgtatgcaggcatattgctaccgccatttacaattcgaattgtcatttcttctttcgttagtcgtttttcaatgattgttaaatctggacctctatgtcctcctaacttattaattcgatgacagtaaagacatcctttatcaaacattaattgagagcctttaaccagcaaagtatcttttccttctgttaaactccttggaataggttttgttttaaaatctggagaccatggtgctttgatgccttcataccacaaagctgatacgacagtaatgattatgatgataccagcaatagcccatggccgccgtaaaggatgtcgttctcctttatttgacataaatggtaatgccaataatataaaaatcattaccataggtccaataaagataacatacgattcaatggatggaggcataagagcaaacaaagaaaagatccataaaagataccaatctggttgtggcattgcatttatagatgcaggattcggnggtgcattcaatgcaggagctccaacaaaatattccagcaataaaataaatacttaaaccaatacaccaaatacaaca

SEQ ID NO: 62406 - DNA, 561 bp, Arabidopsis thaliana landsberg
gtgctgtacgtttggggcctcaaatatatatcagttattagaccaattttgtgtaagatttcttggtatagatactcagtaggttcagagttcaaaccaataaaatgcatcattttcatatacttttttttcaatgtgataaaaagagggcacgcactttatccttctactgctagaaacgattccagattcaagctcgcatattaagtacatgtaattgacaaaaaaaatatcagataaaactctatacataaaagattttttttaagtttctacacaacttattaagttaagacttaggggagaaaatggtgtgtaggtcttgacacaagaggaagaagatgagagcttagcttaatggcgaagaatctaacaaaaagcatattacgtcttagtttatttattatgtgtttggattttcttatctttttagtaagataaagtaaacaatacaagtgaaactacagctgcattctctttatagtatcattataaatttaaatcatttttttaattaagtagggtaaatatattcgtacgtattttcgtaaatctttacat

SEQ ID NO: 62407 - DNA, 717 bp, Arabidopsis thaliana landsberg
tgtccatatttttatccatttatctcattctcatttatctgtttttgtattatctgcctgtcgacaaatatcgtgtattgatttctagataaatcccaaatcttcatacgtttagagcggactataaatatatcttattatgagagatttttattcttataagatttggacggtccctttagatgtaaaattatttatttttaattggatttctcccgataaaatcgatgtttaattgatgaataagtcgacagaagacaatttaatgaacgtcaatttgtctcaaaatgaatggacagtattgatgctttcatttctctactacaatgattagttgaaaacactattgaacctttattttgacattattatctattacctattaacctatatacaaattatatactttgatacaaatgattttgaaaagaaaaaattataataaaaaaaaagtaaaacctaaatttttttggtgcaaacatatttcattcaaatcaacccataggtagtacaaaatttaaacaaacatctacatgtatcccatttaaaatctacaactacaaatagaagcaatagttaaattttgaaacagttttttttttttttttgtgcgggatcgatgattcacttatacaaagggggaccaatataacatgctatataatttgtcggtctaaatgtaattatttagaaaaggaaaatgtgaagtagctgctt

SEQ ID NO: 62408 - DNA, 1463 bp, Arabidopsis thaliana landsberg
gaaagatgagaagaatcacagagtctcacttgtttttggattatgtacccacttgggaaccggatttggtaaagctctttagaaacatattctgctttcacaatccggttatcatatagccttccgtgtaaagaatgggctgcatcacatgtcgcttctggtcttctgtactcaatgaagatacaacccgtctcaaatacatcctcggggtcttcttcttgttcttcttctatcttgtcgccagcatcccatcttgtcttcacggtacgcactgatgctacttcttgtggattctctgcctcggcctgcgcactttcttcaacaatcttttcacaatgctcttgttcagtggagtgtagatcttcattttcttgagtgcttgtttcagcagcagtatccgagcacggttcacataacttgtcttcacctgtcaaactgtctggcatgacaacctctgcaagatctacattgtctgcaatatcttccgctttctcggatccttcatctttctcctcgatcactgacacattcatttctttagaatcagttgattctaagttcaacaatggatttgtttcagaaacagtgatatctttgctcttgtgttccaagatgtttatcgacttaataaccccaaacctgcatcatgacaagacccagaggcctattttcttaatttactagcttttaaaagctcaatggactcatgggaagatgatctcagagcttaacctggcacattctaaccgtacatcctccaaaatttctttcacttcttgctcggaaaacgacgtgagatcttctgggtcaacctgtcaaacaagaaagaatggaatgttaatatagcctcacatagtttatttgggaaagattcacaagaaaaaggatacaccaattatgcttaccacattttttagctttagaatattcttaggcttgccaagaagtggttttgcatggctaggtatcccatagaatggtggattctcattcacctgcaacacatattacgtacacacaccactctcacaagtaactaaaggaatttctgttcaatgtcacccatacaaacacaacatgaactaacgaaagcaaagttgggtcactgaattaccgctacggatgatgcatcaggaaatgcacaaacggctgttattacactgccacctaacctcataccatttagaccagcacaagctttgagggtaacagatccatcagtgtactgaaatatagagatttaaaaagagttaggcgtgtgggtttataagacagtggggcgcacagtccgcattcagggttactctgtaaaagttacaaggtaataacaccttcccatgctacccggaaaatgaaaaattaaagatatgacacaatcacaagaactacctcgagatggcagactaagatgggggtatcttagcaacaaataaaagtacattctaacctctaggaaagcgcat

SEQ ID NO: 62409 - DNA, 545 bp, Arabidopsis thaliana landsberg
  unsure (1)..(545): unsure at all n locations
aatcgcgactcctctctgggctctctccttctgtatctctctaaggggaacaacgaaatcatcaccttctcttttatcgtcaccggcgatcattcaagactcgatctccggtaatcagaacattttcattcgccgacatgnnnnnnnnnnnnnnnnnnnnnnnnnnnnnnnnnnnnnaactgtatcatttcccgacggaatcgaatcagattcaagtcgattttccccttttacttttctcccttgctctatgttcatatattccatacgtattagagattggtattgatttactcagattatagttattttgtgcttcgtgaattgtttaattttgtgagctagggtttctgggttttgaattgttcaaactcactcattgtttgctcttttctaaattttttccgatgctgatttcttctggaatgctcaaattgctttcttggtacagtgtaagttctaagacttgatgctctttaattacccttgttggtacatctgccagtgtattctcgggtgtcgtgatcttacagattttatttttc

SEQ ID NO: 62410 - DNA, 1489 bp, Arabidopsis thaliana landsberg
cgtttattgcacaaattattatactacttgattcacatttaccatttttataagctgacagaggcaataaaagcaccaaacaaatagattgcaagtttacaacaacgaaatgctaacaaaactgaagcgggcatgttgaaaagtcataatagtacacacatttacgttaatacatttataataagatgaatcacataaacaatttactttgatcaactactgcttttaactttagaatgacctttttgtgccctaatattagataattaccggacatggtgtatgcaaatatatatcaaaagatcaaactaaggaacaagattcaaatctctctcttttctcttccttacttgcaatttcgtttgctttggttctatacagtgcgtttccgcttcgatcttttgcttcttcgttggccaacctcaggaagcggcttgcttgttgtgctcgaagctaacgctccttcacgagcctcttcttcctcatcatcagacccttcttctgattcagactgagattcttctaccaattcaactgtatctttcgcaaccgccttgttcttcttgctgcgcttctcttgctcttttaattgtctaaatctgttgtgatccaatatacatttatcagaaataacaaacttgtaagaaaaacgcttcgtattgagagatataatctccactagactcgggattcacttacctttcgccagcatcgtcaggctgagcaatagatctctttgctcgtcccgcacttattattttgcttgcgttttcatccatatttggctttgcaccacctagtttacgcagatatacttgttgggcggtactaagtacattatttgtgagcctaaaaccataggatggtttaacataagcagtagcataataaaaagggaaaaaataaaactcagatcctaccaataaacacagtcatatacaataatattgatgttacaaaatgtagtcacactagatgattccttatcaaacaagcttcgtattcctcgaaattctaacccgtcttacgtacattttgagaatgaagccatctaggttaattactagagaaaatctttcttatactccatttaatgagtagatcaagggcatggataaaacagttagatgagaagtttcaaggagagggaaaccaaccagtaaatagatagtcctgatgggacagacaatgcaaagtaaccgatcatgagtggaagaaacttgaaaacaagaagcgtattcttctgtgcaggatcatcagtctgacaaaagaaattaaattcggtttcagaacaatcatatcacattgtttaagtaacaggaaaaataaaagaaacttgtgtttatttctcacttgaggaggcttcataatttccattgacacatactgggaggcaataagtagaacaggtagaacaagataagctacagtgtcataccatcccaatggtggatgcccgtcctgcaccaccgaacgatattagacacca

SEQ ID NO: 62411 - DNA, 531 bp, Arabidopsis thaliana landsberg
agggaaaaccaataaaaaaaagagtcgacttgaggacgaaagttgttgttaatgcaaatggcgaataaatagaccctttcagaaagcgctgatatctatccatccggacgagatggctacatgaactcatcaaaccaaactgtccacctaataacaccggccgaagcaaactttaggcgggctaaacacactgagtattgtacacacagcagcatatagacgggacggttaaccgcgtccttgaacatagagacacaatagtctattttgaacctatctatataacagctgtacacatatatgtaaggggcgcacagtatggaacccagctcaagacaacgcataatgaaatgacttaggttaaatgagctatggccagacctatctgatgaagatagatgggtctggtcaacgccctacatgtttaaggagacgggtaccgcagaaacatgagccaaaccctcatgatatgagtggagtagatattattatatctcttgatgacctatctatcagtacataggaacaaac

SEQ ID NO: 62412 - DNA, 1228 bp, Arabidopsis thaliana landsberg
cactaaaatttagttctttggtctttttacgaatttttgtaaccttttttaaaatttattaaaattatggtttgatcatacaatttttttaaaaaaacttacagattctgtttgagcattctacaaccataatacaaagttttctattaactataactatattgtttatctactgcaatgtgtgaaactggttcacatctcggcagcaaaagacttcccacatccacaggttttgtagcgttagggttcgagaaagagaagcctccaccaatcaaagcatcgctgtaatcaagctgcattccgaaaagaaagagcatgctctttggatcacaaactgcaaaagaagtgagtacaaattaaaaacctgagccttcaattcacagatgtaaaaatacttgactgcagaagacaacacgagactgcaaaagacaacaagagactagaagtctcagttcaagaatcggcagctaagtagtatataattcaagctgcacatcaaaaagaatcaactgaccatctacttgacaacacaaaactaaaactttagcctatttgatcgaacaatctcagccttttttttatttggatgcatacttgaacacagaaactgacattcatattgtaagtatggcaagtctacatcatcaagaaactagctgatcttactctcagaccttattatctcagattagaagagttgatcctacatagtgatggaatagtttttacctatagtgaatccttggtattcgatagtggaatcatctggtcttgcatttgctctgttttcaaagtccatcgtgtaggacatacccgagcatcctccttgtttgactccaattctcaagcacaaatcttccccacgttctgatctcatcttactcagatgcttaagtgcattttctgacagagatatcgccggcttcagtccctccattgcaggtgcagctgagatattcaagagcacaactcactacactttttgaattcaagagcagaacctcactacacatatctaagtaacagctattaccatctttttaagaattctcagacatcaccaacgaaagttatcaatttcaatagaaagtttctaattttaaaaccagaatggcaataacaacaaaaacaacccagaaaaaataaaaaggactctcataggaaaataaagcagagcacttttgtgaatcaattcgaaccttgaaccgagctgatcgaacagaaaggc

SEQ ID NO: 62413 - DNA, 556 bp, Arabidopsis thaliana landsberg
  unsure (1)..(556): unsure at all n locations
ccacatttctaaaagaaaagtacgcattatgaactttattaactcaaatatcgagtatcagagtaaaaatatgtcatannnnnnnnnnnnnnnnnnnnnnnnnnnnnnnnnncatgtgttaatgttacaggaatgaatttggaatctttaaaagggaaaaaaaaaacaaaaaatgaaactcactatgcaaaaaaccatgtctacctaaatttggtcacaaacatgttttacgtgattatatttgccttcatgaagtatagaccaacaagaacgtctcaaatagtaaagacagaacgtgggtaagtgacaaacacggttgcatgtaaaaggtaggtacaaacgctatatcgacaaccagatatggttggtgtttatatctgtgtaacctagtggtgcatgctcaatgaaagatataaccaaaaataacacttttttccttatgcttaagaaacatatcagatttggtgataacttgaactaaagacccaagatatggatatgaatttcttacctaagtttttaaagagtcaagaagcaatgccttgttaaaacaaac

SEQ ID NO: 62414 - DNA, 568 bp, Arabidopsis thaliana landsberg
aaaaagaaaaaaaaagggggaggcgtaaaaaaaaaaaaagaaaaacccaccccaaaaaaaaaaataagaaaaaaaaaaaaaaaaaaaaaagaaaaaaaaaaaaaaaaaaaaaaaaaaaaaaaaaacgaaaaaaaaataaaaaaaaaaaaaaaaaaagaaacaaaaaaaaaaaaaaaaaaagagaaagaaaaaagaaaaaagcaaaggaaaaaaaaaaaaaaaaaacgaaaaaaaaaaaacagaaaaaaaaagaaaaaattaaaaaaaaaataaaataataaataaaaaaaaagaagaaaaaaaaaatacactagaacgagaaaaaaaaaaaaaaaaaaaatgcatgatagaaaaaaaaaaaaaaaagaatacaataaaataaataaaaaaaaaaacaaaaaaacaaaaaaaaaaaaaaataaagaaaaaaaatatataacaaaaaaaaaacaaaaagggaaaaaagaataaaaaaaaaaagaaactgaataataaaatataataaaaaaaaaaataataaacaaaagtttaaaaaaaaaaataaaaaaaaaaaaagaagaaaaaaaaa

SEQ ID NO: 62415 - DNA, 560 bp, Arabidopsis thaliana landsberg
  unsure (1)..(560): unsure at all n locations
tgaggtggnnnnnnnnnnnnnnnnnnnnnnnnncggcggaggatttagaaaagtcacggttctgccgtcaacttctgctggagatatcgctggattgttatctggcgttgaggttgcggcgaggacgtctctgcctgtgagaggacgcgccgttttgaatttccggtggggcgttagggttcctacggagatcagacgcgatttcgatccaacggctgctatttcgttgaggagattcccttttttggtgatgaataaaataggaatcgaacacgtggacggcgcagatgctaaagtgaccaaatccactggtgatccgggtaaagtttcgggtccggctcagttcacaacaagtggtgacgtggcggaggtgatagaggagcttcgaacggagaacaagcagttaaagagagccgttgaagatctccgggaagtaatatcaaacgtccgtccatactcgccggcgacaattgattacggatccactcgaagtatcgcgaatccgagagaacaacaacaacaacaacaacaacaacaacaacaaccaacgggagatcgag

SEQ ID NO: 62416 - DNA, 143 bp, Arabidopsis thaliana landsberg
agttttttcccatcttgagtatgaataggtttttaatactttgtatcctccgcattacagggccgaatcaattaagatagccaacggcgtatagttcttttaagaggtgtgttacacaaatctcatcataatgattgtgtatt

SEQ ID NO: 62417 - DNA, 1524 bp, Arabidopsis thaliana landsberg
tatgtcgggaaaagcctatatgcattggtagacatgcctttggtgaccagtatcgtgccactgattttttgattaaagggccaggaaagttgaaaatggtttttggtaagatcataccaaactatattcattagacaatgaggattcttcaatcatatagttcagattctaagtggatacatctcttgtctaattagtcccagaagatggaaacgcacctgtggagctagatgtatatgatttcaagggcccaggtgtcgcacttgctatgtacaacgtagatgaggtctgtctcttttagtaactggctttagttttggcatggttttggtttctgacaaccatgctggttttgtgacatgccagtcaattagagcttttgctgagtcatctatggcgatggcattaactaagaaatggccattatacttgagcaccaagaacacaattctcaagaaatatgatggcaggtttgtttttatcttcttggatttgaagtctgggtttcacttttcagcaagcgagctgctttaatatgtggtggaacaatacagatttaaggacatatttcaagaagtttatgaggcgaattggaagcaaaagtttgaagagcactcaatctggtcctttttcttaaaaaattgtgttctgcgtcctttttctttacatattcattaaaggtaatatgtgaataatactgttggtttaggtacgagcaccgattgattgatgacatggtggcttacgcagtcaaaagtgaaggtggctatgtctgggcttgcaaaaactacgacggtgatgttcaaagcgatcttcttgcccaaggtataaattaaaaaatatagttcttaaaattattatttttgtatcgatacagcaactaagatacttaatgcttcctttctttattcttttctaaatgtagggtttggctcattaggcctcatgacctccgttttggtttgtatcgttaaccgaaagccaatattcaatttttctttgcaaatgaaagtcttgatatgatatgttttgttcagctgtccgctgatgggaaaacactcgagtcggaagcggctcatggaacagtaactcggcatttccgactgcaccaaaagggacaagaaaccagtactaacagcatagcctcaatatttgcatggacacgcggcttagaacacaggtctcttgcctttcacacacggtctacattactagttaactgagttctgcatttctttatgcatttacactgacaacgttcttgtgtcttgtaacctagtttctcttgattttcattttgatggattttttttaccctttttgcttctcaagggcgaaactggataagaacgagaaattaatggatttcgtgaagaagctcgagtcgtcatgtgtaacactgttgagacagggaaaatgaccaaggatcttgcccttttaatccatggtcccaagtaagtagtctttccttttctcactagcagcaacttttctattacaatctggtcatgtgcatgaaatacg

SEQ ID NO: 62418 - DNA, 198 bp, Arabidopsis thaliana landsberg
ctaagaaaatcatatctttacgttgactaaccagagacaaatgtgaatcccatgttaatgtctctgtctcatcttcaaatgaagaagactgtgtggtcgccgtcaagttttacgggtcacgagttagtctttgtcgacctggtgactccgagtggactcgcattgacgtgccttgtccatctttccattcttctaccg

SEQ ID NO: 62419 - DNA, 655 bp, Arabidopsis thaliana landsberg
ctgggagtgggggaaatgggaatgtaacgcattccggttacttcctctgtacatccaagaatcaggcttaccagaacaattgtggctgtcagattttgcagagtataagccattgttgtgttagttgaggataaaaggtaagagcttgaatgtgtggtttgtggagggaagatggaagagatagtgtgtgtaatatatagagtagagtgaaatagttaaagctaattatgggtacattaaacgaacataaacaaagtgctttatttactaaagagagagagcctacaaagtctggtagcatctttggtattggcggtgaattattgcatgatgatcagtcataacatttgccacacatgtctaattagtaattttggttgtgatgggcttttgtgcaacgaggtctttgtcttttctctcacttttcttttattatttaaaatcctactttcttgtcatattcaaaccgtgaattctgcaggtttatttggcttcacatacaagtaacacaaaaccgatgaagaagaagtcagcgagagacgacggcttccactttgaaagagtttgatctcttttactttctctttattctttacgaagttggtaaaacaaatatgaccattaccttgagtttttcttcttcgatcaatctttt

SEQ ID NO: 62420 - DNA, 216 bp, Arabidopsis thaliana landsberg
aggcttacaaagcaggatatcttactaaggaactaaagtaagaaaaggccttcaaagagtgaaaaagggctatttgacctgaatggattatcaatatggtggaaagaaaaaaagcaaacctatattagaatggacggtaaaatacactatggcacgtaaaatgtgcgtaaatccaaggggtattatgttaagcagttcatcatccttgcaccgtac

SEQ ID NO: 62421 - DNA, 1224 bp, Arabidopsis thaliana landsberg
cctctcagtcaagattacagatttgcaaatttatcattaagggagatataagaaaacggctataaagacgcagaagcaatacagatatctaagagacattcaagttgtttgccaatataacaaattatagatcctaagttgtcagaagtataaagctaaagatgggattcatgtgtcacctttccacacgaattaggcaccaccccaacaaaaatcacaatattccctgcgacatccaaacagagagaggtatggttgaagagtttcgtatctagcctatgaaaacagttgcatcgtaaaaactctctaatgtttccacgttttaaaggtactaaggtgtgcatctattctaacagaacttatttcaaatatcccaccaaatattcaagatcaatatcatggcttctatatcgaaaactttaacctaacaccttaaatatcatcaagatttgtagttgaaaaccatgttgagatttattctttgttaatttttcatgtgatgtatggggaagaggacaaaaacctaatgcttaagtctctagaggctcgtttagctataatgaacatcaaaacggtaacagaaagtgaacgagaagtgagattacttaccgatccagtcaattccatagaccttgaacccattagcattaagctgctttgcaaaatcactatacctgccactgtcaaaattttgcaaaaaaataaaccaatgttaagattcctaaggccaaggaaattagaataaactcaaatggtgcataactaggttcaaacctatgctcgtttaatccatgtagcagaacaataagtcccctgcaagaacatatagaaaaaaaataagaaaccagacaagaaaatgattgaaagtttaccactttcttgacttgtatttaaacagagctcagaatagcttacaaaatcagaggcatgaaagattcaaaaccatattaaaagaaaggaaagtgatagtgttaacgaaacattaaaccagattgtatgtcttttgcaaggaaagatactgtacacggtcgtatgtaactatcattatcaacaaagtcacatgcatctaatattatacaatgatccttgaaaaccactttgacaagcaaatatcatctttctctaaattttcccagctaatctgcttcataatttcttcataacactcaagagaagcttaccaactaaatctaatccctgttacttgattaaataatcatcact

SEQ ID NO: 62422 - DNA, 308 bp, Arabidopsis thaliana landsberg
caacaacaactttcaaaatctttccaccataacaataaaactccaaaaaaactcatttaacaaaaaccaaaacatcattaacaccatatctaataccaacttctcaaccaccttactacacttcttacacagcgcattacacataaacaaaactaactaaacaacccctcgacgaaacaccctattcttattgtacccacaacatctttaactaacatacaaaaccccacccaaacacctctcactaatctttcattacacaccaatttcataaaacataactttccttttccttctatccaaaaacc

SEQ ID NO: 62423 - DNA, 1022 bp, Arabidopsis thaliana landsberg
caaactccatctgcgaatctaatgctttaacggcgcaaatatgtgcatgagaaacgtttttcgagtaagtgaaatcagagatattttcaccactcccgagtataaactgaaattttaaaaactaagacagtcattcctccaaaaaaggaaaactaagaatgcatcaagctcaaggaatactaccaggtataataagataataaacgtagacgcaaaaacgcaacaatgggatgaactattagtaagacctttgcatatccggacttggctagattcaccaaaaaaggtacaaactctgtgtcaccaggtccaaatacaatgctagagcgaagtgcacaagttaagagaccatctcggttgttagccaatttgatcaacgcttctgcttgagctttgaagtctgtcaacatagattggaactgcaagagaatcagagcaaaacagatatcatctctgaaaaagaccaacgacaaaaaccaactaaacaaacatgctcaaggattaccttcaaaggacgtctcaaggattcatcaccatcacgtataggttgggaaccatcaaaaacaacatcagctgtactgttgtagataagttttctgactccagactcacgacaggcagaaatcacatttcttgtacctatacgagaaatcgattaaccacccaagtttaactaatataatggtaaaccatcttgaagtgactaagaactttaccttgaactataaccttgtagcagtcaaagtaatcatgggaacgtaaatcagtagctcccatgtaaaatacaacataggaaccctcggtaactgcaaggaacaaaacagtcacaccaaaactcaaatcagaacccgaaaatctcaaatagccaaacactcccccatagcattttctagataccaaaaaccgatccatcaatgtcatatctaacaaagtgcaacaggaaataagaggaaaacctttaacgatctgaggtttatcacgaacatcgacgcactgattagatgcgcagtcggaggagagag

SEQ ID NO: 62424 - DNA, 644 bp, Arabidopsis thaliana landsberg
  unsure (1)..(644): unsure at all n locations
aagctaggttacaatatcctatcatggaggtcaaattaacaagagtgattatggtgcaaaacatgtctgatccaagaaggaacgaatgtttgtcaagatcaacatggatggtgttactattggtcgaaaagttgaatctaatgcttacaacaactacaaacagctctcttttgtcgttgacaaacttttcacaggtctactcgcagttaaatcttaatctcaaatactgacttttagttctatacgagtgttacttgtgtatactgaatatgaattgggtatgttggggggttatagctcaaagagatatctctgatggtcaaggagaagagaaatctatcattggattattagatgggaaaggagaatttactttaacctatgaagacaatgaaggggacaagatgcttgttggggatgttccatggcagtaagaatcttttccccttttgttctctgaatctgattcagtgttntgcagaattagattcttgatcatataacaacaaaagttctcagcttttaatcaatagtagtagtaattcaaattgataattctttacataaagaatagaattttgcttggagatttgtttatacctctttttttgcatactaactgatcttttaaatctttgtttttt

SEQ ID NO: 62425 - DNA, 1586 bp, Arabidopsis thaliana landsberg
aaaacatttcattcattttttttctatggggttgggcctaattaggtgctccaacttttagttttttttttccgtcagttttttttttctgactagagttataaataatcatagttgcatgaaagtacagtattttgttgcaatttttagatgacaattgaaaattgtcccaatgaacttacttttttacacattttattaagtagatataactatagtctggctacaatgatagttgcatgaaagaacagtattttgttggacttttaagatatatgcaagatatttttgtatgcgttgaaaataattcacataaaaaactcgtagaatgagtaagctcatgttaatattattaaaagaaaacaaaagtctaatgtatagtttaatatgttatgctttaaaatatacaaatctataaaaataatggaacacaagaagatgataacccatacaaactcaaacacgttattggctttgctattttatacgccaagcaaacttgtctgatagaaattggctttgtgagttgtgacgcacaatggactagtagtatcgtgataagtacatctaccacacgaaacgaaacgaaaccagaaagacatgttcctaaattaccaaacaaccccttcgtctcttacatacaccatttctcgatgatcaagaagcaaattcatgaatccgtaagccacacaataataatattaataatcattcactaatatataaattaaaagatgaaaaaaaaacgtaaaaaaaaaaattgaggttcagattttgatttgaggagaggaataatctctctgatcttcttttacaacacatcaccaaatcaaatccatgtctctccgaccaatctctcttccgatcggagcttttgaaccaccacaagtttttcaacggttgagatcgaatttttaattttttaaactttgaccattttcgcagccttgaccaccggattttctctagcgatcgcctcacgaccagcggttttgtagtcgtagctacaatcatgacgatcggagtaacggtgctctgagcagaaaagctcaccgcatcggcacctgaatccggtcaacccaactttcttccgacaaccagaacatcggtttacgatctgttgatctctcttcttcaccgcatcgatctctcttggacgaatcacgactttagctggtgacgaacgaagattgacagatctagccgatctcttcaagatcgaacctgattcaacaacacctgcggccgccgagacgagagatgcgttgaaacatttctgacacatgttgttcgtcgcaggattcgctgtaacgccgcagttattggtacataacgtcgttgttgttgtcgtcaaggtttcgagaactttgaactcggtctcttccttctccgttctctgagccatcgtcttattgaatctccctgctcctccggcgagtttacggatcgattatgaggagagagagatagagaggtagagagaggtaagaatggaatatgggcctcatagagagacgcgtttccatctctcttatcatctctccttccaccatccccactttctcgtcttctggtggatttacgtt

SEQ ID NO: 62426 - DNA, 411 bp, Arabidopsis thaliana landsberg
aggaaaagagacctagtctgagaaatctacgacgaagaacatcattaaatctcgattcagaggcttctccaatcctcctaccgctgaatactcccaagttatcaaagaaataacacttgcaagaagcattcgctggaaataagtcacgatgaaaagaacctataattgacacaaaatgcattaatagaaagaccaatcagttctagaaacatcttgcagcctttccattttaagaatcaataaatacagaaacgaatttttgcaaaagttaagagaggcggaaaaaaatactttcagcatccttgagatcttcatggagtctgataatctctttcttcctctctttagcctaatttcaaaatcgaaaatctcactatgttagaacctccgtctcgcaacaattagagctga

SEQ ID NO: 62427 - DNA, 1043 bp, Arabidopsis thaliana landsberg
aatggatccataaatagtaaattttcggctaaaatgtatatcttttgagaaatagcaaagattgcacgctggccaatgagatggttcacttccaagtttacggatcaaatgttggacataaaacccaacacttgtttctagttgtttcacctctaaaacagatggtgaaggaaaacaaatcgtagaaaaatgataattaggaaggaaaacacagttagaatcattattaaactgctgaagttaccatttcctttgaagggagtgcacattcttgtgatcaactgtgtaatcatgaagctgatagattcttcaacagattctaagttccttcccatcgatattaacttcttcagtgaagcttgagtatgccaaacagagcattaattcataagtgcaaaccaggcttatattaaaggaaatgcagctcaggacttaaataatttgtttgcaactcgggaactttgaataatattaccgaatatgaaatctacagcctgatgtgaccaattgctgaagttagagtcctgcagaatataagaagcaagttcagagttgcaaagcatttaagagtgcgtgcatattaccagaaaaaaacttaagcaacaaagcctaacattggagtctgcttcagacagttccaggagaaaatctatagagatcctaagatgttctgcttcctcttcataatccggttctgcagtcaaagtttcaactcaaataaaaaagagtcccagaatatgaaatgatggtgcttggttacatagactctattttccacttctctctcccatatagcacattacgtcatattatgatatgttcttgtattgctttaaggaaattgaaactctgagataatagacgctaaaccaggaaaaggaagaccctaaacaaacctgagggctgcaatctttgagatgatcgagttaacttccttctgctccttctcctcgctaaggataaaatgacaacacaagctgataagttaagcccacaaacacaaaggtaacaaagagaatacaaaatgttcaagctaccagact

SEQ ID NO: 62428 - DNA, 640 bp, Arabidopsis thaliana landsberg
tggctgtctttattgtctctgaatacgttgctatttgagatatatactctatacactatcctcttttttatatttattggatctctatcctatggtatagcaatggatatgtaattttttcaatatttggccatttcctgacttaattagtggaactcttgaaaatatttctattgatacgttggaactttcaaaattaaagttagctggatatactaacgtgaaaactgtgattctatatcactagctagtatttaggaagatctttagcatgtgactatatcgcacagaatttaaaatctaatgatccattttaatttcgtagttatcgatgttatagttaataaacttaatattgataatcacctattattgaggtggcatacgtcgaattcgagaatcaagattgttagcaaaagattttataaaattacaatacaaactgatatatacatacatatatatatgtatatatataacaatttcatttaaataaattatattttatagttcgatctgccagttttcaaagttaattatcagtattttgttataccttttttgtttttggttttttcaattaaagaatagtaaccaacaacaaaagcttctcataagtcacaacgtgcatttaccctga

SEQ ID NO: 62429 - DNA, 366 bp, Arabidopsis thaliana landsberg
acgagaccgacaagggtgcctggttcgtgttccgcgccgtgaagccgggtcaaccggtggccgcgttgctgcccgaggtggtcgaggaagcgttgaaggcgttgccgattccgcgtccgatgcgctggtccgaccacgactacagtttcgtgcgccccgtgcactgggctggtgatgctgcacggtgatgccatcgtcgatggtgaagtgcttggcttgaagagcggccgcaagtcgcgcggccatcgcttcatgcacaccaatccggtgcatgtgctggacgcggacagctggctggatgcgttgcgcgcggccaaggtgctggccgaccccgccgagcggcgccagcgcatccgcgaaagagat

SEQ ID NO: 62430 - DNA, 904 bp, Arabidopsis thaliana landsberg
tattagcggagctgaggctgtcgctttcttccagggatcgaatttgcctaaacatgtccttgctcaggttcttcttcgaaatctgcatctattttcttcttttgtatggattattgagaaacggcggagaatacttgtagttcctataggttttgaattggatctttgatctatgggatcgttggttgtgaatgggatgtattttgtcaaatttgttctttgcggggtggttaataggacctctcttttcatttctggagcttgtagtcaggttgatgtagttctaatggagaatcctttttctaagtgtagaacgctaaatgtgtttgctatccactgtactgttatcagattggcacatattgagctggtatcagatcagacattgtatttatgtagatatgaatagttttaagctcttttgctttcaattggagagtaaaatttgaatgaaaatagcttgttaaatgacagagaagcaacctagatgtgtatacttgtctgtaccgtgcataagccaagaatattgcgtgcattgaaggaattctgcatattgaattttaacatacgtttctggactgtagacaacagcttcagattagttcggatagaagctctttctgagcgcctattatacaactattctttggattgttaatgctataacttgtttctgttttttaatctcttgtaggtatggtcctatgcagattcaaaaaaagccggctaccttggccgagcggagttttataatgctctaaagttggtaacagtggcacaaagtagacgagagttgactgctgagatagtaaaagctgcaatttatagtcctgcttcagccaatatccctgcacccaaaataaatcttgctgtaacaccttcttcacagcccagaggagttttg

SEQ ID NO: 62431 - DNA, 254 bp, Arabidopsis thaliana landsberg
tattgggaatgaccacactacgctttggacaggcttgattgactaaatacccaacgaatcagaactattccctattacaccacgtaataagatacgcctgatacatcaatatggaatatactttactatgtacagggcatcctaatacaaagacctcgagaactgacactactactgcacataaagacagaaagttcctattaaacctaaactatagacgaatgcactgtcgacagtattctctgccgattatg

SEQ ID NO: 62432 - DNA, 530 bp, Arabidopsis thaliana landsberg
atttttaaacgatactacaaaataaattagcaagatttttcatatatagcatcatggttagccttacattgattttgagcttgctgccagaacagtcatttttcttgcattgtacactctacctcactttctctcttctaaatctttttatttttgctcactttaattgcatcatttaaacgttttttaatcaagcatgtactgattagcaataatcgactaatgtacgtagtgaccgagaataaccgtgaatagtttaaaatattggtacatttccctaatttattacaaaacataaaaaaaatcaagctatccgatttggtgaaaggcacatttcccgagagaaatagaaatgtagaaccaatgcatctctgtcttttatttcctatgttgtggtcgtcaacaaaacacatcaagttttttttttttgggtcgacatcagtaattattaacacatcaagttataaataaaatttattagacagacatgcaatatcattatcacatgtgtgatcacaattatgaataaa

SEQ ID NO: 62433 - DNA, 553 bp, Arabidopsis thaliana landsberg
gacataattgtacaactcacattatacgagttgttaaacattgatgcaattgggaactttttttttgttacaaaatgaagaaactaacatgaatttcttgaaataaattaaatgtatcggattttatacattcaaaatattcaataagtattacaacattatatagattttttttaaaattacagtttttccaaacatcaacaaaaattgacaaaagaaatcaaatctgcattccatatatcttatggtccaataacttctaagacccatcgtctagttggaccgtacttttgtttttacatgaggctcggaggtgatattggttatggttggttccaatcatatggtccatatgatatggacctatgagctaatgactactaatctctgtctaaattattttaagataatatggacgcatatagagaagtttgcttctgcaaaacacacacacaaaatatcaaaggaaaataccaattaactatcttcttagtcagggggaaaataatatatatattcaaaacacgtaaatcgcagtaaagttatttagtgc

SEQ ID NO: 62434 - DNA, 611 bp, Arabidopsis thaliana landsberg
agcctccttcggagagtctactccggccttgactagcaacaaaacttattgcctgactcaatcgatcctaaccttagtcttaccccagaaaaaaaaaaacagtcaatagactcgacgccatctgacacagcccagcgagaaaagaaaagaaagactccaaagctggtagatcgcacgtggctcccctccctcctccatgaccctgaaagggctctcggatggcgcatcccatcgcattttcgttctctagccccagcttttttttttctctctctctcttaggctattttcccccagagcaatctatccccagcgatagtagatatcccaagatagaatttgctaccccggaatcccaaagtccccgcggacggcggggcaataaagaccggacttataatcaacgcctctcccctgttattgcagctcatcctgcttccgagtaaacgccatgggcgtgaagcagcttcaccgtttgttggtgctcgacatttctttataacctcaatttccaaccgtcttatttttttcccccgtcttattctctctctcttctcatatcggcccttgccctctgggtcacttctcatcggccgaagaatacataatac

SEQ ID NO: 62435 - DNA, 1308 bp, Arabidopsis thaliana landsberg
aaaataccattacaaatttcgttctcaatacaattaaatcagtatgaatgtctgaagtatgatctcacactaattttgtagtcaatactattactcttacaactgtacacgttttcacatcgccttaactccaggattctctatcatgatccatcatccatgtctctatcgtttatctgtatccattcgtttagatcacatcatcaattaattcattcaaatagatgtttttttttacttaaaagagtgattatatgcattcaaattgtgaagctctatatattacgctatagcaagaaacgaaacgtactgttttcccctattggtgaccgctctgtttttttctggatcaacgtaatctcttctttctttttatccgttggaacttaattagttaaatatttgatgctgggtcataattcgtccaatctatttcgtcacaacgatgaaaactttacaaatgaaaaaaaaaaaaaaaattaaccaaggtaaaattttgatattcatttcataatccacttttttttttagttaatatcttagaatgaatagtagttttgtaattaattaatcaagaattaaaaaaagttctatcaaaatctaaatatatagtcttttgtttgtaatatgttctgctttttacaaatatggacttttggtatcaatcatattcacttgttcagtattattcgaatttcttgaatcatataaaaacgaattatgtaataaaacgatataacaaatactgtggccggtcctaatgtcaattgtcatataactatatagtatatatatatatatatataaacctttctgcaaatacaatcctatatttaaataccaacatccacaagataagtaaaaacagaaaaaaaatctttaaaaaatgcgttgcctcacaaaaacaagatcgtttcattatgtcatcattttttattccttcttctttttaccgttcttgtcgtcctcctccgacgatcaaagaaccaccgtctctggtcttttctgtggcggacgtagcaaatcctccgcagatccaaactacatcccaacgttcgtcgaagatatgcattcactatctctaaaactaactacacgtcgtttcgcaactgaatcattaaactcctctacatctatctacgctctgatccaatgccacgacgatctctcaccgtccgattgtcagctctgttacgcgattgcacgcacgcgcctccctcgtcgtctcccttcttcctccgcaagaatcttcctcgacggttgtttcctccgttacgaaacttacgagttttggataatcagtcacga

SEQ ID NO: 62436 - DNA, 1729 bp, Arabidopsis thaliana landsberg
tctggacacctaattaactgttatacaatgtcattttttcactctatacattgactaaaaaatggaatattatatataaaaatcatgatatataattaacagataagaatatgaatcattgttccatgtcccaccctctcgtaagaaagtcttaaggtgtaaatccaaaatctttaatatgttttaaacggtgtcagtgacatgattactgtatttgtttggtaaatggtaacaacagtctctatctttatctttaaccaaaaaaagacactagtctttatcctggacgaagcttgtcgttgtatatcttattataaacaagatatcatgttgtaatctacaaaaacttttggagtttgcaaactattagacacattttacattttattaaagagatagtaaatccagcataattgatatgtaacctcaagtagcataacaatgacttagacagtttaatttcatggatattccactttagaccaagtagtttatggatcatcacatctctttttcatgattataattatcctaaaaacgagatgttggaagttaaaaagatatgcctgtgacaggactaaatatgtcatattatgatcattcgtcattcttgtcatatagattcaaataaatattaagctagcctacatttattttaggggtaattactttttcgtgtcaactagttccttttcgtttttaagctacatttacatttcttctttagaaaataacattctcattttgctttaacagaattacccttgaattgatttgtcttcttaaaccttggacgttaaaaaataaaaatgtcgatggatgctgtccacatttgtagagtaataattaacggacattctcagttcgaaaacttttaacaaactttcaacacttttcaaaatttcttgtttattattgtagtatatatttccaataatatcactataaactttagttctttagaaactttttcagtaagtttttagttctttcacacgtttttagaaactttaaactttcataagtttctcatgtaaaacattgcaagtcgttttcatcattcagtgatagttttcaattttttttgtgtgaataaaaaaataaatctaaatcttagatgacaaaatctaaactctagctccaaatgatcatcttatatcttgagaacaaaaaaaatcataaaccctaataccaaaatcttaaatcctatttagcttcttaatttaagcacaagcaaatagtgacgccacaacggtggtggtacgacaaaagttcggctataaagaaaattggatgtggagacataaaatgaagagaggaggaactccctttagggatccaagttatatgtggaaattaaatagatgctcattcattttaatattaatctatttcttgatatatacattcttttttatttgatgatcattatgaaattttgataaattagtctttaatcttaacatatcgtagaataagaacacaaacaaaaaaaagtcatctgtggagctggctaatcagatctgaatttatcataagcctttctctttttaattctaaaatagaacgagttgtatgatatttgtgtggcctatattgtctaacaaattttttaaagtgggaaattatggtcattaacatactaatagatgataataaagtattgcatggatgtacatatgtggctgtgtattgtttgcgccgctggacaagttgcctcgctttgtgt

SEQ ID NO: 62437 - DNA, 1444 bp, Arabidopsis thaliana landsberg
cgtgaatcattggttgacctctccactggactcagctcaatgttccctcctttcttccttgatttgtgacatcaacataagaagaaaaaacaaggaacaccaatggtgaagtcttcctccagaaccatgaaaaacaaaccgacatatcaatcatcaataccttcgctttgcggtaggactattataatccttgtgagtgttgtcccccgttatcctacttgattgtgaaatatcagttttcacatcatcagctggtggaataactgaaacatgtaatcctccatggatctttggtggttcggtttgacgaagtgtctgaacactggatccagatgttttctctacaaacatgatatcataagaaacaatgcacagcttataaattagagaaactatatctattctttgttcacctttactaacagctgtgaagacatcacttcgcttatcctgattgataggaacagcaccagcaagaggctttgggtgatcatgttccccaaagtaaacggtatccatgacttgtccacccgcagaccgttccaactgttttttcgctttgcagttagggtgagtgcacctgtaatagctccttacaaactcatttcctttcacaagtttctgtccatatttccgccagttgtatccgtcttccataaccttctcacgaataaaaggactattcccttccgaaccagactgcaaagataatgcaccgctactttcagaaaccttcggtgctttctcggataccggggaagcaacatctacttccgactgcgaagctaccgtatgtggaacaagtttttcaagctccttacagtcagtagattccaaactttcaacaacggtttcagttctagttacagccactggtatgacctccgctttatcagtagtggcaacaacatcatccactgctttagtctcatttgaatggtctaactccatatcactagccagaacttttcccacctcagccataaatactaacaaactcaagtaaactcaaaaccggagagactcgagcttaaccccaaatatatctaattcccaaagcctgaaggagaaatcaaaacaaacaaaaaccaaatcattacagtgaattcacactaaattccacagaaacaacaattaggaataaaatgttgcagaataaccactaaaagtctccacttttgggaaatttctatatcaattacaatcttagtaaagactcaaaattgattagtcctatgcttcaccaacgatctttagactcaagtactttactttgaaacaaacaaaaccccaaaattaaagcatttgctaaaatcttataaccaaattacataaaaagtcggcaaatttgttccatttactacggagttaagagacgacccagtaacaagattcgcataaagattcaacacttaatactaaattaaaagaatttaatacaact

SEQ ID NO: 62438 - DNA, 571 bp, Arabidopsis thaliana landsberg
acgctcgtcattgaagccatcggaaataattatcgtagggcagtaacatctgaaaatcttattgaggattttgggcaaagctcgcacgaagctattgcgctgatgcagtgcttggcggatgcgttggctcgcagtctcgaagatgcaaataataacaagataaaaatgctgtttgaagagtggaagactctctacggtcaagtcgctgacttgtcagtggagcagcaaaaagcgagcaatactactctgagattcaagtggagtgggacagctgctcaggcaatgtcgggacgcctttttgtaatccatacctacaactcgatagtgataaaactattggcggctgaaattgtttcagcacacaatttatcttcacaagtcagccctgctcagagaattgcgtttctacttgatggtaatcaattgatagaaagcttggattctgatatcgaaagaggacgaatctatactgaggctggtatcaagggttttatcgaggaagcgatatttagatggtatctggatgcaagtaggattgatccggaaaaagattaattgtcaagcgttgaga

SEQ ID NO: 62439 - DNA, 333 bp, Arabidopsis thaliana landsberg
catctacttagattaacagcggagaccaatatgggggaaatcgataccgtgggatcagtaccggggatcaaggtctgccttatattaactttgagtaacctactaactttgcatacaatttcatctgtttctgtttgtaatgatagctagttcactatcaggcacatatatatgggcagatttaggatcctaagtgttatgcgacctaacaagactctagactaactcaataattgcgctacataagcaaaaggccaatttcatatatctggtaagcaatcacatcataacctcattacaacaccaatcattatttgccttgctaagaaatta

SEQ ID NO: 62440 - DNA, 1230 bp, Arabidopsis thaliana landsberg
tatgatcaaataacctatctaaaccaaaccctgtttcttaggaggtggggtttcaggatttgagggtcctctaagtttttcatttgtttaaaatcatatttattcagaaactgccaagagtaggtagttttattggtttcacatggttattaagactaaacaaaactctcatatttcaagggtagatatcattattaaatcaaatcactggtgcttgattaaataatgatgtttttatagtatgcttttgaacgtttgaaaaaatgccatgtcgtgacaagttataaaaagtctttgtagtgggtccgtttggaaattttcaccacatggggatactaactcaattgtttttgagacttttttatacatttccttttgagaatggaagcattttaattgtttagcagtcttgggttagcaaaagtcttgactttagctattaaagactagagggaacacaacgacttttattccttttttatcatttgttttttcttgtagagaaaacacaacactagtctgcataaataacgtgtctagtgataccatttgcttgattctcatttttgatgaatgagacaagaagtagatagatgtactaggtggggttttctttatagtcaaaatctgaacggtctcttaatgatacgcagtgtttaattagttttctattgttgacctcttcttttacctttgtcaatctctttgtagtgtgcaagtttcgatgtcttaccactttgtagtctacagtatataaggtgaaagtatatgtgttaaagttcttactggctggtgtacccctttcttttcagaaatgattacatatgatggcttggaaacttgtattatcaataatcaatcatatgaagaagagagtggaacaagtcgaggagatggatgtcttacagattcgttagatgatgatgcattttcaagctgttcatcaagcaaagatgcctctagctctttttcttcgaaatggttaccgatgaagaatgatgaacacagttgcgatggtttgaacttatctggaaggtctcaacattttgatgctaaggagaagaagaaacaaggctatggcagtagccaacattttgatgctaaggagaaaccagggtatgtgtactgtcatttggatgtggaagctatgaaggagaaattttctaagttattgctcggcgaagatgtcactgggggatgtaagggtgtccaagtagctttggctttgtc

SEQ ID NO: 62441 - DNA, 405 bp, Arabidopsis thaliana landsberg
cgagtgtcgtgtcttgttttgatgtttgtcttagtgttatgtcttgttttatgaagtatcttgtaatgaaactgtaatgtttacaaacatttctcgttatagcaaaatctaagacacatggtagatagctaaaccaccaaacatgttttacaacaaaaagcatacaacaaacattcattggttcaagtcaaagcttgaaaaactggaaacaagggagaaagattattaccaaaaaccggggaggcttaccaaccttggcttggacaattaaaacatggtccccatccagcaagttcttgtgattgtgggtgagtttgggctgcccatgattgtgggtgaagaagtgcttgtgggtgtgaatgtgatccaacacgagctcttgagaagagctttttgtgttttgtg

SEQ ID NO: 62442 - DNA, 427 bp, Arabidopsis thaliana landsberg
attgacattcttttttctttcttaaggtcgttttaaaacaaggccataaatcatgatgattcgtactatttggtgtttggtattggacagattaaaaaaaactagaatcgacatttaataaatgcattcagcgtgatggtttggaaaattagaaagggatttgatgtgaagctcactggttttgacggaaggacctcctcattaaataaaacgaacaagacgtccataattatagggcggtgcgaaatgactcttctttacctgttatccaattcgtattcattcaataactgatttttttttgtttggtaagaaacattcaataaatgtctgaagttatttatggattttgatcattttgagtccgataacgaatactatcatactagatgacgtcaatagaaaaacgaatattgaatacccatat

SEQ ID NO: 62443 - DNA, 554 bp, Arabidopsis thaliana landsberg
  unsure (1)..(554): unsure at all n locations
ccttttttttttaatgatcattattcgacacctttattgtaaatacatagttgaatatcattataataagattaaaccaaatatctcaaatgataaatgataatgaaatatataaaaaagtaaatctataaaacatttagggtaataattttctatatataaaagtggtaacaaaatgtggaacaaaagtcataatgatattaagcccccatcagtcatgaaatctttttaaatttttcgaagtagatgataaaattagctttctgactaattaataagagaatcaatcaatcatcgaaggtttgctatatcaatcaactacaaaattgacatgtttacttacatatacaaataaggattgttttgtaaagccaaaaaaataaatttatgacactaatcaagtttagggtgattaacattgactgactaaagagtttggcacttcgttgaaatttgagagagcaatatctagaagcataactaggaaagaaaagcangaaccaacaaagaaacagtngattgtttggacttctattacaataatactatcactt

SEQ ID NO: 62444 - DNA, 180 bp, Arabidopsis thaliana landsberg
taatatggggaaccaagaatggaaccgggccccacatctgggcttgctggtgcggaatttttgctttttgaaccctgaagacgccgggagccaattggtctagtgcggtcgccaccgcgctggagctggcatacaacatatagagagggcgattacaatccgctggcccgacccatacac

SEQ ID NO: 62445 - DNA, 328 bp, Arabidopsis thaliana landsberg
ttttctctctgaaaaaaaaaaagacaaaagcagaggaaccgaagtttaagctaacaccgagaaaggatccgtctctccgacgacaaatcagaccacctgcgacctagaacgacacaaggagacatagagaaaatgggtttcttctcttttcttggaagagttctcttcgcttctttattcatcctctccgcttggcaaatgtgagtcttttcttctttattccctccatctcttctctcgtttctccggttattggattagggttcgacatcttcttcgatgaacttctatcttgctagatccgatttgattgagaatcttccgctaa

SEQ ID NO: 62446 - DNA, 1414 bp, Arabidopsis thaliana landsberg
ctatcgaatagtgatagactatacgatttgacacagcaaaacatcgccagtcttgtttatatttaaaatgaacttacttatacaactaaatatgacaaaacaaaataagataataaatgggtcagcttatttcatgttatataaaatgatattaggctttgattgcaacaagtttggcatgtaagtattctaaactaacgactttatacatcttagtttgtatcattccataagtaggtttcagttttggcgatcatctaagatataaacggcgtatgatagatataaaaaagccgtaaatacctaacaagagatgaatggtagtgtatagagcaatcatgcatatggagctgtctacacataccaaaatccaaaattaaaaaataaagtagaaccgaaagacatggagaaggaacagtaaactcaatcaatggacaaagaaacaaaaccaaaagaatcaagctataatactataacaattaatattaagtgggtccaattcctgttgagaggaaaattgattaaaccacatatacatgtaaacaatcatatgctcaataatgttcaaagctctaaagccaaaaatcatatcaatattcgtaacttactaaaagaaaaaaacttggtaagatgttatatgactttatattaaaacaaaaacagtattttgtgggaaagataataatgcattcagatgctatagtttgagttaatatggaacagtagagtaaatagatgtaattgttttcaagtatgtgtcaaagggaaggaaaccatggcacgaactacgaagctcaaacactgaaaacttatactctttgcaaccacaaaaggcaaaatgatgaaagaatgagcggtcaagtttgaaggaagaagtaatcagtaatttgttcactggttcctgtgggtggtttgtgtacggggaggttaatggacccaacactcatcactcatcagtaaaccttggaatatgaactagtgttaatagtatataagcttaaggctcattatatccgatcaaaatgttttatttttgagttttagatctaatccccggtttcattttttttttgtttcatatggccatagcaacaaagttaaagtgctaagcataaagtcaatgttgatatccttttattcttgttgtcattttattgataaaccagcaatattgaaatgaaaatgagcacatagctattgtttgtcgacaaaaaccaattgatgtgaaaacagatgtccagttgaagagataaaacatgattggttgaacatagtgaaaattatactcattctactaaaataatgacttcaaatacaaagagaaaatgtgtgtcaaggacttccacaaagttggaatggccctaggagtccattaatcgacaatttgtgttcttggttcttaaaaaaacataga

SEQ ID NO: 62447 - DNA, 1295 bp, Arabidopsis thaliana landsberg
cggaaatgtaacaagtttttctcttaattaaaattcgattattacaagggggtttattccccctttgggacggaaatgcattttttagataacaatggactaaaggctggctctagaggcaatcagttgctccatttccacaaatttttgcaaaattcttctgctccatctacgtctttagcttctcaaagtgaataaattagctctgagctccaagtccaatcgatttccttcttgttatgcctggaaaagacagtttaaacttgataaggtaggttgcattgctaacttgataagcctggccttctgcagcaagtcccaaactcgctgaaccgcggtagcatcagatagttcagcatatgagctattgagaaaaccatagcaatcagatttggaaaacaacggcgtgtactttttaatgtagtaaaccgtatgttattattgggccgacttcatgtgttaaccttattcgggccttggaaaccttgggccaacgtcatgtgttaacctagttcgggccttgagaatcttgatttcaactctattaattgttaaagatagatgttcttgattccaacattatcatggagtttatattgccgaattcatgatgagccttcttttgatttgagtccccccaaactcagataaacgtcagtaacatttgagattccagcatatgagcgagcaattatgtttgcaaaagttcattgttctcgtatatttcttattcatttccattaaaacagctttagttagaatgattttagcgaccatcacatagattctccttcatgtacgtttaagttctttttcgttttatgtatctctatgtacacacgttttatgcatatagatctaaggcaaactataacgagaacatgagtccgaacaaaatgcttcaaatgcttagttttacagaacattcacttatcattactaagctttaggatgaatcaagggcaaatcttgctaagcaaacattcttgctcttcgtctaccaggatcccttgttcttccaatctctttttcatatccggacaagctttccctgcagcgaggtaagtcttcataagaagagtgtaagtttcagaactgaggggactccatttcgtcaaggttttgcagaattcttctgctccatcaacgtctttggcttcctcaaagtgaagaaagaacgaactgatcagctctgagctccaagtccagttcttgtcttgatccaaaaccgccgcttcaaaatgcttcagagccaaatctgcctgatcgttctttaacaggtgcatcatcaaaag

SEQ ID NO: 62448 - DNA, 1054 bp, Arabidopsis thaliana landsberg
aagtattggtgctgggctgcgtgatgttattattcctgaacatagctgggttttgggcgacggaaaatatatcagattttggaaagatagatggttattgaataattccaatatggagtctccaaatggaccgttagctgcgaggatggagatgcaatcagctcgagatttatggagagagtgtaggggctcaaatatgagtaagttgatactttttatttccaaaaatacaagactcaaactgggagctgtggttctagataatgttactggtgcgatatatcttgaggacatagtgcagatgggaactttaatgtgaggtcagcttatgctatgttaacactagatgatacaccgagacagaacttggagcagcttttccgtctagggtggagggttgtaataccagaaagaatacgagtgtttttgtgactggtttgtaatcaggtgataatggtcaatgcagaaaggaagtgaaggcacatttccgacacagatgtatgttccgtctgtaaaggagagttggaaataatcattcatatactacgagattgtcatgccatgacatgtatttggaccagaatagtaccaaggcaaaaacaacatgtgtttttactcaatgggtttatgctaacctagatgaaggagcggttgttgagggcagttccctgactactttctttacaatatcggtttagtggagatggaaatggtggtgtggtaatgtctttgggcagaatggggtgtgccgggatagagtaaagtttgttaaagatacaggtaaagaggtggccttagctaaggtggcaaatatggggaatgaggggatgatcagccgagaggagaggatgattggttggtcggcaccacaagaaggatggattaaggtaaatacaaatggtgcttctagaggaaacttgggcttagcactgcagcgggggtttgcgagatagtgatggagcttggtgtgggggctttgggctgaatataggtaaatgtttggcaccgttagcagagctgtggggtgtgactatgggctgtatttggcatggga

SEQ ID NO: 62449 - DNA, 579 bp, Arabidopsis thaliana landsberg
  unsure (1)..(579): unsure at all n locations
tnnnnnnnnnnnnnnnnnnnnnnnnnnnnnnnnnnnnnnnnnnnnnnnnnnnnnnnccacgcgtccgcatagttggtgtaaccattctgcgtagtgatctattggcaaattttttgacagagggcaattttagagcaagtgttgatttgcagcgcactcatcgtattaaaggaatgattaaaatggtggccacagttggtattcctgagaatacaggtatagcattagcctgtgctatgaatagctcctttagggggcgtgccagttctgatatttacaccatctgctctcaagactgtgaattatggaatcctgcttgcacaaaagcaatgactatgtcatttaatccaaacccgtgttctgatgcatggagtttggaatttctgaagcgtaccggatttcattgagatatcatctgtgtcactggatggactgccactccaatgcaggatgttcaggatacaatagattggtttattacctctaggaatgtgttcccaagacctattgtgttttaaatccacaaaatgcttgtgtgttaaataggtggatggggaaactgactattccccaggcact

SEQ ID NO: 62450 - DNA, 1520 bp, Arabidopsis thaliana landsberg
  unsure (1)..(1520): unsure at all n locations
cataaagaagaaacttttactattatcttaactaacccttttagaaagagggcaaggtttcagtttaagaccccgaagaaagtcatgtagcctaacacgtccactgcaaaatggataaaattcttgaggttgtagggaaacnnnnnnnnnnnnnnnnnnnnnnnnngaaagagatagtaatatcacttttgtggttacttagaggagaaaagtcattacctcgagtccggaatcatggaaacaaatgtatccaaaaatcgcgttgcctctaagctgcttacatggaatagctggaaggaacaaacacagagcaacataatcactagggagacgaaaatagggacattgaatgaacatatataccggacaccatcaaaatagtgaggttcaacatatttatctacagtttcatgaaccctacgaaaccataatgaaagatatggttctcctcaatgtaaacgagaagcaacaaatttttgtggtgtttagatgataaacttaccgactcaactcttgccatttcaaccatgtaatttgaggggttctcctgcaacagaacatttaagatgaaataaatgatcagccagaagaactgattcctgacatggaagttattttcaagcttccatggacaagaatacatgatttgtggctcagtgtaattgtgaagaaactatgagacatagatcagagagaaaatgaaaagatatccaagagagcaaaaccactcatgagctgcacataccagctttaactcagttgctttgttgagtagcatcaagtccgcaaaagaatgggatgtttggacgacattcaaagatgttgcaattgcatgactagtctgtattcataagtacaccatgaggactacttttcaccacaaaataagcaaaaattgtagaaaagtaatctccatatatagttatatccaccaacacacaccttctgtgagagacgcacagcattctgcttttgcttttcactgggatagattacaggaagatattcaacctgtttgatttcgaaaaaaagtttatccaaatgagtgaaagtctaaaaccagacaatcaatcaactaagcttacgcgatatgcacattgcctacctccatgaaattgtgaaactgagtgaacattctaaacatgagcgtcaacaaagagatatttcccctgaacgtgtcaccaaaatcatgaaactgtaaggaggcagtctattttacggagaagtgtaaagtgcggaaaaaacaaactagtctcaccaggattgatcaaaatgtacatggggataccggactactacaggttgaatagggtaaccagggatgaaagcaccgagttggaaggaaataagaactttcccattagtcgtggttccttcggggaataacagcagacgaggaaatctatcgcaggaagcttttctctgtatttacatccctgaaagcacattccgtatcaaatacaaaaaaccatttgaatccttttcaaccaaaaatagttcacaattcatgaaaatggtgt

SEQ ID NO: 62451 - DNA, 597 bp, Arabidopsis thaliana landsberg
gaaagactttttgtatacatgcatcttcagatttcttaaaatgcttagattttaacataaaaggattacaattttcacaacttactttgaattattatttccttatttcttaatattatatatctaaaaatcattaaatagatttttaatatctataacataactagaactttcttattggttttgcacacatgtcatctatgaatatgtaggtgttaacattggaaatacacattttacttttttgtaataaacgttttatatcgctattctctaataaaagtttttataaattatttttttcctttttaccactacaatttggcaaaattttcattatcatcactaatcaaatatgaataaaaccgtgaaggaagcaactccactccaatcattcaacgtagggttagtcatctcaacatatatgactcataatccaacacctaagatttctttgaaatgagaatcgttgcatcttctgaattattctggttatgtgttgcttctacacaagaaatataaacggttaagagactatacgacttctttacatatatctggattacgatcatctctcatggaaaaaaagaaaaattg

SEQ ID NO: 62452 - DNA, 1356 bp, Arabidopsis thaliana landsberg
ttttaaaaaaaaatgcatagtaaaaaaaagtagtgttccgaaaatatatatataggtaacatggagaaacccttaatgggcacgtaaagtagtgccatgaggatataaatttgaattgctaaaaatagtagtgatccagcgccagaaatagtaagagacaaaaaatgttgaaaccaaaagtgtgttaaatgagttgtaacaggacgaagatagcgatgagacagagagcttagagaaagtgagaggacaagaagaagaagataaagaagaggaagacaaggaacaatgtagccctgtctctgtacttgaccctcttgaggaagaggaggaggacgaggaccaccaccaacacgagcctgatcctcccaataacctctcttgcagctttgaaattgtacaacgtgagtatccaatcttccatcacatcaaataatgggccaaagtaattgaatacaaactggtcccggagatcgttttaagggttttaatgttgtatgtgttgactaaacaggggctaaaaggcggttactcaagaagcttcgtagattcgagaagttagcggggctggatcctgtggagctcgaagggaaaatgtcggaagaagaagatgaagaagagcaagagtatgaggagagcgaggaagatgataacataagtatttacgattcagatgaagaatatgaggacgtggatgaagcgatggcacgagagagcagatgcgcggaagatgagaagaggaagaagaatgatgagaggcaaaagaagtggaggatgatgaatgcatggagggtagggttgggagctgaggaagacgtggacgcggtggtgcggaaagatttgagagaggaggccggagaatggacaagacacggtggagaagtggaagaggctgtgtccgatctcgagcactctatcttcttcgtcttgattgatgaattttcccgcgaacttgtctcttcttttctatgaacaaataatgaattttgttaagagacacgagaaaaattagtagatttttagatatcattgacttgataaaccagaataacctttataacgtttaccctgtgttttcttatcacttaaaacgcttctagaaaaagtcacaagtcacaacgataagcgaccattggcttatgccaagctagtactaggaaattttattttgctcaaagccttaaccaactatatatacgcttccttttttccccccaaagctactatacgctttttcttctttcccaaacaactatacgctttaggttatttgatttggtttggtttatctggttgatcattcatactcccaaaacaaattagatcatgcctatacaattttcatgcctaattaaaaac

SEQ ID NO: 62453 - DNA, 381 bp, Arabidopsis thaliana landsberg
cgaccggcgcttagcgaacttagaaggaagaacgttgagactcttagttttgatgatcttaaacgttttgtgaagctggataccagagctagaatcaaggagaaccattctatcaaggccaagaactgaaatgagattcaacaatgacttgttgtatgtgtcccttataattccccttgtttgagcaatcccttcattttccttattatctttgggattatttgatcttaaaagatttttctctaattccatgctcttctcagtaaattggttaaatttgtgtattttatgctattcattggccaaatggtatatcattcagctttccacaacagactgcctaacaccatgtctcagcttggatggtatgtttagtcccca

SEQ ID NO: 62454 - DNA, 562 bp, Arabidopsis thaliana landsberg
ggacccaagcttacattaccatatatggcaaattttaaattatcatttaactcattataaacacaggtctcggcatcccaatgatagcgacttgtgaccctctaagattatggccaatccaattattaataatgttgttttggtgggtccaaagaccgaggacttcaacggaccatgtgtgtaaaaacagtttagtcatgaaaagagatgtctagtggtatagtttcgtcggaaaaaggtttattgcacactgaaatttttcatcgtactgtacttttcatataactaacaaagtcacagtggatattacagcctgaaaaactaaaatattcaaataacatgcatgaacttcactaaaaagggctaaatcaaagctaatattgacggaaatagtcaacgacggtttattgagctgactctactgagaacgtggcaatgacgtggtatcacacgtcgtattggtcacaaagaaaatattatataaagtataatctttgagatgaactttagatttatatcctgtggtacgaataacaactctattttatattaaaactatttt

SEQ ID NO: 62455 - DNA, 360 bp, Arabidopsis thaliana landsberg
aagttgaatcggccacttcctaaccggggtttatattcaggaaaaaccgaaggccacaccctgtatttcactaggagtgacacaagatgcccagaagatatcatactcgcaaagcttacacgtatactaactcccatcaatgcggaaaaaatacccgtttattactgggcacaccgtgagcattggactaggtatatagaactctcgggatatagcgaaactccaggttgattgaaccatacttatgcggttggaagcagagcttgacgtctggacatacgatctaccggtttcttgttttctgaacactgattacttaattatcccatggagagttactaatatgagactaactgagga

SEQ ID NO: 62456 - DNA, 310 bp, Arabidopsis thaliana landsberg
cgtttgggcataaatgcactcttgctacccataagcaaggcgccggcttatccttccctgaccaagatcgctctcacatcaacatactgagtaatggggaaactgaaacgcttatgttattgaaaggcaagaattacccacaaccaaaaggagaggctacatacagtgtgtccccccttcttcccgacatgctatgattccccgacatggttaggcacggaatccgatcttataacctaatagcaacatcaaggtccttgtgagcactagcccctagtacattcatgcggtgacttaacatatatcactt

SEQ ID NO: 62457 - DNA, 492 bp, Arabidopsis thaliana landsberg
  unsure (1)..(492): unsure at all n locations
nnnnnnnnnnnnnnnnnnnnnnnnnnnnnnnnnnnnnnnnnnnnnnnnnnnnnnnnnnnnnnnnnnnnnnnnnnnnnnnnnnnnnnnnnnnnnnnnnnnnnnnnnnnnnnnnnnnnnnnnnnnnnnnnnnnnnnnnnnnnnnnnnnnnnnnnnnnnnnnnnnnnnnnnttaattatacctttttcatatttttcttacaaataaaattttacagccgtgatatatattaccaacacgtccaccttaaataatatatatatatatataaagctttctctacctatttgtatgctttggaaaaaaacaacctatgtgtattttgtaacatatattttagttaacataagtaaattacatgacaattcttcagcttaacaaataaaaaaatattaccaacacgtgcacctcaaataaataatattaaaagaaaaacctcttaattcatgcanaacagtctatatagttcttcaagattcccttgattcactcact

SEQ ID NO: 62458 - DNA, 1096 bp, Arabidopsis thaliana landsberg
cgactcagcaaagacaagaaagcagcctagtcctcggatacctatcctttgttaactcagtcacagaattaaaatacttcccagactcaagtccaacaaaatcagaaacagcttcaggattattcttcaaaaccgtagctaaagattcaagacaagcttctctttggcttaaagaaccatcaagaaggataacaagcttctccaagacaccagcttcacagagaacccgttgctctacacttgttccacaagcatgagcgataatactcgcaccaagcccactaacgttctcattctcactattcaacaacgagaaaagaaactccatgtttttctcttgaagaaaatcatactttggagcttgattagattgaaatatcattctaagcgaacgagcccccgcatctactacctgaagaagaatcataaatacgaaacagaagcaataaggaagccataagaaagcaagacaagagaggatccacaaaattctaaaggccaatgctttaattcctcagatgcagacaattcaaaaaggtgaaaactttaaccacaagtcccaaactaataagattcagacaagagtaattctaaatcgttcaagctttcttttcaaagacccacaagtaattctaatgtcatttcgaatctagacacaaatttgggggaaaaggattagactttaacaaaaaaaaaagtcaatagatttattcaaaatcaaaccttttcgtcagtattagtgagaagacgaagaagatgagggaaaacgccggcgtcaagaacagcttgaacaccggcttcaaacccacaagcgaaactgccaagagccgccgcagattgcacgaggatgttattacattcatcagaatcgtcagcatcagcgagaacagaagctatggcgggaatagctccgagtttgagaaaagagagcttttttgtacgatttccgataatctggtttttgacctcgcgaagggccttaagcttgacttcagggtcagaagaagcgagacgagagaatacatcggattgacgattggtacggaggcagaggaggaagaagaagcggggatgtggtggtggtatgcatggcgga

SEQ ID NO: 62459 - DNA, 437 bp, Arabidopsis thaliana landsberg
cattctggtatttatcacgcacattctagagggtgaggatcggtcataaacccagatgaagagcatcttgaccaccttagaaccctttgattcatgtgcccgaagagacaaaccctctttctattttcgttaattcgtaaatacactctcatctcctatatatgaagaggatcacacgctgtgcatatcatgcatcccctactgatttttcttctctgcaactacaatggcgcggaatatcaactgtagtggtctgtacttcctctgatctaaaccggtagctaacaactcaggtggtgcctcaagctgtaccgtactgttataatctatatccctgataccacctttgtatacaatcctgctgggatcaaaatcatcagctttatggaacactcgccgctatcaatgctacggacctcataggattgagctcagac

SEQ ID NO: 62460 - DNA, 585 bp, Arabidopsis thaliana landsberg
atcacgcttgttccattttatataaaaacacaaaaaggtccaaaatattttctggcacattttggtaactctatggttttgaaagttgtaagctattccatatttgtgcgcaagcctttggatttttgtgatctaagcatatacgattttcattgagcaatcatgattaattgcctatactaatctcttagttggctattacgctaaactacccaaaatgcctcctcttccctttttttttacattttccatctagtcaaagacttatcaacataattataattaggaaaaaatctcaaataaaatatccattttaaaacattttcccaactaaaactttcaatatttttcgttccatataaaaccttggaattgaaaacaattcctaataaaaacctccaactttttttgttctaaaataaaaccaccaactaattaattttctttaaataaattttaaagtcgttaaatttgagctcggttaaaggttaactaatagtaaacgtcctttaacgatttaattacgaaccttagaatacatttttttccttagggtttatatatgttttagaaactaaaaaacga

SEQ ID NO: 62461 - DNA, 419 bp, Arabidopsis thaliana landsberg
gaaaactataggcaaagttcctaatttgcaaaaaaacaaagacaataccaataatctatatatgcaaacgaaacgaatatgatgatgaatacgtatcatttatgctatgtagtattgttcttgataattacgaatggtttaacaatataattatgtagataacgtttaatggacaattgtatatatgtcgagtacttttctcaacctagctatacgccttcaattgagacgtcttatttgtcttcattacaacaaaacaacaaaagacatgcgtgcttacgttacggtcactcaaaattttatacattttttgttaattgtatttaatcttattaattattatcgttaccattactctgttcactttgcactacttgtttagcatattttgtaataactaaatttattttactttcatt

SEQ ID NO: 62462 - DNA, 579 bp, Arabidopsis thaliana landsberg
  unsure (1)..(579): unsure at all n locations
ctataacgtcagcatgatcatcgcgggcgtgatacccccgaggaacgccgcggacaccgcccacgcgtaggcctgcgcttgagttccgtattggctttgcagtacactatagagaggcagcaggatgataatggcatagatactggcgaaggcgcttacattgaagatctgattgtaaagagtgaaaaacagtcaacaaaacgaacaattctggttaaacccggtactcaccttgaggtaaaagtaaaacaactccttgcaatcatgcaacaggtccttgttcgggtcaaatacggccgccgcgcgacctgaagtcaaggtgacctgtgatatccacttnnnnnnnnnnnnnnnnnnnnnnnnnnnnnnnnnnnnnnnnnnnnnnnnnnnnnnnnaacacaaaatccctccaatcaccattacgatcagggagacgcccaatacaatcatggagttgttgaagacgttcgactcgcactgaaaggtactgagagacgagttcttctcaggcagattagtgcggactaatttgcagttgaataaggacctctccatgacagagacattgtgatgacgctc

SEQ ID NO: 62463 - DNA, 1449 bp, Arabidopsis thaliana landsberg
aaaacttaagggttttgtgttgcaacttgttttatagccaaaaccagaactactctcacttcactgtttcagaacacttttctttgttgttttctaccaaaattatgagttttctttgtttgcctctcaagtcttcccatgcttcactttcttactctactctcttacttaccaaacacagcttttattgtgtggaggagaaagacggatctgtgtctcacttacagtgacataggcaacaaaccaagcacaagtttcatcgacccctcttgtcttcaaactgattatagaagatcccataactaatgtatcatcaatagggtttcttctttttcttccatgtgattacagattgttactgtgttttgacaactcgacgcaacaaggacataacctctgtttatgactttcttgtgactattcttcctcggccaaaaaccatgtgttagttattttgtatggagacgtcgctctgttttagaaatcaaatatgttgctctgttttagatacgaatcaggaaacgctttagaggtttctttagacgagttcaagtctccaacaaaaagaaaatcgatgtcaagttcattagctaagcttaaatcttacatactcttcacttagctaaagaagatttctgttccatggccatttttattcttatttccaagctgtggaacaaagacttcttcaccagacagtagctgaagaccaccggaccagaatccctatcacgctatgagagacgataatttaaggtgcaaagtcagctacgtttggccccatgcccctgttaagaaggcaaacataactaaattagaagaatacaatgtataaaacattgctgctattattgtcactagtccataattcacaaccaagtatttcagcattacagaaaacagtgacttggataagaaaatattcacttctataaatgttcaatccactgtatattttgcatttgcttgtggcaatgtgaaccattagtacaccagaagtaggtgaacttatcaactattagaagtcctaaatgaccattttcttccatctcatcaaggtttagtggaggcatacactgccataaacgtgattacgttgaaacacacaaatatcactctgatgcataggctaaggctgaggactaaattaagataagcaaaggactggacatgagtaatctatcaactaaaatcagaagatcaaataggtctatccagccattgaaatcaacctcaaaccaattccctacatagatgctatcctggaacatcctaagctccacaaaactaccctatcttctcaggtgacttgagtattttcttacgaactaaaaccaatttacacagatcttaattataagaacatataccacatgcatagcaagtgaaagtaaaatgagttgaagcactgagattgactttaggagacgagaaaaaacacgtgcgtac

SEQ ID NO: 62464 - DNA, 1194 bp, Arabidopsis thaliana landsberg
gactctaccagttatttccctctgtttcttcattccacgttgacattattcagttgtttgaatgaactacatttaaatactcatatgccccttgtcccaggtttcagatgattctcttgatagttccactaaactacgccaaccaacattgctgttgcttgcatctcttctttcgcatgtgactgattccctcgagagagcagcagagaagaagtccttacttcttcataaggtatattattctaattcctaccatttacatgtttcaaactcttttttttttttttttacattcgaagttgcatgtatgattggcagattagagacataaacgagctctcaagacaagatgtagatgcgatcatcaagatctgtgattcccaagaatatgtcacaccgtccgacaacatacataaaaggttagtgaatttctttcttctgctcgctcatgcgtgcatatgccaaagcagaaatgggtattaacatagaatttttccagattttttctatcagtgattagtaagacgtttgaccactgtttttatttgttcgtggctctgttgttacttacctcaggagatacatagctatggttgaaatgtgccaaatcgtgggtaacagggaccagttaatcaccttgttactgcaacttgccgagcatgtactaaatattatcctgatccatctccaagataggtatgccactttatcttcaacaattgatatcttaaaagtttggaaatctacgggtttgctctaagatactatgctaaacacttcacatatgcagatccgttagttcaaatgaaaggggatcatatggttcaaaatcccatatacaacaggaagttacagatctctgtggcaaattgtcacctaccatagataggcttgcattactgaatgaggtaagcctaatcgattttcgagagttttcgattatttatgtgctgaaagtgaaaggtggtggtgacccgatttgtctatcccagggaaaagtaggacataacctgaaggtgttccagagactggcaacgactgtaaaagaaatggccatccaaaagtgtgtatgaaataagcttctcaagaaatgtatttttgtgtgtcaaatgtccaaatctcaatttccagtatgagtctgtataacaaaataaaaaataaacatgaattcaaatgatactttctctgagactc

SEQ ID NO: 62465 - DNA, 1277 bp, Arabidopsis thaliana landsberg
gactttcagttcgttttactatctgctctttagcttattcccttattacatcgtgtttgtagtggctttaaggatctatttgattggcaacacttcattgaggagttgaaggatgatattcacatagttgagatgctgccatcagaattagccggaatcgagcctttcgttaagacacccatttcgtggtctaaggtcaagattgctttcttgatatagggttaatatagccatattggggcccttggttcactagtatttgcatacagttgttttcaagaagaccctcagtcagtaatttttttctttattacaggttggttactacaagaaagaggtccttccgttgttgaaacagcatatcgtaatgtacttaactcacactgattctcggcttgctaacaacgacctgcctgattctgtacaaaagcttcgttgccgagtaaattatagggcgctgaaatattcagctccaatagaggaactgggaaacgttctagtttctagaatgaggcaggacagaggtccataccttgctcttcatttaaggcaagtagctttgtctatttttcacatcatatttatttgaccttgggccttatgcaagtttatttagataaatctagatgcaagaccagtttgaattagtttggtgttatcatgcaaatactgaaatatctcccatctaaagtttggtccatgacaagtatatcatcttccacaggtatgagaaggatatgctggctttcacaggctgcagtcatagtttgacagctgaagaagacgaagaattacgacagatgcggtatgaggttagtcactggaaggaaaaagaaataaatggaacagagagaagattgcaaggtggttgtccgttgactccaagggaaacctcgcttttactgagggctttggaattcccatccagctcccggatatacctcgtagctggtgaagcatatggaaatggaagcatggatcctctcaacacagacttccccaacattttctcacattcaattcttgccaccaaagaagagctgagtccttttaacaaccaccagaatatgttggctggtttagattatatcgttgcacttcagagtgaggtatttctctacacatatgatgggaacatggcaaaagcagttcaaggtcacaggcgattcgaagacttcaagaaaacaataaatccagacacgtaaatgctcctcccgcctacccaactcaaaaagtttgtagtaaatagtaaacattttggtcacatcttctttttc

SEQ ID NO: 62466 - DNA, 1772 bp, Arabidopsis thaliana landsberg
acaccctgatgattgagccacgtgccagttaaatttttagtattatatatttccgatcaaaggaacgcgggttaggagccctgctttataagtgatataccaaaaacatccaacagaaacctcccagagaaaatacaacatatatatatatatattacatgacagccatacgcactatctaagtcagaatctgagaaacaaaaaggaaatgaaacaaagaggcgttgttacacattctaagagataactcacccatatttttctaacacctctgaggatccgtgctgtatgctgtaaaacgaaagatatgcgcctgtaacactttttaagaaagcgaagaatagctgctctgacattctcttttgcagacactgagaaactactgcggggctcttctttatcaattttcacaaatgtatcatcggtattttcttcactggtagagctttctgcatgattgcaaaagaggcagtgtcagtacctgcaaacgtcaaagatattgagctcctacaaacagtctatccaaaccaataaaaaaacaccttgatcagtctttgacacttctaaactatcagttgcagcaacaactcgaggaacatctgcagcagtactttcatcattacgtgaccacaaccctgcacttgttatctatatcacagaaaatcagttggttagagaactaaggatgaatagaaattttatttgtggctaactgatttcaagaaagagttttccaaagtacgagtgaggaaccagttcaaagcctagaaaatctaaaatttttcactaattatgcatgctagcatcagaagcgataatagctacataccttgatttgcataagctctgcttcagctaactcaactccagtcagctcacttgaacaaccaggctttaataataatcaaaaaaattaacgaaattagttagagagaaacaataatggtcagataagagaagcttaggagagtctagcaaagataaatcttaggaaggcatgcacactacacgaaactcttaaagtagaagagagctaagccaacagatatttgatttttgaagtttgcaatcttagaagtattcaaatgcatttgcataggccgtaattcctattggaaagtgtactaatgttaacataaacataaacacaaagaaatcagaaaagtatcttccgtcggatttatataattatgaccagtgcaaccttagtaaagatacaaacagtagtctcctaaccacgctcatgcgaacatgttctacagaattagcttaagctccacaattcatatcagattactcctaacacagaaaaatgctacatcatccttttcaaattgtagtatctcagacttaaaatttcaacaatgaagtcattaacaaaggcaatttgcactaaaaacgacctataaattaaaggattcaatacgagagtcaaaaattacctgctgaacataattggcgtgcataacaacgaggatacagaacaaagtgatggcaacgaagaggtaagtatactctaagaaacctctaatccttggcgttaagatctgcgaaaacctctcctgaaccctaataaacgtctgctccggatccatatttcggatctccgatgcacttcttcgtcttcttcgttaacactacgtagtcatcgaatttgaattgctccgttgcgaggatcgtagatttcttctcgttctgggagagtgtcgaatccacagaaattgaagagtgaagatgattgaaaagaaaagcaccgcgaagcaaattttaca

SEQ ID NO: 62467 - DNA, 1750 bp, Arabidopsis thaliana landsberg
ctagacaacttatgaaactatagttggattgcgcatttctcgctaatcaagtcttttatgttgaataaacaagtttaccgattgttatcttatcaaattgatgcagtgttagttcatcaggaactctaagagatggtccgttaactaaaagcactttggagaaattgaagaaaatgtttcgtacaaatgtcccaaagtcttatgtcgaaaatgttgggtatagagctgtacacaaaatgggattttgtgttgaagaaaccaaagagttgtatcacgtgaaggtggttttgttatttcttatgttagagattcatgattgtgtctgtaatttcattttaattcttttgtggttttggtttctgattttctaggtctcagacaacactcgtcctgatgtaaccatttcatgtaaatgtatggtggaccaacaaaataaacgactcaatttctataagataagtccttttcatctcccctacttaccacattttaagtgaatcatattgaagcttttgtttggtttttattcaggctgagcttaatgctttgaggcacttaaatcttgacgtctcatgccttgatcaagatcttgacatgaggttgatggttgactcaaaaaggacattaaccaatctctctgtgagttgactttgtctaatccatatttagtatccaagagaatgagttgaagaatattagcaagtggtgtagattaaaatgtgaaacatggttcttcgattgtatccaggagaatgagattacgaatcttaaagaattgactgattcagcggtggtagatccaactgtgaaaggtgggttaaagtggccacttgggaaatcttcttgtgcggatcgatacattgtttgtggtgtttggcatactgtaactactacgtacataaaccagactatgaggcttcaaatccgagaggctgatcgatatgatttcagaactggagttggaggaacctcaagtgaagtgaatttcaaactaaaagcattaagtactatactactaaaggtattttttgtttagacatggtcttttaattgtagtgatagtcaacaagtgacaatagttatgtttacaatttcaggaggaagatgtggagaggaaatgtgtttcagacatgctgaaagattgtctgaaagcggtttgggaatactttttgaaagaagtttagtgttagtcactttgtttctggtgtgtttcccgtttgtgtcacttactccaaactttgctgcttttttcatattttggctcatctaattttgttgcaatattcacattatcttttatcttttggattggaaaaagtatttgattatcgtttagataatcaactttgtttgcgtgtacgttttcatcagttttcaggtgtgatctgtaaatttaacaaattcagaatttatgactgatgattaatttacccatcacaaaggaaccataccgaacacagttacggtcatttcaattgtaacccgaaaaaataataaagaaccggtaatatccaaatcaaagtatcaaaccaaggcgaaatagaatgggtttccgatttcaatagctaactttcataaaccgagaaccgaaaccggaaacaatcaaaccaaaccatttggtgattaaagaattaatcagcattaagttatgtcatatcatctcctgctaaaagcctaaaaagctaaaactaagtcgtgactcgtccgtcgtctgatattaccagattcctgagaatttgagcctaatcct

SEQ ID NO: 62468 - DNA, 636 bp, Arabidopsis thaliana landsberg
taggaaaattggaacacttgttaacaggtaaccacgtctttcttcatttggtttattcgaaaactgatatttttattatggcaaattcattaaaaattggtcggctccacgagttataaattctaaaattttctaaattaaggctttgtcgatcgatataaacataccagctgcgggtccagatttggagtgtcatggtaccggatttggaagctaaataaactggaaattttgattgataagtagatggtgaagtatcagtttaacttacattttgaatatttagatttgttttggaaaattaaatgtattcgttattttttcttttttttttttcttttttttcttcttctttttttagcttaaaacttattcattgtttttcctcattgttattcattgattaacgactctgaaaattgaaatgtatagttgaagatattttgttctaaaaaaaaaaaaaaaagtctagttattaactaaactcattttaaaagatagaaagtttttttactcgatattgatagatttaaccacttagacaatcctcatcggtaagatctacaaaaatggtctaagatgaataaaatgtattgtttttgttacaattttattattcaaataaaatttgaaata

SEQ ID NO: 62469 - DNA, 408 bp, Arabidopsis thaliana landsberg
cgaaatccggtgggtaatcctaacggagaaacaaacaatcggtgattacaaaatcgtaccattgttctggaaccgtgaaacgaacgaactagctgattcgtaagcgtcggagataagaagctggagcgagaatgagtagctgaacaacaagatacaaataacggcttggctcttcttaggaagagtagtgacatagacaaaaaacctgctagggctaattgaaatgctccttttttttaacactatacaaaaaacatttttaattttaaaaattagaaattaaaccggaaaaaattagagatttgggttacaagttgggtatttcgttttaagcccagtgggcttggaattacgacggtcaatactcaatatatatttcaagctgttctcgaatcaacgagtgtgtga

SEQ ID NO: 62470 - DNA, 913 bp, Arabidopsis thaliana landsberg
aacaagttagaacacaacaggctttaaaacggaactcaatacagtccaaacacgacattctcaaactataaaacaaaacagttcccaggtggttttgtctttgtacacaattctaacattgccaacgagaaacaaagaaagctaactgatggagtagaattaaaggcaaacactgcgtgagaacaagaatcagaagaagaaataaggaaacttacttggacccatcaaaatcaccagattaagaggtttgtagtgtgaagagagctgaaaatgaaaattaggtttttttttgtcaatctttgccgtcagtgggatagcaatgtggcgggatgggtgaattccaatgctggatccaataaacgacgtcgtattggttgtgagtgaattgtttaccaaaaattactccttaatttgcttctttaagtaaattatgtaaggtcaatcctgaaatttacactcctaattttatgctattatcataaatcttttgttttgttatttacttatttttatctccaattcttttttgttttgtttacactcgctaagcacaactcaagagttgcgtggagccgtggaagaactttaacactgaagcaaaaaaatgtgtaaacaatgtgaacacaaaaggcagaatgcatattgagaagctgacacagcataaaactagaggtcttagaacaacaaaaacaaaagaagcttgcttagagttttagcaaactttacaaaaacattcttctaggcaagacaaatcccatggtttactcataacatcaccaacacgaataaccagaaaataaacatggagaagctcaaaaagcagagacaagactgaaactaacaaccaattctttgataatgatcttcaaaccgggaatgtgtctttgaagaagttgagcccttttgtcgatcg

SEQ ID NO: 62471 - DNA, 255 bp, Arabidopsis thaliana landsberg
gcaaagaaggcgcaaaaccgacattccatcgactgcaacaacctcaaggaacaaggctgcaaacggaactctgagactcgccaagaaaacaaaccgaaatttgagcactgccagaggaccccaagaggagatcaccgaaaaccggggaccggggcctaacgctagccagaaagagatgcaggaaacacgccatggaaacaataagaagggagacgcaaaagacacttgcgacacaaaaaggggccacgacggtca

SEQ ID NO: 62472 - DNA, 468 bp, Arabidopsis thaliana landsberg
cggattcatcagatagtgagttttacttttcattttttcctctttgaagaatcttttaaaaagtctcgatcttttcaggtgtttaatccatcattttgtgtagtcttattgatgattctgggtttatgttttcatctacaacttttgatttcttcataatcatcccaagctaaaataataaccctttctgtcataatgttcttttcttcaaaacaggttttgtttcgaccaaatgagttttctttttaaccccaaatctcaaacctttctcctttttcacacactttatgttttctttttctttttgttcctttcttctgtgtttgttctcttttctggtttttttctttgttgttgttaattctcaagcatttcattaacacctagttcgtaaaacccaaatgatctcaaatcttggatctgcttcatgtaaccgacaaaaaataaagaagattatgatggtttgga

SEQ ID NO: 62473 - DNA, 1050 bp, Arabidopsis thaliana landsberg
tacaggtgatttaaaaggatttaattccttttaaaactcttgatctgaacccgaaaacgatccaaatgcccaggccaacacatgactatatagtgtcccaaagtcattgtgcttttatatcttaaaaaaacagtactactattaattgataatacatacataatcaaaatgctcattggcgataagcatgatagtgcatagatagatcggtctataaattatacacattactaacgataattgtatgtatattggagagtgagaagagccaaataaaacattttttcccaaaagttgtgcaggaatcaaaagagtcagagcgacgacatactgacaaacatatttgattgctttctactaaaaaacaacttcccaagtaaagagaatgatcaacacaaacactaggcttctctctactctctcttcacatttagtctccttcttctctcgctttccattacctcaggcacggatcatctgtcgaatcacattttcaacaaaagcattttgagattttcaaagttctctcatagatataatgtcttgtgatataaaagaatatgggtgtttttttcttttttttaccattttgcagatgtttcttcctttcaatgtctttgaagcttcctcagcgaaagcttgagctacttctgcttcggcttctgctgcctccgcttcctttgcagcttcctcagcctctgccatggcagcttctgcctctgctactgcctgtgctgcaactgctgccgcctcatgtacgttcatactcttcattctggctatctctgtatcaatctgtgaccttgtctgaaaattcacttcatctatgtctgttttaggtgaaggcaaagaagaagtcctctgttttcctccaaacacccccagaccttttctcctgtgggaagacaaggaggtggagtttggaattctgtacttacgtttaacctgtaaaagagaaagcccagatcaataaacctcgcaagttgcagtgcataatggatatgtctctgttctactgacatccatgaactaaattgctttgacaaaaag

SEQ ID NO: 62474 - DNA, 1561 bp, Arabidopsis thaliana landsberg
tgcacatctattacacttcccattcggagtagctctactctttaacttcttcccatattttatagtctcgttatttcccctttacctctttgattttctcttctatttttttcttctatgatcaggttattttgttgtcaagtgtggattggatttattttcttaatttggtaatattttatttttcttatgttctagtatttctttatgatgtaccgacagaaaaacaaaaataaactatcattcgatatgggttgagttattatggtttgattgatttaaatatattagaatatatacatatctgtgtatacatttatctctctttgtatgtactaatatttgtaaatgtttatcaaaaaaattaccactaatttggagattatatataaaaaataaagactgctcttctttaatttcgtttcctctcccacatacacgatcgacacctccttacataggatatgttagtcgaattcactaccaaacgcaccgcagcctgtaacatctaatgtgaactagagaaaaaaaagtaacacccataagctattgatacccttttgaaattataaattaaagattcctcaaaccaaacctttaagctcaaaaatgttagttagatgatgactatttaataaatttgtaattttggatctaaagcattgaatatagtctacaaacgacaaagccaatccattgacaaaagaaagaatcttagtgtaaacgacaaattaatgaattatggagaaatcagaagatgttgataaatcaccaaacatatttaagattttttttgtcagaattaaagaccacaaaactatatgagagcgatcctttgttacacaaatgcaatatattttccaaacacggaacataattgcccaaataattagacaatattcacacaaataaattaaaagaaagacactttccccgagtaattgccaagacaatttcattacaagacaaacgagagtcgttgtcacgcacgcatcaatgagccaaaagtttggtcataaatactttgacaaaattttaaaaaattaaagtactacaaaattttgcaagatgttaggactagaaaagtcaaatgttaatcggggaaaaaaataatattcaaagtaagaagttacctgtatataaaatgttatttgtatcttctatcattattttaaagaagagcaccaactaaacaaaagagagaaaagaaaaaaaaaacgcttttcctttttttctccaaaccttaatgtccctaccacttggcatcacaagaataagtatataataaaaaaaattactatttataaagaaatgtagaaaatatatagaaacaaacatatgtagacaaaagagattgttttctctaagagggggtccatgttgatcctcccaaagttcataaccactacaaggaaactccaaaaatactaaataaaatacatgcacataaagaggcaataaggcaaaagatgccaaggaaaaacaaaaactattaataatggaatataaagaaaaaatgatagatgattttgacatttttgtcccatcattatttaatata

SEQ ID NO: 62475 - DNA, 613 bp, Arabidopsis thaliana landsberg
tttttggatacatagcaatttgttatttgttacatttttctgttcccacatggaagtacagatcagataggttctttgcttcttttgattttgacttgttcttactatgaggtatgacattttgatgagtttttacgtaggcgtctgaaaatgccctgttgagccttaagaaggatagtcttattgaaccaaaatcagaagataattctgacattttggatgctgctgagaaagtaaggagactaagggattcagctgcctcgttaacatcttcacattcaggtattttcatttatatcgtgtcttctttaaagtttgctgtttgtaacagacttctgactacattttgattgctttcttcgtctctatctaaagtattggtcttaaattactcgttttattcccaccgttcaatgccttcaatgtagtgtgactgttatgtatgggagaatccattgagtttgatagaatcttggaaatctactggttggaaagattgatgatttataaacttactctaccaactattgtttggatccatcataaaggatattaaactgactcgaccaattttaacagaatgtctgttagaaagtatctgattggtctgagt

SEQ ID NO: 62476 - DNA, 323 bp, Arabidopsis thaliana landsberg
ctctgacaattcaacaacatacgtacatatacactttgaagtcaatgttcaacaatttgtgtatatcaagacctcgttcacatattgttttccttctggtcattaaatgccgatatggttttaaatagtgaaaaataaaacatatataggtggggaatgattatcttcattcgatcttagggggtttatattcaaagttggatttgggtaaactaataaaaaaaaattgctattttaaaagtttactttcggtttccctattttgttgtatttttctaaaaagctgatacgatattggaaaaaataattctgttatgcgttgt

SEQ ID NO: 62477 - DNA, 1819 bp, Arabidopsis thaliana landsberg
tgaactggtgaaaagcacccggtctttggttctctccctcgtatgtaattaccgtggactgggaatcgcccacgaagatttaattcaggttcatctctctccttagaatcgtattaagagtcttgcaaaaattctatgttttagattaggattacagaaagaacagataggaaacgtctggcttggtttcatgattctgcttggtacacaaatgatgaaactttgcaagtggaaagaattaaaattgtcattgtagttccttttgtcctaatgttgtggctttttcaggcagggtatgtgggggtgttacaaggagcagagaggtttgatcacacaaggggttacaagttttcaacatatgtgcagtattggataagaaaatcaatgtctacgatggtgtcacggcatgcaagaggcgtccatattcctgtttgtgcattttgatttttggccctttttgtctcattttcaacaaagctagaacctcacttgttttcctttattgtttctgtttttttggcagtcatcaataatccgaactatcaatcatatacaaaaggctcgtaagaccctgaaaacgagccatggtataaaatatgcggctgatgaggagattgcaaaactaacaggccactcggtgaagaagattcgagcagctaaccaatgcctaaaagtggtcggttcaattgacaagaaagttggggattgctttactacaaaattcctggtatgtctgtttagtttggttcaatctttggttttgagaaatgtctatcgaacaaggaccaagatttgattagtttaagtttaaatttggttttttggatatgaaaatactgttaccatcaggtttatcataaagattggttcagtttagatttaagctattctttttgttcagtttggttcagttttgagactcaacgtttgttttccgagtatgcaggaatttacaccagacacaacgatggagagtcctgaggaggccgtgatgaggcagagcgcgaggagagacatacatgatcttctagaagggttagagccaagagagaagcaagtgatggtcctacgttatggtcttcaagactacaggcccaagtccctggaagagattgggaagcttcttaaagttagcaaagaatggattcggaagatcgaacggagagcaatggctaaactcagagaccaacccaacgccgaagacctcagatattatttgaatcagtaaaaaatagagatttttggctccaatgactcttatgtcttctgtcacagtgtgattgtgtaatcttgtgtgtttataatagtaacattggagatcctcgagtgtaaaatgtcttgtacggggttgtaaacttatatagttatattacagtgaaaatagatattgtacaagttataaaatcctaaccacttggataatctacacatccttcgattacttttacaatatagctgtatcaattatcttgcatttgtgcaattattatattgaatttcaattgaaccaattataaaatttattatataatttagtattatatattttatcaattataaacaattcatactttttgctattatatatataaaaaaattttaatttttaattttactaattgaaaaagattatatctaaccacctaacgacaactcctttctcgaatcaagttttttcttggttcttcttttctcggggtacttcctctcggattctctatgtctcttaactcggtctaacccgctaaagcttagctcacatgcgggtcataaaatccgattaccttttgcgaagtatgaccgagagttgaaagaaatt

SEQ ID NO: 62478 - DNA, 533 bp, Arabidopsis thaliana landsberg
  unsure (1)..(533): unsure at all n locations
tnnnnnnnnnnnnnnnnnnnnnnnnnnnnnnnnnnnnnnnnnnnnnnnnnnnnnnnnnnnnnnnnnnnnnnnnnnnnnnnnnnnnnnnnnnnnnnnnnnnnnnnnnnnnnnnnnnnnnnnnnnnnnnnnnnnnnnnnnnnnnnnnnnnnnnnnnnnnnnnnnnnnnnnnnnnnnnnnnnnnnnnnnnnnnnnnnnnnnnnnnnnnnnnnnnnnnnnnnnnnnnnnnnnnnnnnnnnnnnnnnnnnnnnnnnnnnnnnnnnnnnnnnnnnnnnnnnnnnnnnnnnnnnnnnnnnnnnnnnnnnnnnnnnnnnnnnnnnnnnnnnnnnnnnnnnnnnnnnnnnnnnnnnnnnnnnnnnnnnnnnnnnnnnnnnnaaaagcttgcgggggggtctcttttattgggggggattttaaaaaaccacccttttattttttcgccccccccacagatggggggggggaaaaaaaaaaaaatttttttttttagtgggggggggtgtttctaaccccccccccccccccccctttttttt

SEQ ID NO: 62479 - DNA, 1686 bp, Arabidopsis thaliana landsberg
tatcatctagctagtgattgcatagaagctcccttctctatggctggctatgcacatacagatatgatatatgatgaatgatgtggctttttttcacgacatgggaaaaaatattcctgtgatctttagttaatatttataggtttttcagaatggagccataacaaagagaataaagcatttggtaactctccaagacaatatagtggacgtcaatataaaaagatagccataaagtgcactgatgaatatcaaatattttctaacatgatggtagatcagtataggtgacaaaagaaaagaggatagtagcttagtagtcatgattttgttattaaacctataaatcaattatcagtggatatctttaagtgttagtactgttaaagatattacataacgactatagacagtaaaacgaaacgactacacactgtaaaaaggtattttaaaactggcatttgataatcctttaaaatccttctatttatatagcctttcaaagaaacaaacatgtgactttaaattctctgaactggagttatactgaataactgaacattatcactttatcagctaccaaacaatatcgaaattcgtcaaaaatcaatacactgccaatttttattataaacaaaattttctatcatatttgttaaacatttaagtaatttaatgaatgttattgttttttttctctaaagtatctacatggccatatgggtggaaaaccagacaacgattggctacttaccgaactgtaccattaataaagccatcaattttaggggttttcatgagatatataactagaggttcatcgtggtacagttaattgtagactacttttgctgacaaataaaaactttagtctatggtttccagtaagaagctagctatctctaataataataactcgaaaaagaaaaaaaacattctacaaacatagatattcaatcgtcgaataattctgatctcggaaccaaacctgaatttttttaattatatcaagcggtggcccaatttggttaaagaaggacgaaattatacagccaagtatcataatttacaagacaaccaagtgtatcgtagccacaagacacgttcaatctcaatgcccttgttagtcgtcattattcaatatattcatcactagtcgtttgtcttaactcacatgaaacaacttattttaaaagccactcacttactgatttccactcagactcaagaagaaagaaagtctcgaaaatcttctctctttctcttacacaaacatatattttcttgtttaccattaaacaaaatctttcataaaaaattggccatgaataaacgttacggtcacctcataagtctattgttcgtgttttctcttgttatgttccccttcataacaatatcacagacgccatgtccgtacccttgtaacccgttgccaatagccggtactggctccactcaaccggccggttattatcctcaaccgaccggttactatcctcctccatcgtcgagtaatgtaccgaattacccttctccaccttattacggaggtaatcccagcgggggatataacggtcctccaccgccggaccctatcttgccttatttcccgttctactacagaaaacctcctcatcagacggatcagtcatcatcttccatgaaatcaactgtcaagatcgt

SEQ ID NO: 62480 - DNA, 570 bp, Arabidopsis thaliana landsberg
  unsure (1)..(570): unsure at all n locations
cgttaattacactaaaagaattgtactgcaccttctcagatttcttttttattttaccctcttcatgaagatagttcaacaatgtgtcatcaaatgcatttttcgtcatcacatatatatatcggaccctaaccatataacaaagtcattggtttgattattacttgtttatatggtcattcttcttagtttctctgaaaaaatttaaggtgttataaagagaagctttataaagtaatatgctctttgtcattataaaaaaaaaattcaatcaaaccaaaatgggaaataaaatttactaccaatttcaaaagtacttggatttttagaagtggatctcttttcgtcttacatttgcaagaaaataaaatgtgttgtcaaatccttaaccactattttttttggttcaaaaatttgagagaatatgcttgtcatttcgacaacaaacatatatgagatcacattcgatttcaagagtaacaaattaaagtacgtgaactggtattgatttagtggtttaactttagtnaaatagatatactaaaagganatatatatatatatatatat

SEQ ID NO: 62481 - DNA, 610 bp, Arabidopsis thaliana landsberg
  unsure (1)..(610): unsure at all n locations
cgatacacgtgatcatcacgtgactgtttcccgcatcgccggaacttatatccagacttggtatctttgggcctactatgaatttgacaacttggactaatctttccccatacatataacttagctgcatatacacgtaactgtaagttgtatatattttgagtaatttcaagtacaacgattttttttatataaaataattcacattcaattttatttatgtaacaaaagggtataaaaatggcccatgtcatcaataatcaagtaacttcgtttattgttcatatgttttacgtcaattctttttgactgggctatcattgtagcccaatgctctatgggcccataaaggattttaatcattgtatgctatgttcaatgtgttttttgagcccgttaatatttctgtcaagcccaacagccaatacccaatagtggtagtagaaaaatacagtaatacacgatcgagcgaaataataatttttgtattaacaatttcagtgtctttctttattgatctacaaagtgctcaccaacaatattagcattttaaaactattggaaaattaatctttcaaaaaataaaanttgttgttggaactcactttaa

SEQ ID NO: 62482 - DNA, 519 bp, Arabidopsis thaliana landsberg
gtgcgagcaggtcatacgcggcgcctttggttgccacgatgccctgccagaaggtgccgctttgctcccaatattgtccttgctgttcggggaattgcccgttatactgccagggcagatcgttgagcgccgctttggtttcttgtgtgataaaggcaagcaccgtgctccggttttctttttttaccggtttaaagccgttttcgctgatgcccgttaccaggggcacatcgccccagatgcgtaccaggtaaaaataggccagcgctctcagaaaacggacattggccatgtccagggtcatttcatcggtagtatagcgaaaatcattctggtgtaccagggataaattggccaggcaaatattcgcctgtgcgatcaccgcataaaatcttttccagttcttccattcgtccatggcggcggaggtagcattcaggttattggttgaaaccgccctgaggtcaggatccgaggtgcttacaaagtcccctccccgcaattcgccgtatacaaaat

SEQ ID NO: 62483 - DNA, 1391 bp, Arabidopsis thaliana landsberg
ttagttttagtgttcagagaaatgatgccattgattactcgacttacattggcctaagtacatgtggttatgttgtctatgattttgaccttgggattgtaacctgctacaggaggggaaccggttgcttgcgtcggctagtgatgatgggatggtcaagatttggcagcttgcaactaaaccgtgactgctgttggtttggataggttctgaaactcctgtgttgttttactttttctgaggtctatctgtaaacaacataacattttaggtagaagagaactctatactattttgtcatacaagattagctccatgatgtttcatacgatttctgttttacttttactacgatcacttaagttttaacactgttggtacaactttgtggaatttaataaacaactttttgacgaaacaaaaaatacatagctgatatcgtacaactttggagaaacttcttttttccatataaatagcaaatttagatgcaactcataaggttgctgcttgtgcttgtaagatcttacaatattttttctttttgttaatacctaacaatacatttatttggatattgtatgtttttttcttaagggcctccgaatatgtatatttttttcctttactatgacacatcacctctaaataatctacggattaggaaaaagagaacaattttttaagattaacataattttggagttgaaagctagatggtgccgaaaggaaaagagaacaattcttaagattaacataattttggtgatacatcatatttatatttctctcatactgcttcaagtaattatgttcttaaaacagtaagtagcaattatgaaccaggcaaagagtagtagcgagaacgaagagagaccgatgaggaatggccagccgacaagcaccacccccaaagacgtgaccacagcacatggcagaaacgagcggactactgatgaaccattgatccatttccctttgatcataagtaaaatagcaacattcaccatattccactccattgagccaccatagcaaagacggttcaaacagtttgcaacaaacgaatggcagttacaagtgaagatgttgtaggttttatgctcaaagctacgtgtgctcgagctcagtgcattatcccatgtacgcgctgttccaaagtcggtgtgtttgaatccatacttgcaagtatgtccacccatatttggtggtaagcaacactgccacaaacacacacatttgataaagattaaaaagttcttataatttgatacaaaactaacaaagtccatgcataaccagattctacttaataaaccagcacctactaataccttggttctatcgaaaaggagaaagcgagcaggaggaccaaatgcaaaatcatcaac

SEQ ID NO: 62484 - DNA, 644 bp, Arabidopsis thaliana landsberg
gctgcaaaatcatggtcttagctaatttatgatttatgaaatttatgccaaaattgatgatgctgatattcatgatgactttagcttatgaaaatgaactatgtaatttattcacaaaaatagacataagcataatttggtatatttaatgattttacatatgtattaagtttgaaattatgaaattggccgtaatttaaagagagtatcaagaaaaaaacgagcactttaaccaaaaagaaaatacaacgagagcatctataatatttcgaatggaactattcttttagttttgtcgacagctttttacgtctatcatataattttcaatcaagaaagtggcatgttctttcatactactttaatataaactttgtttctgtttttattttttttctcaaagactagagaaagtcattttcatcttaaaggtacttgcaaactattggttgctctaaatcacctaacgtatcataaataatcaaggggaaattaagttaaagaaaggagacttgaaattagataaatatgaagtcacaaacgagtttgccttcttattattggcaaagatcagacgaaaatatgttatttatttatttaacatattatttgttcatattatgccatttttcttggggggaaaa

SEQ ID NO: 62485 - DNA, 491 bp, Arabidopsis thaliana landsberg
  unsure (1)..(491): unsure at all n locations
aagcgcccgcagcgcttgattttttcgcctcaaatcctgatatggcggacgaccccgcgatcacgccattcattcaagccgagtagcgcaaagacatgtccgattttgatgcccgcaagcccgaatccgatgccgcgccagaaatcgcgccggagaccgctcccggcgataccgcgcccgaaaatgcgctggaaggccagttcgaggccaaggagcgcgaggccgcggaactgaaggacaagcttttgnnnnnnnnnnnnnnnnnnnagaatctgcgccgccgcaccgcgcgcgaagtcgccgatgcgcgagtctatgggatttccggttttgcgcgcgacatcctcaacgtcgccgacaatatgcgccgcgcgctcgatgcggtgccggccgaattgcgcgcaagcggggaagccgacgtgctgctcgaaagcgtctaactgaccgagcgcgaatagctcaaggcgctggagaagaacggcgtcaagcgc

SEQ ID NO: 62486 - DNA, 1217 bp, Arabidopsis thaliana landsberg
aattgtggtccctgtggacaatgatactaaattactttatagcaagataataattatatcattatacagtactaattatccattaattagtaccaattggaaaaaagattcaagttgatcaatttatagtctaggaaattaagtcatcacttgattaatcatatggttacactgaactaattttgttgagattttcattatgtaccggaatataacaagcggccagagaaacataccggatatcggaccgaatatcgatatgctagctactcaaaccggttttgagccggttagactctttcgttggtgtgtctcggaggagctctctgaacttaaacgacgcgtttctagtttccggtaagcagacgacggtgttggtcatggagataggagagatagagatagcgaaacagagatgcgaatcggttataagaacaatcgagaatcttcctttatcaactgcaatcactgcttcgtgccgtcgcacactccttaagctcgcttcctccgagctctcctttctctcgtctctctcttctgatccttctccgaaacctctcaggttctctatttttaatcatctctttcttctctccctctcattagctctgattctgactttgattttttttccgcaatcagtgtcaacattggccacattgaatcagtggtacggattttacagcttccgtctatcaccggcgtttcgcgcgtttgcaaaccgattcctcttccgattggtggcgttcatgttgatctcgtttgtactctcggaaaagttcctgtatggatcatcgtctctgatagaaaccctaggtacatctcctggaacggtgatcgccatggaagcaaaggtttaagatctagaatcgaacagattctcgccgctgctaattccacaaccacgcttaaaccttcttcggtgtttctgttcttcgcaaatggtctcccttcttcagtttacgagaaactgaaagatgaatttggagctgtgtatttcgattttggctttgattctgattcggattcggatatttcaatgctcgatgattttgattgcgaatgggttaacgttgttcgaaccagatcatataaagaagcagtttctgtttagatcaagctgatagatcaatgtgattcacttgcttctcctaaaacaaggttttagttcaagcagaggtcacagagttaagtcaaaaagatgctttttttactgt

SEQ ID NO: 62487 - DNA, 475 bp, Arabidopsis thaliana landsberg
cctccacgcgaatgtctctattacagagactacaccgttgcggagtctgcgcaagtacccgctctgatcggaccaccggacaggcgcatcaggactcgatgacgcccaggttgatcgggtcgtcacgataggttccgatgccgtcccagcgcaccgcgacgagaccctcgcggtcgatctcaccgtcgacgacggtgccggtcgcagggtcaccgttgggcaccggccgcggacccgtccactggacccgcgtcccggtggggaacttgccctgccacggactttgcccgctcatgcgtacgctgccgggataggatggccggtgtgatcgtcgacgaggtcggcgtcctcgtagttgacctggtatccgacgatgtgccactgccggtccgaagagtcggtgaagtcgacgtttccgatttcggcgatcacggtgtcgatcgccagcacgcccgccgtggcggtgatgaagtag

SEQ ID NO: 62488 - DNA, 443 bp, Arabidopsis thaliana landsberg
aaccacatgcacttgcaatgtgggagagtagcatcgtgagtggtagtaataaaaaaattgtaacttaaagaaaaaggtttgggaagaaatattgaaaattgattaaaataacaatatatgttagttgtcaaaagaaaagacaaataaacgaaggttagttgtaaaaaggaagaacatgtaaccaaaaaattagctgaaagcctaaaaataaatataataatcgactttggattaaaacccctgtgctttaaggctcgaccagtataagccatttgcctttaagaataaaagaaatgaatttcatgagcatactacactaaaatcctttttcttcttaattttcagtattggcttgacaattttctacacttcatcattagtaaacaaatgcaaataaaacagtggaagaaattcaagattcccttcaacttaccactaattta

SEQ ID NO: 62489 - DNA, 683 bp, Arabidopsis thaliana landsberg
tcactagagttggtgggttgggtcatatataggagggaaaacggaagtaaaaattgtgtaatcgatcgacattacttattggtttgcatacttgtagacttaaaatctggcatgggcgtcatggcaacgcaaatttggaaaacttttcggattatatatgtccgactgcggatcaatatcttatttaactatatatatgtgttaggaatatgaaacaaaagttttaaaatctgaatgaataaagaaaaaattctcaagaaaagaagctgaaaacaaagaagagagaaaaatcgagacaaatttcactacaaacaaaataaattctttattaaaaaagatgagaattacaagacaatgattaaagacatctcgagtttatgatactatatatagtttgtgattgatttggaagatacaaacaacattatcatgaagaaatctctagtttatgatacttttaatttaatttaaccaagtgatagtggtctaatagttttcacttgaagacgaatcatcgtttttgtctaggtcatacattgatctctctcaaatgcaagattatttaatcattcttattatactatccctaaaacaatcttactataaatgaatctttaaaatatatatatatatatatatatatactctatatattgcagtttcaaatccaaacatataataag

SEQ ID NO: 62490 - DNA, 1531 bp, Arabidopsis thaliana landsberg
caaccggctgctccgattgagaccaagaaacaagccgtcaagaagaaacgaagcaaataaggaaactggagagagcaaatctctgtggacaatattttgtttgtttctgtctccaagggaatgaattgtttgaatctgtttctagtctcagagaaaacgttttttagttgctggtgtagaaattcttgagaaagtcaggaggacttaccttgatctatgaaactcctttcccttcaataaaagaggatcagttacctctgcacaagtaaccaccaatattactttactaacactcacgacgagtttttttggaagttgcatattttcaatttgatctcattgagtcatttctataagaaacaaccttcgtttgtgttgtgaagggataactaattaacagagcatcttccaaccactagtagatataatcagtaaatgatcctacattgaaatttttgtaatttttaaaatattcaactgcgaatcaatgatgggccttaacggtaagcccaatatcacattgtccaaattgtaccaaaaatttgtgaaaaagtaccttttattttatttattcaattaagaaaaacaacagctaacaatgctccatgaatcatttcggagttagccttccgtttttgcgattccttcgaatcaaaatgcaaaattcaccaacgaaaaacccaaactttgagttctaattcatcacgtgtaacgtgtaagacatcttcttctcctcttacaaaccctaatttctctcacgccttcagaaccagccctgttcttattgtattcaatgtggtgattcgattcaaggcattggagctgctaaaatggctgctgttgatttgatctaacgtcttgagcttacaaattttctttctttgggattcaatttcaggctgcgaaagtgtttcatgaagctaacccaccaaatctgagcttagtataagctaaagattcaaactttgatgaagcttttcaattggggaagtataagggacgatgaggtttgatggataggagagtttcttggttacatttgaaatgagtcggtctccatcgttttctgtgaagcctgagctaagtataaagcctgatcctgagtcattgaaacgatggattcatgcattttgcattatgaggtttgatcttgagcaagggcagctcttagaagagtgttatcccccagattgtctctcacaagaagaggaaattgaggtttcttttaactctttcccggattctgtctcacagcatcataatcgttcaagcatacatgactgcattttctttttccggtttcgtagaccaaagaagaacactgatgagagagatggtagtgagaggtacttgtatggttatgtatttaataggcagaggcatgatgaaagattgaaaaggggaggtgaacagaagtctgtggtgatattatcgcatacgccttactcgagtgtgtttaggcctttgttgcaaatcattggtcctttgtttttgatgttggaaataaggctaatgaacatattgctggtat

SEQ ID NO: 62491 - DNA, 768 bp, Arabidopsis thaliana landsberg
attcatgacagttatgggcgcgagccgcggcgggttgcggcctgtgagatggcggatggctctaccggctgagattggttggggcccccaagcgcgattggaggtgcatggaccggctcgcgtcccagcaatgttgtcaagcagcaaggatgccggtagtagaatcaataccttccaatcacatgaatcttggtgcagcggcgaaatggcggaggccgcagcaccgtttgagactgccggccgcgctattatcatgtcatcttgaatcaaagacatttacgaccgctcgacgacgatggcggcgtctcataacgagcagcaatggttaggcgaagaagttctgtcgggtcggccctttctgtcgcgatgcgaagttttgggctcgagtcggacaccgttttgaaaatcggattcctggcgcccttgacggggccgctgaaggcgtgggccgtgccgggactcaatggaagcaagatttgggtcgagcgcgtgaacgcggccggcgggctgagagttggcggtcgccgatacatgctcgaactcgtgccctacgatacgatgtaccggccggagctggcgctcaagggagccaaggagctcatcctttcggccggcgtcaaactcatccttatgattggcggtgacgatctctcggacggtgtccgcagcatcatcaatcaacaccgcatgctggtcgcgacgttgctccccagcgacctttctccggatacgccgacgctggtagcttcgagcgaagtgcatccgatc

SEQ ID NO: 62492 - DNA, 1799 bp, Arabidopsis thaliana landsberg
  unsure (1)..(1799): unsure at all n locations
tttccttactaatttccaacacacgtcatcctcattagaaatttcttacatgcatataaacgataaaacaccatctacaactaaactttaattagtttccgaagaagtctcaatctttattggtgttacgtggtctgttgtgtaactcatgtttaacatatcaatgaaatccattgatgaaaacaaaaacaatgaaatgatgaaaacaaaaacagcatatagtttacaatatatcggaattaaagatgtttttttttgtcaaaaaagaagaagaaaaaagagcatgtaattttctagatattgtttttgtttcacataaatgtcgttttggattattcatgtaatattttaaactaaagtacaatttttgactactttagtttactagttaagcttttatttttttgactaaccattgaatgatgaagagatcaacgcatcatatttacaacttacatagtcttttggaagtgtaaattgctaatactacctaaaatatatctataattaactaatattttttcgtcaattataatagatcaattaaaaggctatcaaaaggaaaaaaatgaaatccacatcctgccatcataacctcatgctggaaaaagaaatgaaaatatataaaaaatttcttttgtttattaaatttacaactttaatactagtttcttttctattttttaaaagcttttgtcacttacttaaaaaaaaaaaactttttgaaatattcctacttccaatgtctgattagtgcttctggatttcctttttggatcatgtgaatcctaaatcagaaaaattcatataatacccaattcagtatattttcatacttcaatttacaagagttctctatgtatttagcttctttcttttaagccaaatgttttaagcatcttttatacattaaaataatttagtgctgagttgagattttttttttttttttttttggatttacatgttcaaaatctgaaaaaaaaatgtttacaaaaggttaaaatgaaccaaaaggcatatcaagctagattttgaattaccctatttcatcgtatacacaaaactgataatgtggacacagttgattttacttctcgatgacatcgtagttttatttaatttttggaaaccacggtccatatgagcacatttcaattaaaaaccaatggtaagagcatttttcatgcaagattctagagatattatacccagtgactgttaaaacagcttagaaccctaataacgaatttcaattactcaatttaccattcgcatttcgcaataaccaaactgagccagtcacaaggagtaaaccgaaccggattatttatttataaaatgaaagaaaggaaaccaaacaacaacagcagtagtagtctgaggtaaaccaaaaagcaggcagatcaacaactaaaagaaactcaaattaccaaaacaaacaggaaattgcaaactaagtttttttaccatatgcatacaaagaccataaaaggttctgataatcaccggtttcatctctcagtatttaatccggccatctccttccgttatgacatcgttgaaagtgccaccactcgggatcatcggcaacacatgttcttggtgcggacaaatcacatccaacaggtaaggtcctggtgtatccnnnnnnnnnnnnnnnnnttctcggagatctgctttctttgtcaccctcgccgctggaatcccgcaagctgctgcaaacagcaacatgttcgggaatatctcgtcctcctgagccggatccccgagaaatgtgtgagctcggttagccttgt

SEQ ID NO: 62493 - DNA, 437 bp, Arabidopsis thaliana landsberg
cctttctcgtgtttcagttccatttcggagttttcagattgaaagctgtgttcgtcaggataaatctaagttacaacaacactcgtctcacttaccaactaggtttttcgttaatccggtatcaagggctagtaggaatcaagctcaagaagctctttttgattacttgcattatactagaagctttacttttactgatgcagagcatataagtaagaattctccttgttttatgtcgactttgttgtctaagattgatgataatcagaaagatgtatccaagggattaactaagttccttaggtacaatccgataaacgagtttgaaccgtttttcgagagtttgggtttgtgtccttatgagtttgaaaacgttcttccacggaagctaatgtttttgagtgatgatggtatcatgtttgagaactttcatgctc

SEQ ID NO: 62494 - DNA, 2251 bp, Arabidopsis thaliana landsberg
aagttatacagtagtgagattgaaatcatattcaccagtttatgaactcttctctgatttctggataataacatcgcaacctaacaacaaagagaaacaggtgagagtcacaatcaaatagagagctatgaagaattctcaatgcttactctttcaagtaagaaatttacctgaaattagggcttattaagcgtttgaatcaaccattttcccaagattcttagggttcatagccaaatctcagttactttgcttaaaccttgttctggcttcaaattaaggtggaaatttcagagaagcccctaaacgtttataatatatccgaaacgaccataatcttatttttctatacttcaatatgtgcctaagagtttccgaaatatcataaaggtaccaattagtgcatcatcaacacttggccttaaaagacttgacgtgatatattattattcctcttttgataccgaattaatagacttgtcaagtttagacgtgtcaaaagtgataaacatatcacacgaaatcgtgttattatcacgagcgttacaaattcttcaagtatatcactataaaacgacttcaaaacccaaccaagtggtgatttctttgagctgactatatgtatgcaagataaaggcagcaagaaacggtgagttttcttcacgatcataaatggtttgttcgtctttctgatttttgattttatagatatgtaactttttttattaggtcaatttcaagtggtccatggtagattcaattcatgttaggtcatcatcttcaagctaaaacgcctaccaaacatataataacaagtattcttttaatcactagttttagtttcaaaatatttctgactatcttaagtgcatttagattttagttcaacatgatggaaaaagataacttgactcttgtttaacttgcatatgttttgtttgactatttgttatgtttgagaggaatgatttttctttgtaaaacagctttatataaaacttgtggcttactcggatgaattttatatttgttttgattatttttcaaatgttgtttttttcaaaaccttttgacagtaaattacaatataaattattttcaaagatcttaatatgtcttatttaagtgaatttttaattataattataagtaaattattaaatatagattataacaatgaagttaaatcttattcactatatctttaaatatttttttctcttatttttttaatattttattcactatttgtaacaaattataaaagccaaaattaccaaatttctgcaagaaaaaacaaaaaacaaatccttggctcctcctaaaatccacctaccttacccttttatatataagatacaaccaaaaacaagatgatttggtgctttcaatattaaagatataatatttcataattaacatattctcccttaggttttcctgcacactcgatttaaatcgtctaacaaggtcagaatccataatttatacaaccattttctgctttatttgtttcctccctaattacatgttattaactattaagcatatccttaatacaaaacccaaactgaattatctttgtcaatagttgtcttctctctcgattattcttaagataactactttggtagttttgtttttttaattactactgcaccctcttgcgcttcaagttacttggtaaaaaactctcttaactttggataatttctcgaagtctctgaagaaagaaccctttttttcttctctcataatcgtctctgtaacgtccttctccttcttcatcttctttgcgtttcttctgcagccttttgcggttcacgtgttgattgcttctgtctctactttttgtccgttttaaagtttaaacttattgttacaaaattggattttctctgatcaaacgataaaaacagagtcttttagtatcttcttcttgggtataacgaagatttttgtggtttcttctgatgtaattcacaaaaccatttgtataatccttgaaaagactttttgttcagaaatgaagtttcttactttgctctttcttttctatatttcagtaatgatgatgataaagcttgagagaagtgattagtctgtagaagaagaagagttaaaaccattcaccaaagaagaaattgagaactagagacagtcatggagatcaaatcttaccaaaatcaagcagagtattttggtggacactatttattagcagatccatttcttccatatacttctggtc

SEQ ID NO: 62495 - DNA, 476 bp, Arabidopsis thaliana landsberg
aattgtgaagaatctacggatctgtgaggattgtcattctgctttcaagtatatttctattgtgtccaatagacagatcactgtgagggataagcttcggtttcaccattttcaaaatggttcttgttcatgtctggactattggtaaggacaagatacaaacacaagtgttttattacaaaagatggtacatcgttcttgcacaagtaacaaccctgtgataatatacaagataagcctattttacagcggttttattctcacgcattgaattacaaaacatattctacatggggaggagattaccgacctcgcaaaccgatattatacagcagttattggatgttagggagatgttttgacatcagaacattaccgatctttatggttctggtccaatcccttggacgcaatcaactccaatctctgagaatgcttcaagaagttttgggtatagtttggagagcatgatcttg

SEQ ID NO: 62496 - DNA, 180 bp, Arabidopsis thaliana landsberg
ggatccaccgggctgcagggggggggaaagccacgttgtgtgttaaaatctccgaggactcatttcacaccataaacaatatcatcatgaacagtaaaactgtctgatcacatccacagacttacacagagtgcctcaagccatattaaactagaaatacctactgaaaatactcactta

SEQ ID NO: 62497 - DNA, 399 bp, Arabidopsis thaliana landsberg
tgaaatgcagctcaagggaagaagaagaattatgtgacatttggtctttcgttatactagcagatggatgaaaacaacgcggccaagttaaccggtatcaggcagattgtgaggcttaaggagattttgcagaaatggcaaaccgtcaccataggtcccaagtcagaagttcctccattggcagctggaaagcaagcagtggcgatgatttcgcccgcgataaacaagaggctattagatgtcaagaacggtgactcggatgaggaaacctgtcaaagtcctgagccgcctcatgatgttcctaaagggtatcttgcggtttatgttggatcggagctaacgaggtttataatacacacattctttccttatccactttttgtcaaggtttttgctcaa

SEQ ID NO: 62498 - DNA, 510 bp, Arabidopsis thaliana landsberg
ggcagtgatcggttctcatgtccggaaaggaatctagtcatggcatcagcgccactgacatctcagcagcggtaggccatcctcaacggggccagcatcttcgaagaaggcgtcaacgcgatgaagtcggtgtacagcgaggtgttcgcctcgagtacccagctgaaggggcaggccatggtctccacggccggcagccagttctccaacgccatcaccgagtggaccgaggacttcaacaacatcacctctttgctgcaggcgatgcacgatcagctgatcgacaccacgaacacgaccacgtccaccaaccagggcaacaccgagatcgccacggcgctctcctacaccccgccgaacttcagctaagaccgagcgtcagcagctaagggagatatccgcgatgagcatgaacgatggcgacatctacgtcaactacagcggtgtcaacgacgtcgaggacgcgctgaacgacgccacccaggcggtcggcaagatcctcggtgagat

SEQ ID NO: 62499 - DNA, 411 bp, Arabidopsis thaliana landsberg
  unsure (1)..(411): unsure at all n locations
cgagaaagaccgtgaaagattctcaggctgatcgcggtcgtgccatcctggaccttgatcaaaatgcatttattaatcacaaggctcataagccacgaccttagaggaagaagcacgagaaggcatgagcttaagcttgatcaacagaaccttccatatgggcaagagcctttctctggggtggtgttgcttctgcactctgcaactcttgctatatctaacaagggcaattgtctctctgggagatgaagctgatgataacacgttaacgttgcannnnnnnnnnnnnnnnnnnnnnnnnnnnnnnnnnnnnnnnnnnnnnnnnnnnnnnnnnnnnnnnnnnnnnnnnnnnnnnnnnnnnnnnnnnnnnnnnnnnnnnnnnnngggaagaagaccatgtagtagatggat

SEQ ID NO: 62500 - DNA, 519 bp, Arabidopsis thaliana landsberg
  unsure (1)..(519): unsure at all n locations
ctaacgttttttttgacccgaagcttcctcgttgtttcctcaaagctgcgctcctttgccctataaatacaattgctacgagacccgaagaaaaaaaaccaccaacaatatagccatgtcttcctccggtagtccggtacacagtaccctaatttctaactccggcgatgaaaacactgatcattcctccgcggtacacaagcttatcgctgttatcaatggcggagccatcggtttgctgcagatcacagagaattcctcagcttcaatcaatactgcagatcgtcaagccactatcctctctttctgtgtctttattctgatctacgtcgtcctccgagtcactgaaataaagctcaatagtaaccaagctccgatccaccacttcgttggacacatcagccatctctttggggctcttgcagctctcatgctcatctccattggttctcccatcttcactctcatcgttgcccctctatggcttggttggttctttgctgntatgtatgtcttttt

SEQ ID NO: 62501 - DNA, 878 bp, Arabidopsis thaliana landsberg
caactcccatgcctttccgttggtcaacaaccaacggtcgattaactttttccttcattttgagaacaagtctctcttggggggagcagagcatgcaaaatcgagcaatagatggatcttagaagaattccactttgaacggcacgactctttcgatttttgcgctggcatttgagttgtctcccctcctctttcaatcgacacactcgacgcagatagctccggtggccccggcttctgcctctatcaggcttaggctgcccccacccccacagagccacagcatggagtagctgctcccgcgctacaaccaatcaaaattttatacggatcgatatatgatgatgctaaaccgagatagagaaagagggcgaagaaactcattaattcatcgatgagggttgccgcgcctccctttgttggctcttcgagacaaaaacactcataggaatggtgctaattcccatgttccttctagtctcgtttggtttcgaaagcctccccctccctgtctcttactctttgaaagctgtcatcctggatttatttttgaatggtttctttgttctcttatttggattgaaagaaagacaaaacttcattttcttcgacgaatttcggctatgaccaatgcaccaatagctgaataggcgtaacaaagctacctgaaaaggcaaggtgcaccttgggattgaaatcgacgaattgcgttttgcccgagagatttatttagaaagattatccatcggataaagaatgcaaaaatagaaagaatataaataaaggcgtatacacgggaagggggcaccactacttccagggggagactagcctcatcacttcttcatgggccagaggtgcgcctaacccacctaccc

SEQ ID NO: 62502 - DNA, 220 bp, Arabidopsis thaliana landsberg
ttatacactccaaacgctaaccatccttcacttgagctcctaaaagcttacaacttttttttaaagcacgtatgtgtgaaagacatacactgttgaaacatggaatctatcattaagcccataagatcgggacgcggcttaaattattatactcgactatacccatcataggcatgattaaacaatttattcttgaagactatgccagaatgccatgcat

SEQ ID NO: 62503 - DNA, 189 bp, Arabidopsis thaliana landsberg
aaaaaaataaaataaaaaaaatagaaaattaaatgaaaaaaaagaaagataaataataaaaaagaataaaaaaaaataagaaaaaaaagaaaataaaaaaagaaaaaaaagaaaaaaaaaaaagaaaaaaaaaaaaaaataaaaaaataaaaaaaggtaaaaaaaaaagataaaaagaaaaagaaaaaa

SEQ ID NO: 62504 - DNA, 1025 bp, Arabidopsis thaliana landsberg
cttcttccttttaactttttattcttgtacttaaatcttttgtatttgtaaatatgaatggcacactttttgtgtgttgcagtaattacaaaaacattgttgcttattgcttaacgtgtgaaaaggggaaaagaaaaaaagaaacttgaacttgtaacatacaatcgagacaattttgttattaaggtatatctaatgcgtgtgtgccctacatagacgactcttcttcaagtcaaactttgtggttcccacacgtatcctcacaggctcacacgttttaacctttaattttcgtattttcttgactatatatattatcattttttgttgacaaaataaattgtattatcatattttaaaattttgatagcagtatcatatgtaactctaacattctatgtttagagatgaatttatctatatatatctacttggataaaccaatttgcaccatactatttgcagcatatgagactaactaactcttgatacactgaaatgatggtagacaattcagtctatatatgcgagttaactcctaataccgtgaaatcataataggcaaattcagtccacaaattttttacgtaggattttgatattttccactctttatatatacagtctataatcttcaaacctatcacctataaataatctacaatctaccatttagtcaacaatggtgaaatttctaaaccctcgtgaaagtctacctatctcccaaagtttctaattctatctacttcacatttttctccacccaccaactaaagtataagccttggaaaaacaatcaaaataagaaattctataagtcctttattccttatataataaatcataagttagtaaactcttttgttcacttttcttttgcatccaccgaagaaaaaccagcttcacaatgagctccaacgacagagatcatcgcaggttcaactctgaccaccactcattctggcctaatccgtctacttacgatcttaacagcaagatcatgcttcccgcagtggcttctttat

SEQ ID NO: 62505 - DNA, 583 bp, Arabidopsis thaliana landsberg
gtgacacattctgacactagaaacgctgacatagctgttgactgaccggagcttttgcacggaatctgtttcgtgttctaaatggcgaaatgctaaacgctgtcgtttccagaatatcggatcgattggggtcaaattctgagagacacttgaccgaccggtattgaattgattaaccggttcgatttttttttctttctttccaaaactacataaataagagagagataattaaaaaaacaaaaaaaaaaacagaatcctattaatgtaataataactttaaatgtagtaagaaaaaaatgaagaactgtgctgacacaaagaaaatttaaataattataatttattgtatttgcttattttcttgactaatgtcaaaaaaaatgaaataaaaatcttgactagaaaatctaattgtttagctataaagagcatagtaatatttcctctctattttaatcatctccttaaatcctcaaacgtttcttcagtgcatgagttgtttttcatatcttattaccaacatctaaagattcattgatcttttggtttgatcatgggtgtcgtggaaaaagttggtgtg

SEQ ID NO: 62506 - DNA, 617 bp, Arabidopsis thaliana landsberg
ggtttttgaacaaactaaacatggaaataattattaccgcaaagtacaaggcattacgataagcatccttgaaagctttgtctttttttttgggaactcgaaagctttttgtcttccagttgtaagaaaaatacaggaaaaaagaattgaaaagccctaaataaaaaagtcgaaaactttagctttgaccaactctttcctctcttttcatggtagacccaactctctcatttcttactctctgattcatctctctctctctcttcatttccatggaaggaaggtgatgagctttctcaatctctctttactgattcttaatgaaagtcatctcctttctctttggtatcccttttcttcttctctgcttaattcctgaccaaaaattgtgacaagatctttcaatccaaaagctatatacattaaggtaacgatttatgaagtatttctcctcaatttcatttcttttgtttctacgagtctgcatagatccagaagagctttgcttgattgttcttactttcctgagatctgtttaaacttagcaaaaaaaaaaaggttactttgcatgaaatgtgtgattagggtttatgcttaatttggtaaatttggagaaa

SEQ ID NO: 62507 - DNA, 114 bp, Arabidopsis thaliana landsberg
gtgaatcaaacctccaagaacgtccacacaagcgcctagcttcagcgtgtcaattgggcaagtctctggaataggcttaggaggagttggtgttgatggaaaaactccggaaaa

SEQ ID NO: 62508 - DNA, 257 bp, Arabidopsis thaliana landsberg
  unsure (1)..(257): unsure at all n locations
aagagatacaggaagatgaacacatgcacgcggcctaataannnnnnnnnnnnnnnnnnnnnnnnnnnnnnnnnacgaccaagcgcggtcaatagggatgaggacaatgcaggggagagtcaaacgccaccaccgaaaagaaaaaagagaaacgaacggagaagaaagggcaaggaaagccaaggatgcccccgcaaggagagggaaaagacaacagggaaaagacgagcatggaacaccaaggaaaaagccacacc

SEQ ID NO: 62509 - DNA, 142 bp, Arabidopsis thaliana landsberg
gggaaaaaaaagaaaaacacaaagaaaaagcaacgaaaaaaagaaaaaacagagggaaagcaaacacgaagaaaaggaggagaagaaaaagaaacaaaaaaaagaaagaaaaaagaaaaaaggaaaacaagggagaagaggg

SEQ ID NO: 62510 - DNA, 1945 bp, Arabidopsis thaliana landsberg
aattagatacaaaacatgtatcctggaacagtggtactatacgagtcagtagatgtgcaccacttaactagtatcatgaatctaagataatatcgcctgatatctaagtgaaaacttaccctaaaaagagaaacagttcacatgaaaagcatcgaataacgacaataagaaatagatacttaacagagctagaaaacacaatacttatatataatttaaaataaaaagaattatatatacgtaaaaacagtataaagaaagaaagacacaagaaaagtagtctgttttggatctttaaccaaacggaacctctgtctgtgtccccgcattgtccttttgtcgattataaaaatcggtcacgccttttcacttccatactcctcattttccatctctatactctaccactttttctagattctctttttcttttcaaaaacaaacaatttaatttccgataaaatagtaaaacatatttttactgatctatattgttcagaatgcattttttgcgatctatccgatatatttaatttgtagaaaaaataattagtgaaaacgtcgaattggtgagtaggaacaagtggcttcttgacaactaacttactggtatcgaggattgcgaccaggagacaataaacaggggtaaaacaaactttgaaagacgaatagagtttgtgctcgttgtatgattttagacaaccggttgcataatattttggtggctatgtgatatgacgttgatagtcttataggaatcagacaattcatgtgactttaatttgctctatctaccgagaaagcacgactaaaatgaaaaaaaaaaaaaaaatgtagtatgttgtaagataaaaatatatgtaaataagttggtttttcaacaaaaacgcatacattaaccaaaaaccatgcatttgtcttctcttttattgcgagaaagaaattgttaatatatgcttagatcttgtttgctattgcataaattgaaacttaacaacaagtcaacaacactgtatctcttaaatatttgcatttcatcgacgaaaggagcaaacctgttgagagtacgggtaagtacgagaacatcaccatgaaagtaaataagtaattaagtaaagttgagaaattcatacaaacaatgaagcaactcaagcaagtcaggtcatacataagttatcaaactcttttaaattcgtagaaatttgttttaagcattaaaaaaaaaagatattaaaaaatcaaatatcctatatctatagtgtaacaaaagaaacactgtatattaacacaaattagatttaattgttttgcttgaagaagaaagtgagggaaaatgaataaaaaaaaaagtttaaaaaagagaaaagattcttctccctgtcctcgcttcttaaatggcaagaaaggagactctgatgggaagttcataactgaaaaataaaaataagacagaaaacaaagttaaaaataaaataaaaacggaagagagaaaataaataaataaaatcactcaaagaatttccacagtttttctttccatgttgatttagcccattcgtagacttcctccgcgccgccgttagacgccgcctcggaagtatcagcaaccgccgtggtgttcgtcgccttcaaagactcgtttctctcctctctctggtattttttttttatttctgggtttacttgtgaagattcggttatacttcggagatcattgttataattcacttgttctgatttagtcctacttgtcaaatttctggattgtcgaaattggcaattcattgtctcagatcgtatgattattggatctgattttgaattttagagttagagagttcatgttggagttttgggattaaaatcgtttctatattcttccggagccaaagcaattttagagcctgggaatgtttaaagccaataggttttttttttttttttt

SEQ ID NO: 62511 - DNA, 546 bp, Arabidopsis thaliana landsberg
gattccgttaaaaactacgggaaactgaatttcgccggtctgttccttgttcttacctttaccgatgttctcaagaatcgccggtgttatcaagtatccaaaatcttttgatgctttctctttagaaaaggcttcgcgtagacgaatgacaatgagttttttgaagcataaggccagtgtccatatcttcagctggaatcgtaacatcccatggcaatcatcactttgatgaacattttcttcagcctgaaacagtgacatttcaaagaatcagaagtagtcaatcacattttcactaaagattatgcattctacagaaacaagctaaccaattttaccaaagtgatcaacttgaagttttcttttagacattctaacaaacacttggcatacatgtcaaccattgaaatgaatcgtaaacaataaagaagaataaaaaagtttccgacttttcaattaagcatcaagccaccattaatttactataagcttagcaccgcttgcattgtgaaatgagatcatataatcactcttacaaaccctaga

SEQ ID NO: 62512 - DNA, 585 bp, Arabidopsis thaliana landsberg
ttaaaaaaccttttgacagagcttttttctttttttttttcttgcattgaaacgggtgatttttttctttaggaaaaatttggtataaattaaaaataataatataaaatgactgaatttcatatatttaatctgatttgattataccaaattagttattaaatttaatactaataatttagcttgttggccaaaatgaaaattcattgatgtcttataaattttgacaaactagatattgtttaaccaatatctaaaaataggtttttcgataactctcttcatcatgatttttcaatataccgatcaagaatagtatgtttgaccaaaaataaaaattcattgatataagagaatgcatatgctactttttattattttttagatatgaagatttgtatctatggaaagaaatcttattttggttacctgtaaccaaattggtaaaaggaaacaattctattaacaatttttggaccaaattttggtataatagtatttttgtcgaccaaaattttggttcaactgtagttttggtaacattgacgaaggataaatttaaaaaattactttcttttaaaaaaa

SEQ ID NO: 62513 - DNA, 422 bp, Arabidopsis thaliana landsberg
aaatttgagagtatcgggaccagaaccaagcccagaaaaatatagcgtgccgacacacaccagatttctatacggggagaagaccacagaggcaaagaagcgaaaccttaagccacaccgaagcataactcgaaacgctgtgacccaccaggctgaaaactacataccatggacacagccacgcagcaagaaagggaacagcgtaggccggtgccacaaggataacacaaggaagatctgaagcaccgaccgaacagagcaagatctagacactggaatgagaggtaaccaaacacaagcatgcggtgaattccctgaatgcagcacccatacaaaccaacaaggtcgcaatgctgcacagccgaaatagagggaatctccgaaacaaattgacccttccaccgcctggatgcaactgacaa

SEQ ID NO: 62514 - DNA, 612 bp, Arabidopsis thaliana landsberg
tacttcaaatgtttaaatgtgttagtgagttttagaatgaaagtaaatttaaatgcatggagaatagaagtataaaactaaatttaagaagaagattaaatttaaagtaagacgttggtctctaagagcaaattactatattttttatttatctacttaaagaaaaaataaaaattattaaatacaactaaaatttataatagatgtcgttagaactagcttcctacatggatttggagtttataatggctttaaagattatgcgaaatttgattgtttgtcaataggtttgatcactgacttgtgccaacttaatcagcaaactcactcacctcactttgatcgtgaactcaagaccaaacaggcttcttgattaattttctcacacggataaagaaaagaattctgacagtaaattttgacacatattaagacaagattttttttttttgtttaaattgtttcctccatgtatagttcattcaattctgtacactttggaacataatttggtttcagtatttgtaggtccaacttggacaacaaatactcaaagcttgaacaacccggtgctctagtgaaaccgtcccgaagatagggagaccgctttct

SEQ ID NO: 62515 - DNA, 1612 bp, Arabidopsis thaliana landsberg
  unsure (1)..(1612): unsure at all n locations
cacctgtcacgaataaggttgatggtactgatgccacggagtcttgccaactgaatgacacactgacccacaatacttgttgcaccattctgtacaacagaatcccctgttccagagaaatcctttgttaggcaaaaagaaagtaaagaccagttacattaaagacataatatacagtccaannnnnnnnnnnnnnnnnnnnnnncctcaagcatcctcaaagccgtcaatggattaacagtaatcgtcgctgcatactccattggacactctttatcgattttgtgccacacactctcttccttcacaacataagtctgccaagtccctagttcagagagattcacatcagactatttcacaaatcaaaaagggatatcattaaactgttttgaagtcacactctcttttgttgcttcacttaacataacattagagagtacctgaagaaggtggagatggaatgacccaatcaccaggagaaaaaccattaacattggagccaactgcataaacttcaccaacaccttcataaccaccaaccgctggtaccggtggcctcaccggatacacacctaaacaatcatcattttccaaaacattgaactcattatctaactcttagctttgtgaccaataaacaaagatggagacgatgatgtttagggatactattattgattcccaatcaaaacttatcgaacataaaccttcaattcgattgatatcggaggggttgatcggagcggcgatcattttaacacaaacgtcgttttctttcacttccaccggcgggagattcaccaatctatcttcgtcaaaggagaacaaaaggtgtaaatggagattatgtgtgtttatgtaaacacagagtaaaagtagacgaacctggtgacggaatcgggagagccgtgttcttcgtagacgatggcttttgacggtggtgacataatggtggagaatgatttgatacagagtgttggtgtttcgccgcgtcggattgacctgaaattcgccgtcgatgagaattttagagctcggccgacgactgactccatcaacgccgccatatctctccgccgtcaaactctctctggcaacgatataagaaacgacgtcgttttgggtttttctcgttcttaacaattttagcaatcgctgatagtatccgaacgacaacgtttcagcacgtttggttttcttccgcacaaatcaaattagggacggggggaaaaattgtaaccgagaaaacaaaccgaatctaaaccaaaaccaaaaccaaatctaaagtctatttttttttttccactcacattctcctaaagtctattttgtttagggaaattctatattcgaaacttttctttattggtttgcatctaaaccggtccatagattgtcaaaataattgaaatcggagtacatgatggtggtatagtgctcgaaagattcactatgatatttttgagagaaatttatcctatgtaatttagtttttggaaaaaaaaaaaaatttggatatgtacaaaacgattgttttttttgctagtatttagctcaaaaatactagcaatatcaaaatcaccaacccccataatctgaaagtttggta

SEQ ID NO: 62516 - DNA, 1395 bp, Arabidopsis thaliana landsberg
tcgtgtttgggtcactagattgggtttaggattcgtattctgctcgcctctggattctgattccgctcaccactaatagtggggtcgtgcccggtcgtgtaatgagcataagtttcagtcgaatagttaaaaagatggggtccaactgtaagaaaatatattctatacgggtctcttaagaaaactgagaaattgtttcggaatctttttgtgtcacctttctttttttttctcttcttggtcagaaaaagaagtattaggaatcaataacgcatacggtatacacatcagtttaaagcttatatctgacttctctctcacaaaaacatcgtgaagaatggaggagtcacgagaatcgccggcggaacacggctactacatgccggcggaatgggattctcatgctcaaacttggatcggttggcctgtaattctctatctctcttcctcttttctttttttttcatgttttattcattaacatgagataaagtaaaaattgacggcgattctggagaactcaatctcgctgttcaaaaatcaaacttcgatttcgattttgtccttttgttttttttatatggatcctgctcgtagtttatcattgttcgaattgctgttttctgtttatttgatgatttctctgcttcctggttcgtttttgtagagtttccgataaattttgtatagcttctgtatgtcaagttagcatctagatgtgatatgagatgagatcttttacattgcaatctatcatggttacagattctgcaaccaaatcagaatttaaagcattttcagttaggttgtttgtttcgatttgtttcatcactgaatacatgaatcaaacctcaaaccacttttgtgattttgaaatctggattataattctgtcataatatggctgcaggaacggcaagataactggcggcacaacgctttacccgcacaacgagtgtttgcagatgttgcaaaggccatctcaaagttcgagcctgtcactgtctgtgctagccctgctcaggtttgtttacaatcatacctgaaataagaaaacatctttgagtttctacatacagataccaagtagtctctcagtttactttctgtttttggcttacatgattgtgcttgcattagtgggaaaatgcaaggaaacagcttccagaggatataagagttgttgagatgagcatgaatgattcttggttccgcgactctggaccaactgtgagtttacttctttagcttctcccttttctcaccatcttacaaagctttctaacaatttgttgctaccgctctcttttatacagttcattgtacggaaaagaccagtaaagctcagttcttttaaccgaaacattgatgggatcgactggcatttcaatgcct

SEQ ID NO: 62517 - DNA, 596 bp, Arabidopsis thaliana landsberg
ggctcttcaaaaggggcttgatacaaatgaggtctctccaaatagataggctcttaacataaaaatataaattctttaatcagtttactctgattagaagggaaatatgattgaaagccacaaatatataatgatatatgaaggaggctctaagttttttgaaacgtaaggaaaatttgtagtacatcacatgcagtcttatacataccccatgtcatcatatcccatcacaagcgcctcaccctgaaatgaaatcagtacagtaagctaacttcagaaacgctgaacagacatataagggctaagaacatatatatcaaattatcccagggagagtagtcttgctataactccagttaataaagttaatttagatgttttatacacttaagagttcagacaatactaccactatatatagatacacagttttgctataaccagataaagttcataaagatgtttttatagtctagagaccagaaaacgtaaccaatatatgtctaggctgaagtttgagataaaagtatattttccaaggataatcattatgttatgttatgcaaccttatagctaatgaaagatcctgggaagc

SEQ ID NO: 62518 - DNA, 1339 bp, Arabidopsis thaliana landsberg
gtaacaaaaaaaagataagagttagcatacattcaaatgatcccgtcatctttatttggctgtacgtttcacttttcgtgattaaatccacagaataaacttgtataattcaacaccacaaccatcttgactgaagaaagtgatattttggcaacatcccagataggaaactatgaaaatgattagtttttcagtgaacagttaagttaccctagttgattccataatcaatattcatatcaggtgaatttctcctaatcaatctcaaagtagatctgtccttcatcttaaaaaaccccatattcccaaatcagaagacaagtatctgattctacagagacaagtatctgattccataatcaatattcatatcaggtgaatttctcctaatcaatctcaaagtagatctatcctttatcataaaaacccatattccacatcagaagacaagtatctgattctacagaggttatctctttaacaagatagttcctttcacatgatcatgatcatagcaagttcaagcatagttacatacccattcttttgttggggaaggtcttccacaaattccatgtcccacgaattagcatcaatcttttttccacttttttcatttgcttcatcacccatgtattttgcctgaagcagaatatcagatctggcattagctataacgactagtatatatggtttaaaaactttcacagtagtgtccgatttaaaaagcaataacagcttctggcatctccataatgtctccaaacagatttcaaaatcaagaaatgatgataaagatttatcagcatctaatatcttttaatgcatccaacatgtcagttattaatagactaaataaagcgaataagagttagaaattaaatcataccagagcattcagaatcataggatcaactccattcagtgaatcaagatacaagagcttgctttccctgttgttaattactgccaaggtccaatgcacacccctgtggatgggaacaaatacctgcagagggcacagactaagttaaacataaataaattggactacatgcgtaatattaacaagagaatcttcaaattcaggttcttcgacaaaattaccatgtcacagtcaataagagcatatcccaactttctctgcgtagtccatctcctgacagctttaaaattataaccagaatcgcttaccagctgaaaaaaataattaaagaaagacagatataagtgccagaggattcatcaacgtataagaaggccactgcttgtcttggttactcactgccattcatgggatacagaagccagagacaacttagtaccatggggagaaaca

SEQ ID NO: 62519 - DNA, 573 bp, Arabidopsis thaliana landsberg
caccttcagttcttcggcgtccggcgccggcgtgcggaacgcgacactgatgtcgttggtgacctggttgccggcaatcggcagcactgcggtgtgacggatcgtgccgcccttgaagatggcgatgtcggaggtcccgccgccgatgtcgatcacgcaggcgccaagatcgcgctcgtccggcagcagcgtcgcgtagctcgacgccagatgctggaggatgagcttgtcgactttcagtccacaggattcgacgcacttgtagatgttctgcgcggccgagatcgacccggtgacgatatgaaccttggcttcgaggcgcacgccgtgcatgccgaccggatcatgtatgccttcgcgaccgtcgacgacgaactcctgcggaatcacgtgcaggattttctggtcggccggaatcgcgatcgcacgcgccgcattcatcacgctgtcgacattccggtccgacacgctgccggcacgcaccggcgcgacaccggtcgaattcaggctgcggatgtgcgtgccggaaatgccgacgtaaaccgattgcgcgcggcaattcgccatgtgctc

SEQ ID NO: 62520 - DNA, 1338 bp, Arabidopsis thaliana landsberg
ttactgaaaactcgggtttgaacatgattcttttatctttaacgcttttgcagacatgtatagcaaatgcggggaaataggtgaagtggtgaaaatgcttcctccatcagtcaatcgatcactcccctcatggaacatactaatatcagctttgggaagacacgggtatttcgaggaagtttgtgcgactttccatgagatgcttgaaatgggaatcaagccgggccatgtcacatttgtctctcttcttacagcatgcagccacgggggattagtagacaaaggccttgcgtattacgacatgattgctagagattttggattagaaccggcgattgaacattgcatctgtgtaattgatcttcttggaagatcagggaggttagctgaagctgaaacctttatatctaagatgccaatgaaaccaaacgacctcgtgtggcgtagtttgttagcttcctgtaaaatccacgggaatttagaccgcggaagaaaagcagcggaaaatctctcgaagctagaaccagaggatgattctgtttatgtcttgtcctcaaatatgttcgcaactacaggtagatgggaagatgtagagaatgtgagaaatcaaatgggtttcaagaacatcaagaagaaacaagcttgcagttgggtgaaactaaaagacaaagtgagttcgtttggtattggagacagaactcatccacaaacaatggagatatacgcaaagctagaagacatcaagaagctgatcaaagaatctgggtatgtcgcagatactagtcaggctttgcaagacacagatgaagaacaaaaagagcacaatctttggaaccacagcgaaagactcgctcttgcttatgcactgatgagtactcctgaaggttctacggttagaatctttaaaaaccttcgcatatgcagtgattgtcactctgtttataagtttgttagtagagtcatcggacgtagaatcgtgttgagagatcagtatcggtttcaccattttgagagaggtttgtgttcttgtaaggattactggtgaaagaagagaagtctgtacagtagctagctgacaaagttttcattataggattgtttggtaaaggctctgggtttcaacagttttgggacattactccatgattttattgtgtcgtcaagaattaaataaaattggttttagaatttgcaatttctcgattggaggtgagtggacatgcgaccactttaaagactgataagacgagactactattagatttctctgaaaccttcactgtgtgagaaaaatagaaaccgctttcctttgctattgagagactctcagcttgtgtt

SEQ ID NO: 62521 - DNA, 1428 bp, Arabidopsis thaliana landsberg
  unsure (1)..(1428): unsure at all n locations
tagaaagagttactgaatattctttgaacatgcgctacatgaaagacaacaacaacaacaaaaaactagtagatatatattattactcgaagaagacgatgaaaaaaccgtcgttgtttcagatcattattatagtgctaagcataccaacgactacggggaggacggtgggaaatcttcgggtgcgggaaggatcacctttcaagatcgcaatatttgcagatctccacttcggtgaagacacgtggactgattggggtcctggtcaggatgtgaactccgttaacgttatgtccgccgttctcgacgctgaaactccaggtcatcaatcatcatgtcacactgacaagttaccgtacaacaattttctaccattatctctcattttgatatgagtaacgttatttggtgtagaaagagtgataaccacacaataagatgtggtttagctttggatcggtttgttggtttggtttagctacagaaattttgattctattaaaacgccacgtccaaacacaaatattgaccttcaattttcttaaaaatgttgtgagattagctttaactgaaataaccgtttttttggagatatgaacagattttgtggtctatttgggagatgttgtgacggctaacaacatagcaatccaaaacgcaagcttgttttgggacaaagcaatctctcctacaagagacagaggcattccatgggctactctctttggtaaccatgacgatgcttcttttgtttggcctttggattggttgtcttcctccggtattcctccccttcgttgccctgcagcatcagatgatgatggatgcacgttcagaggaactacgcgagtggaactgattcaagaagaaataaagtcatccaatgcactctcatactccatgattagtcctaaggagctatggccaagcgtatctaactatgtccttcttgtggaatcatcggatcattcgaaaccacccgtggcattgctatattttcttgattcgggcggtggttcatacccggaggttatctcaaatgctcaagtggaatggtttaaaaccaagtctaatactcttaatccctatttaaggtatgaaccaaaacattaaagcttttttggtgggaaaaactcgatcattcgctaagtcgatatcgaaagatgtatatttcgggcaggatcccggagttgatattttggcacatacctagtaaagcatacaaaaaagtagctccaaggctatggataacaaaaccttgcgttggatcaatcaacanagagaaagttgttgctcaagaagctgaaaatgggatgatgagagttcttgagaacagantcctcgttaggtactatttattaaacacgaaattgctaacacttagatactggtttgatataactttatggactatacttttgtgtaagt

SEQ ID NO: 62522 - DNA, 574 bp, Arabidopsis thaliana landsberg
caacaaaagtagtgatgtagatgcttatcagcctgcgctagagcgggttgcgaagaagttgcatttgatggagatttctgacctagctcaagaatcagtggctctgcatgaaatggttgctttaagcggtggagatgttggggagaatattgaggagatggcaatggtattaaagatgattaaggattttgcgcagacggaggatgataatggggaggagcagaaagtatgagttaactctagaagcaatgggcaaacttctacggcagcgagtcagaagatacctgtgattcctgatgattttcgctgtccgatttcactggaaatgatgagagatccacttattggttcatcagggcaggtatagttcactttaacctcagcttcttgaaatttatttcttcgatctcttaggatttaatatgttttcctctatgtatagacatacgaacgcacatgtattgagaaatggatagaaggtggacactccacatgtccaaaaacacagcatgcgctaacaagcacaaccctgacaccaaactatgttctccggagtctcataactcactggtgc

SEQ ID NO: 62523 - DNA, 2145 bp, Arabidopsis thaliana landsberg
gaaacaaggattaaagtaaaagatgagcattttgctttgcttggtgtataagtcataaaagctattagggttgttgtcatgggcctgaactatgttacctatcatttaaaactaaatgtagcccgtttggtaagttataaaataaatagactccaaaagaaccgatccgtttagtccttttgaaacatatgctgaaaaataaaatggattcaaaatcgacagctagaaatagaatctaatacacaaggccacaagctaacaaatgtcgacaaaatgaataaatacagaagctaacaagttgatgcaacttataattttctatcccaattattttgtagaaaacaaatgaaactcgctgacactctacataatacgttaatgctgctccaagtgtatctgtggatgtttaaataaattttcggatttgaaactgcaaatatcttaaaccatagatcactgcatttgttgtctacacgccaccaccattattgtctctcacgtctagttttaagaaaagttaaagtctacctaacgttttctatgtattttctaattgaagtgtttaagtacagactatagtctatataccctcgaagagaatctcatccgttagatattttttttctctatatataacatgtctctgtcctttacaattcaatgcgggtcatgtgattaaatattactacgcctttgtttctttttgcttgcgacttttggctttactctttagcttgtggcccgtttctcttattttgaattattatttttggaatctttttcatgagtcatatcatattcaattattcatgtcatttactacaaatttttaaaatctttggtgagatcagtaaaatagatcgatatcacccatacacagtacttatgtataccatgcatgttgaacaaattatcaaaagattcggacatgtttacttatcattacatcgtcatacatgatacccaacaccatccatcatatcatacatcctttccattatcattatatcatccccaccacaaacccaaaatcaacgaagagccaacatttagattaaataactcaaagccactaacatcataattaaagcattaaggctgaacacacaaaagaaggaggtggtcactaccatgatgtattcatcatcaccctttctttgatttaacttaaaagatttttttattcatcttggttcgtaccaagcagagaactcaacacaccagagcccctgtctttctcactttttccaacttcaatggttcttgtttgcgagattacattgcttcctgatctcacccttagagccagtcaaggggttgttctcggataagatctggattgccctagtgaactccttgaagaagtaggcctggtccttagccatcttcttaacgattggtctggttcgtttgtcgtgtgcgagctgatggtccacaaggagcaaacccttgttgtctaggatgttacggtagtaattgttgtctagcaccatgggggtgccacggtcgttacgcacgtactggaccgcctttgggtcagggatcgagtcaggacacttgtgtagcatgtgagggacgtggtccgggtttaaggacgggtccacctcagggtacaaacgatggaccagcttgacacagtgagttcttcccacgctgtgtgaccctgcacgtgtcataaaaaaaaaaaagtcaaaatctttcagtatcgaacttaaaaatctaacaagaaacttaaattccaatcgcctaaattcagatcccataagagtaaagtcaattagtttgattagtatgtttaagcatgcatgagtttattgaccaaaataaccttgtgctaggctattgtaccggggcataaacaaggattatcctgtcttatttgttagtactagtgatagatcggataaggataactttcaaagttcaactcagatcgcatacactccttttgtgattcaataaagttagctttagtagtggttcattagtcataagagtgtttcatgcatgagtaaattgactgaaatacccttaatctaaggcagcagcaacaaaatatctcggttggtcaagagtttttaatttcaagcgttacgttttttccggagcctagtgacaaataatcaaggatgagaaagataaaag

SEQ ID NO: 62524 - DNA, 374 bp, Arabidopsis thaliana landsberg
acaacgaaggaaaaggggctaacgcatatttgcaggttttttactaactatacataaaaggggagaaagggacacttatgaaaatcaaggactcggatgccagaaacgagatgtgaactggggacccggggacatgcagtcctgggcggtaccaacggctccagtccggagccggagcatcaccattgtacggacgggggtgcgcggatttgcagtactccgggagagtgctgtgatcaccattagggtcctgaagtatcatgtagcatctcacggagtataacgctccctttcctaatggcgacactaggggatagagtcctctgctgaacagctgtgtctacctatagtgcaggatcaatgttatgtgacac

SEQ ID NO: 62525 - DNA, 1285 bp, Arabidopsis thaliana landsberg
  unsure (1)..(1285): unsure at all n locations
ggtttctctacaggaaatgcttggagatccttgttttcatggttgccacagagggaagcatcggatgaggtactttcatgctaatcttgttagtttcttttctttaccatggtggatgcattcacatctaaccatattacttcacatgcagtcttctgaggacagtagatttccggggagaggtagaactcttagcactgcccgagatcnnnnnnnnnnnnnnnnnnnnnnnnncccaaacctccatgctagactgctggaagatagcagctctccagaccgcctttctgatgcaactgtcaacaccgtggcagattcaaggtatttgatttcttcagcttatgatttatcagcttattacgccattcttcaacctcaccctcatgtctcaccgtgtgtagacaagcgccaatagctaatgcagcagtcctgccccaatcccaggttacttttcttctctaagatattcggctcagacccagacccttgtacagcttctagaagcttttctcttattgagctgttaaaacacagggtcgtgttgctgcttccgaagaacaaatccagaaactcgtagccatgggctttgacagggtacgtttcttgcttcataccaacgttaactaaaacaatagtaaatagatggcttaaagtctctggattttcttcagacacaagtggaagtggcgcttgctgctgccgacgatgatctcaccgtagcagtggagatcctaatgagccaacaggtataaacttttccgaactagagttctattaactcatttttagagtttaggcactactaacaacgaaaccactgtgatcaaacttgcaggcttaacaccaacaactcgcaaagtactgttttggcttgtattgtaacgtttgtttctcattctgtcttttacttgcatttagaaactgtatagcgtctgttttctttaaggaggttctttaaccagacgatcaaaccgattttccggtttagaatctaatacaaacgaaagatcagttgaaattttctttttttgcaaaatctctctacgtagaactttactttgcaaaagtaaacttgtttattggcggcacacttttttttcttctctacggagtacaaacggaatgaaacagaagctattataacatggtttccttcctcacttgctcttgtgttccttcgtgttactagttgaggtttctctagcccgtcccccaatgagaattggacattttgcatgttgggaacagtagtcacttacactccctaaaaatgccctgtatagtc

SEQ ID NO: 62526 - DNA, 1057 bp, Arabidopsis thaliana landsberg
ctaacagaaatttttgcctagtcttaatgtattgttattatagtttttgtcgcttagtttaaactagatttatttttgtttatatatatagtattgagtatggactcatgctcagaacgaatacatctagtaaacagaaagatacttatttcaatttgctttccgagtggtttaaaatattggaaacaacgttaggcatagtataagactaatctagtgacttcttttattaatggtgctaaggtataaggtttttcttaaattaattaataagtatattctacgattaaagcttttagttggacaaaaacgttaacgtcgatgccatagaaacgtgttgcaccttccactgtctaaagtttttttgtttttcagagtttctttaaagtttttgtaaaatgaagtatattcagataatccacaaaatttttgacaaatgatatttggctccacgacatgttcacgtccacgaaaatcatgaacacacgatgatttattttggtgggacttgtgagtgtattctgtagacaggagttatgtcaatcgttgttcgtaccaatataactcaattgctgtgagaaaataaatttcaagaaaacaccacaaaacaaaattgcaaaacagcctggttacagcttggtaggttactatgacatgaagtagaagtaccaatgtatcagtggttacagcctgttatagaagttaagaaaccaaattctagctctaggcagaaaaaaatgaaaaggcctaggaagtttgagttagaaaataattgcaaaaagagagatgactacattttgttgctatagtatccctccaaaacccatcactaattcagtttaatatgaaataacaaattgttaatagcttgttacaaataatattattcgtaattttgtcacaaattaaagatggaattacaattgaattatagcgttataaattaacttcaaagatacatgtcactatcattttaatttctatgagtattggctatcatcattattttagcaagagtagatttgtaacgaaaattttgttggtgttttgagggaaa

SEQ ID NO: 62527 - DNA, 2351 bp, Arabidopsis thaliana landsberg
taaacgatcagatgagaagggtcgttggacaaggatgcgagttgctaaagttttccttgtgatttgtccgttttggtttttggcgcagcttacatttaatgtctctctcaagtacacaacagttacggtaagaacatattggacacccatcatcttgttgcttattctgaatctactaaatgttttgctgaagtttttttttcatttttgtgtgtttgcagtcaaataccatattaagcagtgcatcaagccttttcacctttcttgtttcactaatattcttgggtgagaagttcacatggttgaaactcttcagcgttcttctttgtatgtctgggactataattgtaagtatgggtgactcagagtccaagtcaaatgcagtagctaagaaccctcttttgggagatattctttcgctggtctcagcggcgctgtatgctgtctacatcactcttatacgcaaaaagcttccggatgatgatgaaagaaacggccgggtcagtatggctcagttcctcgggtttcttggtctcttcaatttcttcattttccttcctcctgctctaatactcaacttcacaaagcgagaacgcttcaacgcacttaccttgaaacaatttggcctagttgttggcaaaggtatgcaaacaccatcccttatttccgctattgtctccttgaagctattggtcaataaatcacattttctcatatcaatgggaattgatggcacaagtagtaaattaggattgatgtaggaatgccgatttgaaagactaatgtgtgtttcatcacaactgcaggtttgttagataatgtgcttagtgactatctgtgggcaaaggcagtactattgacaacaaccactgtagctacagctgggctaactattcaggtcccattggcagccattgtagacagcttatcagggaacaaaccaagcttcaccgactacattggtgctgcagctgttatggttggctttgcagggattaatattccctcagagatgttttgcaaatccaaagagactgctattgagttagaacctgggacttcgttcacagatcctcctccgattgtgccagatagcataagagtagattcttcactgactgtagtataagcctaaattgttccaaattcaaaagccacaattcttgtaaaatcttttttttttctcttgtttactgctcttttcctcttttatgataattaatttgtagatcgttgaacatacagctgaaggcaatagtgtaatgaaatcgttcaagattctggacttagtttcaagacagtaaaaataaaatgtttcatctctctgttattgcactaagcgtttacattgagatgtccgtacttttgcatgactctttttgtcgccatagcagctgcttcgcttgctcgtaatgtgccttgtgccattagagctgcaaattcgcttgtaatctcttcctgaatcttggccctagcatcacccaacgggtcgtccttgaccttctctttactagctgatggttgaataacaggtggcactttctcagttgcagctgaggtttctgctgcctcgagcttaggagctatcacaatttgtgggccatcatctttactaaaagctccaaaaggttgtggctgtggcctaaactgtggaacttgaggaacagcaccagcctttagagttgtttcgaggccttgcaacataggcactgcaaaatggggatatgaaattagaacaataatgtagccgagaaagaagaggttcaaggaaggtgtcgcaagttatcagcgacttacttataagaccacccatgggactgtttagaacatcattaggaagctggagaatgtagtcaggaatccctttacccaccaaaaactgagcgacctcgttgctgaagttgttgcagttgtgagtaagtaaattgtaggattcagcagtgtaacgaggactgatttcttccaagtacatctcgaatacatctttaggcacatgtgatagacccaactctatcgttcgaattggtgttccatatggagttcttccaactggtaaatgttgtatccctcctccaaaaaagtactcattcccatagacaactatttctgtatgcctggaaaaaggatacataagtcacatgttatctacctggtttaacatcaaagtaatatcctaaaagagtaaaaagcaaaacacctaaacaataagcaggtttattcatatttctcaaggaaaaccacactcggttgatattaaaagccagaagcttagacacactttacattcacccaaccaagtcatgcccaataatctttttacatttggggttaacctgcaaaccatggttcaa

SEQ ID NO: 62528 - DNA, 306 bp, Arabidopsis thaliana landsberg
cgaccacccagcagcaacgtgtcaaacggacggtactcgatacccacagttgtaggtaccgtggtttacgttctgtctaccgaccttgtagttgacgtaacgcccggaaacatccgccttcagctgtgaaagcaggggaaggtgtattttgttggtgacggcataacgcgaacggtggccagaacacatgcatatccgacgtgccatagattttgacatcccacgtgctctgatatcgtacataagcgcaactctgggtgcgaactgaaaggaacagtgggagctcttctttacctccaggcatgg

SEQ ID NO: 62529 - DNA, 115 bp, Arabidopsis thaliana landsberg
tttcttctaaatatggcactatcataccttaggttcatcacataaaaactttttaattaaaaataatacattgatttacattcaaggccgttcacggatgaaggtagtaatgtta

SEQ ID NO: 62530 - DNA, 117 bp, Arabidopsis thaliana landsberg
tacatctagtacagcgctatctccacaaaatctgtgattattatcattgcaaaacacattgaattatatgtcgaaatatttgctggtttttatggtcatcaaaggtttctttctcat

SEQ ID NO: 62531 - DNA, 286 bp, Arabidopsis thaliana landsberg
ttggattcatattaactccgaccactgccagacagtcaaggagaaaagcaggcttgctatgccattttttacttcttgtttaggttaatagtttttttatgaaggaagtcaatgctctctcgtgtgattgcttaaggttatacccataattgataagtgtcattatgtgcctatgctttttaagactctgctattatttctgacaaaaagtagaattatatatacatcaacatagaaagcgaatccatcatgattataactttgttcttattttagtcggcactga

SEQ ID NO: 62532 - DNA, 395 bp, Arabidopsis thaliana landsberg
agcagcaatatgtgtcaaactagatctttctccggccgtataacatcaatggaacgacttcttggttggatctttcttgctcttacattactacttcactcatcaattcaagcaacaacatcaatttctcatgtaaatcactaatcattaatcctgtgcatgaatataccttttcatttgcagaatttctttatgtttggatttggcatgtcttccaggtttacgttgtatatttaggtgctaaccggctaaaaaacgctgctttggcttcaagccaccaccttcatcttctttctaaagtcttcacaaggttaccttcttcaaaactcatctcttctacagtcctttttttcttgtcagtcaatgatctcgtccatgaatttttggagatttcg

SEQ ID NO: 62533 - DNA, 584 bp, Arabidopsis thaliana landsberg
caccaatgctgctaataagctacggatttgcaagtgtcttctaaaaatgtatagaaagtgacacgaattgaattcgaatacaacattttagaagatttttgagcaattaccctccattgaaatacgttgttgcaagagctaatgtaccagtgatctcctgagaaatcaagctctgaccctgaaagattgaattattcaaagttttgttctttctaattctgaggctaacaagaatcaatctttcagtaatttgactctgactacaggatttaaggggagtaccgtgagagtgaaactaccgtcgataacaattctggtgggaaaactccgatcaactgtcgaagctgcgacagaaaccgcccaaggagcgacattctgaacaacaccaggatcagggccatcgtttccggtagagaacacaacgctgattcctctctccgctgcgtgaaaagccccgatgtctgcgctcgactcgaaaaacggagataacggcggcgaatagccaaaagaggccgaaatcacgtggacgccgtcgtggatggcgtcgtcaaaagctgctaagatatcagcctccgtgcaaacac

SEQ ID NO: 62534 - DNA, 848 bp, Arabidopsis thaliana landsberg
tgcaaacaccttccagatccttcccccaacacgtcttgaacacagctagcctagccaatggagctccgccgcgagcagtgccgcgtccaagaccgaagaagccggagacattgcgaacaacggatccgacggcggtggaagctgtgtgtgtgccgtgaccgaggtaatctcgcggcgatcggtattcaggatctcgcgtaaagtcaattgttccgtacgtctcttcgaatcctctgaggtaaaatcgagcaccgatcaatttacgattgcaatgtacagatggatcaaagtcttcccctccgacgcattttccgttccatgacgaaggtataggtttcgcctccggcgtttccctgaaactctccgattccggccagattcctaaaattgaaagtaacaaaagtttcaatgaaatgctcaaaatgagagccctgaaacaaagaagagtcggggataaacaagagaccagtatcgaagattccgacgacaatgtcggatccataggcgagctgcggcggaggagtacgacgggcattgtcaacggcgagacctaagaaatcccagctccttgttgtgtgcaacttcaagcttttgctcttgaaaaccgttatgacctggttcaattctacaatagtttcccggttaaccaaaccggtcttagtgtaactgaacgaaatggaactggttcgattagattacatgtttattggttccgataaaaagttcgttattcaaggataaccaaaaccaaaccgatttctttaatgatgagaactatattgccgccaaaatataaagatggaagtattacttgctaaaagagcagcttgtgttgagttgagttttgc

SEQ ID NO: 62535 - DNA, 1777 bp, Arabidopsis thaliana landsberg
tgtttgaaggtatttataggaaaacgagtcttttctttttagtgtatgtttttctctattttttaataatggatactgactgctgactcatggttcaaatccctttcgtctattttatctggttatacattttctttgaacatccattacattataaaatatgatttgatatttactcggatcatattctatcctcatttgtgtttcaaacttgcaatggccgctttctatcttgattaaacaatgttaaaccactttttaattaacctaacgtgttaagtctctgaaaatgttccaattaacttgtattaaaacgctatgaaatattacttattcgatgtcttcagcgagcatggaacttcgtccatgttttttttttttttttggtttaatgttaaacttaaacttcgtccatggttgatagtaaatgttactataacgttccaatattttaacttaatagaatttagtttttcaacgccatcacaataaaagttacagaaaaattaggcaacgcgtcgctatagtttgtactaaacatcgatgaagtatcatatgaaatgtccatcattaggttttaacttttagcttttagatgttttcttaacaacatcgcctttatgtgaaattcaaatatgatgtcacgatcgactcactagcctaattaagtttgtgcacacaaaacacgtgtgtttcacacaaaaaaaaatatcaattcctagtaggctactacgcgttgacagaatatgcttcgttcagttgtacgtgtttcacatgctacaccagattattggagaatgattagcaaaaatctcatgtactactgattagcattacaaattcctaaaaaccacgaaaaaaagaagaaaaaaatgccatgaatctatctaaccagcagaaattaggaatcgtgttcttttcacacataagaaatacgatattgctagtgataatgttctgatttttttaaataaaatagtatacttattaattgatagttgttgagttgtctgtggacctctcccaaacatcagcacttccccatcaaaagatgtcaccaatatgttgcgttattggttggacattttctacaacttcttcatcttctatcgtgaaagattccaacatgatactcttattattttctgctttcattattcatttattaaaatttcaattatcatatacttatttgaataaccattggagccagagaagaatgacaattaatatttctagtccaaatcatcacatttgttctcttcatctggagtcttgcaacaacaactttcatcatcgtatgtaactagataagacccaccttaataagttgtaaaaaatatataaaatttttaatagaatattttaagttctaataataatttatatttttttatctaaatattttaaaaccaattctaattttacaaattggattctgcaatacaatctaactatttatttcatgtaactttgagtattagtaacttgtcttaaacatatttgagtagtgtagtacaaaacctgagacaacatatttgaggcaaattttccttgaattgcaaagaaattacgtcgaaatttttctgaaattcaggacgaaattcctttccccctatgcgtggtcagagaagtagtcacttgttttccagagattcttagaaaattcttttctccattcaattattggggcttatgtcgggttttttctttggcacttcccgggtttagggaccccgaagtttccaggaaaatatacccaaaaaagttttctttt

SEQ ID NO: 62536 - DNA, 192 bp, Arabidopsis thaliana landsberg
acggtgccgtttttgatacaaacatttcttctcctacaattaccatcacactttttattcgaaaccaccttctcgtcacgtgattgctttccgtgggacgatcttgaaaccgcactctcggtcacgtgaccttaaactcgacctacggtgcattcgagactctcttcatgatagcactcggttcgtgcatgc

SEQ ID NO: 62537 - DNA, 170 bp, Arabidopsis thaliana landsberg
caaatatgtgatcgatcgatgcgaatagattctagaaagttttagcactcatttcttaagcggtcaatccaacaaggataaatcccctttttaagaaaatcctaaacatagagaaaccaccactggtttacccagggttggtttcaaaccaaggttagctttacaacttt

SEQ ID NO: 62538 - DNA, 431 bp, Arabidopsis thaliana landsberg
ttatgctcttagtatccccgagcttacggatgctgagagaaatgccatttcaaaactactcggtcgagcgaagaaaaagtatgataaaccactccaaacattaaggaacttgaagaccaaattcatggtcccttcttttcttcaagacaatatatctggagagatgcggcccaaagcttcaagagcgagaaccatatcatggatgggtgcaccatacttttgcctggataaatacgctacagcgtcaaatttgaggccatcttctcatccaatgagaacgctgcttcaggctcgatatttgctggtgcagaaaaagagggacatggggcaagcggggtgtcacctggccgatacgccggcagagcattgcttctacattgctcaaatctggtttcttatattggacgactgttttttcacaactttctact

SEQ ID NO: 62539 - DNA, 774 bp, Arabidopsis thaliana landsberg
gatacagtattaatgcttatgcgagtagagtttatactcttcatgtcccaattggtttattcagtatttttttattggatttattcatatactttttgttcaatttatattggtatcattctttttttctaggtaagaaagagtcagtacataaaaatattttggtcataattttgtaaacacattgtatcaatattaatcatatgttttgcttcggaatgaataacaatcaacaaccacgatgcaacattgtgcttgtctacggagatcaggactattcatatccattgcatcaactcaagtgtagattgttcaacatattattggcataacccaaggatgttgattccattctcttaatacatgcatctagagatgtgtggatttggagttcattggtatttgggggaatacatctctctcattgccaagtagaagatctttgcttgcccattccaagaaaatagaggaataatgagcatcactactttattttattttatgtttattttattgaagaatactttttgtttattttttgcacaaaagtaaaattcatattatctataatttaatttttttatctaatttttttactaccatatggcttaattttatattctaccaactaccacataaatatgtaatagttaaataatattactttcataatctgtaaaacattgtaaccaattgtgagtgcagagtaaagcttgtacattctttggaagtcaacagtttaaatatggagaactaatctaatttactataatc

SEQ ID NO: 62540 - DNA, 1763 bp, Arabidopsis thaliana landsberg
atagacgagacatacaaaattgtagttagaagttagaacttcaactaattaataattactaggaaaaatacaagagaagttgcaacgtcatgagttccaaattttatatatattgcatgcctattataatctaattaaatatttagattctaaattttggtagccataacaatacacgtataaactcttcagtccttactgagttttttacccgtttcactaagcaaatattgtatagttaagtgtacgaaatcgtgaacatgcaatactcatttcccttacttcgttaacttgaaaatgtaacgctattcattcatttctgctttcgagatttgtgccaacaaatttcaagatttaatatcagaataatattgattaaactcaacacttaatacaaatgcccttacagttgctgctaggccatattcaagatacgggaagtgtctctccgatggagtacagagccacattattgacacaccaaatcccttttgcttttcttgtttttcctttgccagcaaatcttttattattttatctatcgcgtgagtttatatttcatgtaacgtatcatttaattcataaaggttgtatgattgtgttcctatataacatcttttaattatcaagctagttaactcattttaaaccattagtgacatttctcttggtttttactataagaaatatcaattatgattttaaaaagggaagtcaatgtatttgtatcatttgttctcccattttttttatttttgaagaatctatctaatttctgaaattttcttatgttcagacaaaattttacataaaataccatttcgtaaagaaatggctcaagattactatgttctaaattgggcataatctcaacagaaactggttgcttaaaacattatatgttctaaattgggccggaaaatgggcttaaataaagtccattaacatgttagtttcgtattcttcatttcaatcttttctggggataattgatctcttaacaactaattaggctaaatctgaattaaacaacaattataaggaagtttctctaatttctctaaccttaagacttttctccaaagaagagagaaacaaaagtaaagaagctctcgtaacagtagaagcagagtgcaaatctcactgactactaccaaggcaccaatcaccatgaccatgatgatcattacagtgttcttaacagtgattgcagcggttctcgcaatccttgtcaagaattctcaaaccggttctggcatcttcgcaccgcctgaaatctccggttcgcgtgatgttttcccgtcggcgaaagtggttaacttaaccggagcctctggtcctgagagtatagctttcgatccagcaggtgaaggtccgtacgttggtgtctcagatggtcgtatcttgaaatggcgcggtgaaccgcttggatggtcagatttcgctcacacatcgtctaacaggtacatttttcaaagaaagtttgacacttttcgatggagtgattctgaatttggttaattgctctgtttttcaattgtggaattgaaatgtttgctcagtgttttgtcaaagttgttgtctttttgtatgaattgtggagaaacattcattggatttgattagaggtaacatagccttaggttttagtgagacatatacatatgtttcggcatttttagaactctccgttactcaactgttactacttgtgtaaatgaatgtaggcaggagtgtgttcgcccatttgcaccatagataat

SEQ ID NO: 62541 - DNA, 711 bp, Arabidopsis thaliana landsberg
aataaacttttctcatctcgaaaagacgtttctataaactcttacgcgttgtataattgatctgattcaccaattcttataatggatgtgattaacctgatccaaaagaactttatagaaaattgtttaaggacaagattaatcacatttgtaatttaattattttgttctctggtatatgcttattttgtttaacattattatctgcatttcaatagctatttagattatattttagtggctattcatgcacttaaatacaaaccgtgatgagcctgatggcatagcccgatccttagtgacttttgcattcctaccatgccaagttccaatcattggagtgcatgttttcattatttcatatctagcatttaggagaattctcactgatctaaacacaacctcaggaaattttaacaacttatagacatcttcaacttttcatgagcatagaatctttataatattatatgtaatatgtgcactatattagataacaataatcacacaatataaactctatgcattgatataagtttgtgcaagtataaaagtaaaacatataatgctgagattttacatatgaaatgaaaacattataaattgaggaatcactttgaaataaaaaagaagtttcacacttaaaatagagtaatgaattgtattattccaaatttagaataacacactactttttacactattttggga

SEQ ID NO: 62542 - DNA, 482 bp, Arabidopsis thaliana landsberg
gcagttagacgacgccttggatcaggatgaagcatctttttgatcagatcttttttattatcagaaactttaggccaggggtctcttttaaagtcaattacagatgtaagaattgcttttgcgacttcatgttcggtttctgcaaacaaacaaagatagcgaaggagtcatttacatttgtatgattctacaagaactgacacaagacaagtggtttgacaaaactaaacctgcccaaaaaggtggaacaccacagagcaatatgtaaagaatcactcctgcgctgcaaatgtcaatttcttggacataactcctccttaatacctgaggagccatgtagttaggactcccaacaatttcgttaaatgtctcgcctgcaaacaaaaacattagtgggtaagattccttccaattccgtggaaaccaagcatcgaagatgataatacatcacctggtttgaagaaaactgagagaccaaaatc

SEQ ID NO: 62543 - DNA, 1342 bp, Arabidopsis thaliana landsberg
aacaagacaatccagcgaggaccagctcacactcgcacgtgcagccgctgacacgcgtgaaggattcatttaatggtaaattaaattacttaaaacattgactcagttcagagatatgcctgaagttcagaagggtggctttcacgtcacgatggggaatatttttggtcaccaacgagtgatttttcacaaaagttcaccactcaaaatgattaccttaaaatatgtcaaaattgtcaaatttcccaaaatatgtaagcttcttcagttcttgttctcaccccaccaatgtaacattctccggacaagacatctcaaaaagtgtttgacactgccagtacttctcattactttcttgttttcgactttatttgtcttatttaaatgttttttttggtacaaatatgtatatataactaaataaataattgaggttttgataagagagaatctcaattcttttttccaaaaaaaaagtatatataatcgctgttacatacgtataaaaacagctctggattcgattatgattctaccatgcttaataaagtggataaagatttaatcaattttaatttcattaccggatagtctaaactaatgttggatactggattatgaagcttgttaaacgcttggcagttaggccagcattaaaatttacgatctgtaaatgagttttattcatttttaatgtatctagcttactatttttatgtgattcattaattatgtcggatcatattaatacagcgtccacatataaaattatgtacacacataatattatacacatcacttacaagtttcataatgtttaagcctttttcaactaaaaaaaaaagtttcataatgtctaccaaaaggtcttttgcttttgttttttcttgatttcatcttatatacatggtatataaaaaaaaatattcaattagaatgattaaaaacaaggtactatatagatatgatgactggggaacaacactgaggattttcctcagtttatatatatacatctataccaaatcacattttttattataacattcatgaacatatgtcacatagggacgtttcggcgatcacccgctagtaaatccaaacaaaatttattttcatttttgattttcttttgccatactatatacaaaaaaaaaagagttctgtataaggtgtcttcttaaatcatactacactgaattaatatagaatacgaattcgtatattaatcgtgtagtttagtaatcacgaagagagagagaggagagtaatgtgtgtgttgaccgcatgggaagaagagagagatgtaggttgaatctgaaaccaggacgtgtgggcgtga

SEQ ID NO: 62544 - DNA, 489 bp, Arabidopsis thaliana landsberg
  unsure (1)..(489): unsure at all n locations
cggagcaggcattacgctgccctggtaccaaaagtttccttcatttatcaagcctaaagcaagatggggcaactgggccaggttaacactggcacctacaccgccatgcgcatatacacaggggtaggcctcgttattgagcaaggcgggcatcaaattgcaccgtatcgggatgaatgcccgagtagcccagcataagcgtatgcatgcgcgccagcaacatggccctggtgtgcaggggtgataataattgccccataccggagctgtggctgcgaataagattatactgcaattgcttccggtcggcatcgttgatacgatactgggccataggaccgaaaccggtattgatgccgtagatcagtttatcttttgagaacttttgtaagagttcaaaacttttaaccacgtgcttcnnnnnnnnnnnnnnnnnnnnnnnnnnnnnnngctggacattatctgctcgaacgtaaataggtcaagcgc

SEQ ID NO: 62545 - DNA, 1009 bp, Arabidopsis thaliana landsberg
  unsure (1)..(1009): unsure at all n locations
cactagatttgatactaggattaatatgtaaataataagctctaaccatcctaccaaaataaaataataaactctaaccagagtaagcaatcagaacacgagccgtgggattggaatggctcgagtaggctcgtagctactcgcctaaacacaccattggcggtgaattacgaaataaacccttcgcgtgtacacgaggcatacttcggttagtgattagagagaagtcaatggagccatactaggctataatggtcagattgatattattttctgaattgggcttttacgggaatggataataaaaaagagatgctcgatctccccaaattagagtaaaccctaattgtgtatctgtagctttctctctctctctctctctcgcgaagaagaagaagaagaaggagatcaaggaactcgaagtgtgtgtgtgtgtgtgtgtgtttgccttctcttgtcttttagttttttctctctttggctgtgatttcgtcggcgaagagagacatagatcggatatggcggctgataatacgggttcgaaatcgagctccgctgcggattcttacgttgggagcttgattagtttgacatctaagagtgagatcagatacgaagggatcctttacaatattaatacagatgaatccagtatcggacttcaaaacggtacgatccgtttccacttccgtttcaggattactagatttgttaagtgttaattttggtggtgttttctctcggatttggtagaaactaatggtttcttccgttaatcgttaagaaagttttctccaatctgaactgtttagctcgatttgaaaggaatcttgttttagtgctcatgtctattacttgagttctcaaattgtaattgatgtcttgaaactattggttgagcatanaagatcagtgtttaagtggtcgatgaggtagattttggttctgatcgctgaacttttgttgtgtgtagttcgatcatttggaactgaaggaaggnaaaaagatg

SEQ ID NO: 62546 - DNA, 759 bp, Arabidopsis thaliana landsberg
gttcagtttttagttttgattattcaacataataaccatcagtactaacaaaacgagcaaatgtgcttaatactatgaactcaaaatgcattctttggaaagggcttgcttatttgtactcctaattggaaatgaaagaacttcttccgcaatgagacactaaaagtaaaatttctgaaacattgaaactctgaactagttcatgagatgaaaattgctacattcttcaacttttttttttttttacagccaacgtttttttatttaaacgatggtagttcataattgtaagttgtggtcggtcaaaaccaaaattaaatctctctaataaatatatatgataggtatacattttcgtttcaaattattacaattattaggtaattagaaattcgtcagcaaaagaaaaagggaaacccacttcctgaccatgtgctgatgtgcccattccccatgatccaaaaaaagtttcttaagaaaaaagaaaagaaaattcaatcattgaaaataaaagactaacatttaaaaaataaattaaaagactataaccaataagccaaaaaaaaaacaagtgtggcagaaatatgtaaaatgcaaataggcgttttaataccaattttcaaatggatccaattaatttatttattggatttcatttcaccaaataatttcctagtcatggaaagtgacaaaggacccatatagaaacttcaaagaaaaaactaaaaaaactatagcaaaaatgaatagatttactat

SEQ ID NO: 62547 - DNA, 1822 bp, Arabidopsis thaliana landsberg
aaaggctacattgggaaatactaacagatgtcaagtggtacggacggcgtaagatctaaggatctgtttgcttctaaaactcaaccctaacatgcatctttactaatttctcataaagctattacgtaaaacatattgatgactaataacatcggtaaaaaatattaattcacatgtagtaaaatgaataacttgtcgtctaatgccataaatgatttgttctaggtgaacaatattcttggaaacaatctcatgtgcttcttggaattttacttcaaataaatctctgacttttgttgacttcttgtttaattacattaacatacgatctatgtgtaaacaatgtgattataatacattttgtaaaattcgacaaaacccaaaaaaaagtgtggaaacatttatggtgtacgtaacgtagtaatataaatatgaaagccctagggtaatggcttacgtaccttgaaaccaattatttatagaattaaagtaattataaagtagtggcaataaatgaagccacatggatatagtggtcgaatatttctataaacaaatcatagtattatatataccattatgtgaaatatatatacaaaatatgtacgtaaatgtaaaatctgtttttgaattcgagtctacggtataaaatgatgattacgtttttgcaaatattgttttttagttgttgattgtggattaggtatatttatataatgtgatcttctgtattttttctgtatgttacgtattttactatttttgtaaaagaatgaatatacattatacgtaacatttattcaagtggggtttaaaccagtcatatttatatatgcataggtaatgtatgtggcaaaacgtgaggttggccccggaatcagttgaggcccaactgcatcgacgcacggctttttaattgtgatgccgtattttccgtgttcttatacggacggacgaacactctcgtacacaaatagaatcgtttcacaaataaaatatcatacactttgttagcaattaattatagaatcgtttaaactataagaattagtgtgtacttgtgttgtcactaaaagatggaagaagaaagggaatgaaattcccgttatcaaatatttgtaatcatttatctttgttctatttctacataaacacaataatttcaaaattatgtataaaatatgaattggattggatcggagggttttggttcatgtgggatttctgattagagacacaactcgcaaattgaccaaagaaaaatgcatgaggtgcccatgtgcggtccacgtgcatttgctatctttttggcttatatacaaaatttaattattaactcgactaacagtgagtgaataaacaatgctgcatttctctgtttgaagaaaaaaaaacaatgtagcatttttctgacaaaaaagtaataatgtgagttttatattggtgcttcttatttttcgtaagtagatttttttttttctgtaagtagaattttcttaaaattgagtataaatgcttctttttaaaaaaaattcaacgcgagtgtaaatgcattttaagagaacgaatttgatgagctttttgaaagaaagctgatataatttaaataaatgacattcttacaatagtaaaactcttaacagttatttttgtttacgtcaaccaaattaagtaaaaagttgacaaacaagttttaagtaagatgagttctcaaagaaatatctaattaatgacgtctataaattctccaacaatcatttaatatataattgcaaatcatcgtaatataatcacttttagttaataagttagctattagtta

SEQ ID NO: 62548 - DNA, 1080 bp, Arabidopsis thaliana landsberg
caacctggagtaaaggaagaactcttatcagaatcaagttctttcaactttgtcaaacttggaagatggtaggataatgtcttcttttcagattgttctctgctcatgaaaagtctgagcacagaagtgtgaaataaattcatgtagaccacatcgattgcttagaccttgtagtcaactcctagttatgatttatgatgcagacaaggaaatttcacttctacacacaaaggttgaccttcttataactcttggtggggatggcacagtgctatgggtaagtaaatcttggatttctatgactcaggttttatatcatcttccatcttttgctttttatattaccaccgatacaatttaacatgaagtatcttaacggttacaggctgcatcgatgtttaaaggaccagtgcctccaattgttccattctccatgggatctcttggatttatgactccttttcgtatccttcatcttgtttatatcagttagttagttaagctgtattacacattatctgttacaaaaacttttctttaactccaatccagacagcgaacaataccgagattgtcttgaagcgattttgaagggtcctatcagtataacactacgacacaggttgcagtgtcacatcatcagagataaagcaacacatgaatatgaaccagaggagactatgcttgttctgaatgaagtcaccattgaccgtggaatatcttcttacctcacaaaccttgaatgctactgtgacaactcattcgtcacatgtgtgcaaggcgatggacttatactgtctacaacatctggtagcaccgcgtattcacttgctgctggagggtcaatggtccatcctcaggtaaatattccaaaatgatctttacatctgtagcaacaagcgaggctggttctttgattcacaattcaaatattagtaacaaagtcgaaaatgttaaagctccaaattcatatgccattgaagaatttgagagattgcacaatagctttggtgttatatacattatacaataacagataatggattatattgtaacttaatgttttgcaggttcctggga

SEQ ID NO: 62549 - DNA, 609 bp, Arabidopsis thaliana landsberg
atcatcgacgatgagacaggggacctctagatcgctccagccctgaattacggcttgatggatcgcccaggccagactgagcgtattggcaatggcgcgataaacggcacctgagcctttccggaaaatcattggcggacggagcatgcagacagcctagactaactacggggtcgcgagcaggtccatgcgcccgagagagccaggcgcaggggcgtcaaacgcgatctgacccaaccagatcctgctgagctttattgcacgatgacctcaactggacaaacctgttttgctcatgagtaccacgcagggatgtggtcatgattgagcataccgcacattattaaacgtgcccattaaattacatagagcgaggtacttgtacctaatcacaatacgttatactctgctagaacggagaattaaatcatgaaatgcctatttacagctactgatcgatatataaatggcgtgctattatgcttacccaaaggtcggaggttcgaatacctccaggcgcaccaaatcaagcactgagcgcccgatctgactcatactggatcgagcgtaatggctgaggttgcctactctatgcatactaaatgaccg

SEQ ID NO: 62550 - DNA, 1228 bp, Arabidopsis thaliana landsberg
atctccgagggcattactttgaatcatcaaggatctcacttgctgcagcgaagagcagcttcttcgtcaaacaccatgaacttaactaattcacccacacgtttggatccaaatcatccatttgagcagtcaccatacaagacccaacaagctttggatcttcagatgagtaagttctccagcaggaagagtctcaacgccgttgtgcctccaagtccttctaacccggttttaaggttaatgggaaaagacttgatggtcatgaaccaaggagaagcagatgaagaagcatcccggtcaagcttaacaccaaatcctcagtttgttgatcctccttgtggtggaactggcttatactttaacacaggtctctacttaagaaacagtttcgattcaacacatcaaccacaagttcaagcacaacaacaatcacaagctgcagcattcagaaacaattttgatcatgtaagatacttttctccgagctagtcatcaccgcaaagtaaagtttcaaccttgatgcagtgtaagaagcaaccaagaagtgggttctcttcgaaaaccgatcatcgaacatgggtgcattggtgtttttaaggtagattccaaatgttctacaacattttctatgcttcatctctttctgcagagactgtgtagtagtttactgtttacaaaaaaaaaagcaaacacttgaaaataacactctgtagaaggataagtaacttcagacttttaatgccaactaaagttataaacttatagtttatctttaacttttggctattgtcaatgttttatatggtaagaaagtccttttcttccattaattgcagaagactcaatcctaaaaagcaagagagatgagtaactttaggcttttatccccaccaaaaggtcaaaagttagggtaaaatcttgaaccttagaccaatatggtttaactcgattaaaatatccacaaactaatttaaaaatagaattggttagcttaatccaattacaatttgaaaggtttagggtttattggtgtttacattttaatttgttagatcaattaagcttctaaagtaacataatttattatgtgttgaaatttgattggttggtgaaaagaataatgtggtggttgacttaaaaagtcgttagaaacacctttctttaattagccagccccagctatatgcacggggttgtatttcgggtcgggtcaaaccggtcaacaaag

SEQ ID NO: 62551 - DNA, 1454 bp, Arabidopsis thaliana landsberg
aaaccgatctaatctaaaaagcaaaaaactttcaagagatagaatataaaccaggtggatcaaaatcttaagtatgtttttggatctcaggtcttggagaggttagcaaaagcttaacaaacgatggaaaacggattacaaaaaataaaccgtaaaaacttaaaagagagagattgagagttactataccttctagggtttgaatttcttgagctctaatggacatttttctcttcgtctttttttttctcaaagctctcagatgtttttgaagatctcaagactaaatacaatttggtttatatgtatagacaaaatgatgaccacctgtagtttaatgccaactaatcactgtgtcatagtttttaattaattcgaaatactatattgcctaccatcctgacaattctgagtggcttgaccaattttatattcgaaatggtttaataacaatatttgttcgtactcctaagattggtgtaattaatatcaccgaaagttaaaataaaatcctcttttacgttaagaaaatgagttaaagaagattaatagtttcaaagatgattttcaaatctattttgtttgttcgtattatataatttctttctcgtgttaccttttatgagtggagatgcattgtatttagcatatttttatttttttggcggccattgtacttaagcatataaatttaaataatcaacgcttacatattacaacattgctagcagcatattcaattgttgttggttttttctactgttaatgtaaagcagccaattatacagttttttggtttgactttaactttatctgagaaaacaaaactgtatcgttattgtcggatttcacatgacggattcgataattttcaacttagacatgaagatttactagtcatgaatctcattatttacaaccattagatttaagttcggtctctctcttaatgtttgagttagaccagccaaagattggtgataaatacatgatctttaaatatgtttggtgattaacatcataaattgttagtatggcttttgaaagattcaatttcgtcgaggttttttggaatcgtttcatggtatttgggaggttttagtatggcttttggaggataagaagttggtttgtccatgctactgatcgagaatgttggtagaaaacatcattgcttgccgcttttagctcgtgttgctccactccttcttaggttggggctcacgttgaagggacttccgcttcgttttataatcattttaaagtttctttttctcttataactcttgtttcttgccatgttttgcttagatgaatttttttatcgcgttcatttcatagctttgtctaaagcttcaccgcttaaagatgtagtgatgatctaattctcgattgtctatgcttgcatatttcttacctttatgggcatgagacaatgtatctaggatcttact

SEQ ID NO: 62552 - DNA, 1818 bp, Arabidopsis thaliana landsberg
aaaatcatcggtatcgccttgaacttttataacattttgtattaagaattagtctttgatcaaaatatagaaggcatgtaaaggaaatgaagaaacttgtagttatggattgcggtatgtttgctatgaagcaggcaaatgatgggagaacagctaaatggtttaagtgttaacgagctaaacagtcttgagaatcaaattgagataagtttgcgtggaattcgtatgagaaaggtacataaatacatatactctaccttctattatatgctttggagtgtattactcaaaagattgactatagaacacaacggaaatcaatagaacgattgcttttccggattcacaggaacaactgttgactcaagaaatccaagaactaagccaaaaggtcactatgatgagatatatatatacacacactgacacacacaaatatcccctaccaaaagttacaattctaattttggaatttttgttgttcgtggtgcagaggaatcttattcatcaggaagacctcgatttttctaggaaagtacaacggattcatctagaaaatgtggagctctacaagaaggtaacatatcatgttttacaaaaactccattttctttggagtaagagcttcgaagtgatatggcttcgactttcaggcttatatggcaaacacaaacgggtttacacaccgtgaagtagctgttgcggatgatgaatcacacactcagattcggctgcaactaagccagcctgaacattccgattatgacactccaccaagagcaaacgaataacagagaggtaaacttttttaattgatcttgatgtttcacaaacatgcatgcaccatttaggcattttatatattttatgtaactcgttaaaaactttcacagattgaagttggaagataccatgatgttgaagaacactccaaaggccttggtttgaataaggttcttgaactggaaacctctatacaccaagccacgtacgataagcagcatggttcttctaacatagtcatattttcaatcctaaatataattaaagcatatataattaaaatccggtgttgttatactcatcttgagtattaatattgtacttgtttataaccatagattcgtcaattaatagagaaaaatcatatgaattattatcctcaaaactctctcaaatatcaatattcttagatcaataatttgtttaatatatataaccatgcacttggtaattctaaaatgttaaataaacattttctgttaagttttttgttttgttggttttattttgtaaattcaccataattctgttcatcttattcccccaaactaaccggtttggaaactatataaattaaattgatgtgtgataactgaatcggttatcgttgactgcactgaccagaaaccaataaaggttctgtcttaaagggaaacaaatcatcgtcgtcaccaaatcatcacaattctcaaaggttggtgtagacagggacctgagtagataacgtcacagaaccatcgcatataaaatagcaatctcaagagaatatagataaaaaaagagggaaaaaattcgaaaatttgctgcaaccaccaaaagctcagccaaaagcagaggccactattctctctaacaagataaaccccatgctgttatttttggtctctcttctctctcgatcatgtttcaaatctgtttctagggtttcacaaaccagagatagacacaggtttagcgaaaaatggcgatggccatggctctacgaaggctttcttcttcagttgacaaacccacacgtcctcgtactcgatccac

SEQ ID NO: 62553 - DNA, 1542 bp, Arabidopsis thaliana landsberg
aaataaaaacgccatagactcaaaacaaaacaaaaaccaaagtcacatgttgcacgattatgtcccaaatgatgacattgtgagcaagcttgttgttttcgtgcctttttcttcgtcatgcgttctccaaaaccttgatatcttcttttttaggtcttcctagtcttttgttggacctctagatgaagacaagtctgaccaataacatcagaaggtatcttgctcaaatctgaaagttcatctatacgctttatactctcaggatatgcaacatacatgtgagactttgtatagtaatgatgcactaataacccatcatctatgtcttgactcattacagccttagcaacatgcttgcgagggatcttctcaatatcaaacacatgacacgtacaagtcatccgttgtaaatcaaccacaaaattttgtgacccatcagttacttggaactcatgcagatttataggctgcacctcaaaattatatgacacatcacatcttttatagagctctttttcaactctaggggtgagagatgtacaaaattttgcaacgctttctcgacgataaaaaaactattgtgtatgtgtattccttattacctcaagcaatgatagaatgggtagctcacgaggtttttttaacacattatttagtgattctgctgaattacttttagtagtgtcatatttgtctccggaaaaataagcacgtgaccacagtcgaacatttgcttctaccaaatatacgcccaacttgtaattttcacgccgtatctcaccaaaaatcccatcaaattcatttgaagtgtatgcttttgatgctgtctgtacgagtttagcaatcttacttcctcccgacttagtgatgacattctttttgagatgataagtgcatattcctcgatgagccattggatacacgtttgaaatggctttttgaattgatgattgtttgtctgatatcattactaatctaggattatttgatacaacaaatttcaacttgatgaaaaactgatcccatgatgcatcattctccgaatctactattccaaatgcaagaggataactatgagagtcgccatgctgagccgttgcaatcagcaaaacgccaccatattttcctttcaagaaggtccatcaactactacaactttcctcatgaattcataccctttggcataagtagcaaatgataagataaagtacctaaacctctagtgattatcaatctcaaaatatgttatggtacccggattagcctgtttaatcttggcaatgaatacttgcatttgagcatagtttctttttggagaacccaatacctcatcacgagcatcttctctatatttccatgtcttccagtattttgaatcaataccatatcgtttcttcaaaattgtcaagatcaaatttggtttcatactaagaccgatatttctaaaattatccaaaataagcttactcggtactttggaagaagcttttggtggaccaatgattctactgagacatgtatggttggtgatatactttgtta

SEQ ID NO: 62554 - DNA, 1695 bp, Arabidopsis thaliana landsberg
tgggagaacctttagcatttacttgggcttcaacacatctggggcatcttaaacggcccagccgatgaaccaagcccaagaaaatgttcttgaatcttccggagagttccttttgcgacaactctcagctccaaggctccaatagtcttgcatttccgggaactaacgtaacccgcatcgatgaatgctcggtctaaacagttgcagcaatcttgaagaacgtcttcgtttgtttctcctgaaatctcccagaagatagcgtaatgtcctggatctgtcgagacatcgatgtagctagagaagtctatgacctcgatcttttcttctgagagtctctttgcagccgattctactgaaagctgaaggtctctttcggtgttcttgtcgatgttgatcgagagaatcaggtttctcctgcatatgaattttagttggggagtgttgttgtagaaaccaatgacctttaccacatctccaagccggtatcgatacaaccctgtgcaatgtggatcaaatgagaattataagcatccattacgagaccgatactacgctaattccagccttaaaacaacggtaatacctgcgtaatttgtgatgacaacttcatactcttctccaatcttgacttgagttaaaccaaccggtttctcctctccttcccctgtttcagatacagggagaaactcgaaataaccgagattcggaatcacagcaaatgtagcttcctctggagataaccttggggtaacattagcagcaatccatccttccgagctaccgtagtcatggctcacaagaggtagatcacccgcgtaatgtctcagctttggcacatacggctccatggagccagtcatgatcccgtaaacatactttgcgttggggaagagcgcgggaatcaatccgtaccagttgctcaaactcatacatttggtgcggatcgtctcagctagctcagggttaggtgtgagcagcttcgacattgcagtacggaccgatgggacagtaatacggttgcttaagacaccatctttgatatcggtaacaatctcttcccaaacctgttcaaaggttctaaaagcgtgaattaggccgtgagcaaagacggcaaagacgtattgaacttgatctctgaagagaattccggataagagatggcaatacaaggcttgatggacatcaggactaaagataacttcgtcgggactacaggaaggagacgttatagatttcatcccagctttgaagttagggttgcggtacacgtttgtggttgcggttccaaccgggacacctcccgttgatatgtactgcttgctgctgaagataaattgcaaagctttgccagtgtcatcaatgggaaaatctctgtacaagaagaaaaacatcacatgttaaggcatagtcggtggtaagtaacaacatcactagtttctctgttcatgtcaatggatggaacagagaaaagtgtgaaatgtgtgtgggggaaacataaacacaaatttaaactatacctgtttctgaaggcaaaagcagtgcgaaacagttgcaatgtgtactccattaattcatcagtgaaaggaataaactttggacggccttgactagttccagagctgatgatcaaaaacacacacactgagaaacagaatcatcaatgataaagcaaacagaggaagcaaccttacaatt

SEQ ID NO: 62555 - DNA, 887 bp, Arabidopsis thaliana landsberg
aacgttataagtgaaagcattcggcttacatttcttctcatacatatcgtcccataatctaccagcctctgtcaactctcccttctcgcacattccagcaatcaacgtgttatacgtcaagagactagggatcgagcctttctcaaactcatcaaacaatttcctcgcttcagtaactctcccttctttacaaagccaatggatgagagtgctcagaagggcattatcaggcatacaattgttcttcaacatttttctccacagaccacatgcttcatctaccttatggtcttcacacaacgcatcaataactttacaacaaagagaagaatctggcataaaacttctctcaagcatttcatcgaacatgttacgtgcttccccagatttcttctccttacataaagctcttatcataacaccataagttacttcattaggctcaatctcattcttttccatatcatccatcaccgtagctgcctcagagaatctccctaacttacagtaaccatccatgagaacagtgtaagtcgtcgcatccggataccacccacgatccaacatctcttccaaaaccctcttagccgattccatatcacctctagcaacatacccacctagaatcgtagtgtaagtcaccaaatttggcactaatcccatcgaaggaatttcgtcgagcactttatatgcactttcaatatcatttttcttgcagagagctttgactagtagattacaagtgaagatgttcggcgtaattccaaaagactccttactgttcttaaacatggcatgaaccaaatcaaatctctgattctggattaaaacgtttaagagtgtgtttaacgatctaacgagcgtttaacaccgaaatcagggattcg

SEQ ID NO: 62556 - DNA, 349 bp, Arabidopsis thaliana landsberg
  unsure (1)..(349): unsure at all n locations
catctcagggagcacacttttatacatccctcccatgacttggttttcatccaatgaggctgcacagttcaatgggaggattttgagcataacatagattgtggctgaaaagaatcatatccatctacggtaannnnnnnnnnnnnnnnnnnnnntgtggtgacacactgacggacattgacacaacaagttgagctgtgactttttggatgaggatctacctacacattgatttatgctgaggatgaaaagcacctgtacatctcctagtgcatcgtgctacacttcacgggtctaaccctaagtttcggcttatacgtttactgaaattagtctatctaacaaagct

SEQ ID NO: 62557 - DNA, 546 bp, Arabidopsis thaliana landsberg
atatcgccagctagagaaaccaagcgttggttggtgctttgaactatgtctcttgctctctctttcacccattcaggcggtgaattgtagagctactaaaaacgtttttcgagtctcctagagtggcgcattgaacattagaaaataatggtgcttatgagtcaaaagaaggcgtagaagcctacgaaccgtaaggatcggggtgtgaccatgtgtaattctcaaactaatatatacctaacaatcaataaccgtcatcatcagtaaaatatgttttctaatgttaatttatctattatctacatatagctgcagatttgaaatatactaatcaaaattaaataaacaattaggaaataataggaaaaatatgtggttcatcaaaagtttctattttacttttagtttctaactaatttataggcatttttcatggatgacgtttatatttttagacaaagcaattctttatacagcaattatatgatgcgtactatatattgctaaaaaaaaagttacaataaatgaaaatggctaaatctgcaa

SEQ ID NO: 62558 - DNA, 108 bp, Arabidopsis thaliana landsberg
gtttgtcaacaaaagaatgcttataatctctataccctcatacgtacatgagtgggtagattctgtattcctattcagaaatatatttgtgggtgttttataggcatg

SEQ ID NO: 62559 - DNA, 265 bp, Arabidopsis thaliana landsberg
ccgccaccagaaccccgcaaacccccaagggaggaagaaacaaccaccacaagaacgggaacagcgccagaagccaacacaaaaagcaagcgggcgacaaccaagaaacacagcaggcaaaaagccaacaaaaaaacagaggaaaccccacagaggggcgggcaacaaaaaagaaaacaccaaacgaacacacacagcaacccagaaacagcaaacaagaaaagaaccagacaaacaagaaaaaacacacccggaaacacaagca

SEQ ID NO: 62560 - DNA, 374 bp, Arabidopsis thaliana landsberg
  unsure (1)..(374): unsure at all n locations
tgnnnnnnnnnnnnnnnnnncactcgggaggcactctgttaaaatgcgtacagaaaatgttttcaggacgtgttctgttgcagagtatattgcgaatgagtcatagatgcactgaattgggttccgcggaaaaaacatgattggtgtttggtggatggtcctcaatcacacaagcatagggaaggagaatgatatgttgcgaatactaattggtgcgatggtcacaatataaacgtgaacccagggcattgctgcaccacgcgctatttgagaatagggttcgttctaagccatcccattgatcatgctatattcaagtattgggacaaaaacatttggccactcagactgcgctgctactgatgggagcatct

SEQ ID NO: 62561 - DNA, 1429 bp, Arabidopsis thaliana landsberg
caaataatgctttttttcctaagagttaggtgtatgatatttgcttttggtccttattctccattgcggcccaggtccgatgtgcccatacatatgtatgtacatgtatacacatatacaaggacacacctaacctttaattgtctacgtcaatgtgtgtaggcatgtcataagttacattttttttgtctaaatgtaacgtatactccttccgtttcaaattagttgtcgtttagaagttaaattgtgtttcaaattagttctcgttttgatgtttttgacgaattttttaatttattcttgttcttttaacatattgattgattatatcaaataaaacaacacaataattagtgataaaacagaaaaagataaatgttcttttaacctccttccccttgttgcaaacccaaaaaaatgaccaagaagaactcaagtcaataacgagccgcaccaaactccacctcatccacgttgtttttagagacttttgaccctcgaatttcacctacgaccaaattaatagaaaaccagttgtcttttcactttaacaaatcatatagaccacaacctccatatatataaatttgaaggacaaagattgttaattaccacatggtcacgatgctaccaatagttcactatacattagttaatgacttgcatgcattgccatatagatatatgcaaaacaaggcaaaatgctaagaaaacaacagctttaagaaccacggcaaaagacgaggctacacaaaacaaatctctcacagttgttgaggaaaaacaccaatgatgagatttgatgttttggcctctcaatgaacgtaccatcattttatcatttcactttttatttaatctttgctaatttcaattgtcactcatggcaatgtatatcacatctaaacacaaaatgaagataaatgatcgatgtcggtaataatacgttctaagaatgacaacatcatactgtttttactttttttactttgaaatttatgaattgttgagcaagtccatatatctttcaacgatctggtcaggtgtatagtccgtataatacccttttcccacaagcagaccttcctctctgccaagcctctcgatcagtccctgtacttcatctccccccacttggcttggattcaacaagttacaggcaacctctatgactccttccccgtgcaccagcgccattgtctgcactgaagccaagccccctcctctctcgctcgtcttcctcgctattctcctcactgccttgagatcgtttgacatgacaggcacgttatagttacttacccacccacacgccccaaccgctacaacccctttggctttgctcacctcttgtggccatgcgtctggcttcagtggcaccatctccaggtcaaacccacctgcccattcatgtccctacctgtttgcc

SEQ ID NO: 62562 - DNA, 1874 bp, Arabidopsis thaliana landsberg
ggacacggaatgctggcctatattacctcagggcattttttttacatcaaaggattcacgtgactgttcaaggattgggctcattgatgccatttttgtataaattttaattatataaaactagatattgctttataacaacaatcaatattttaaaaaacggggttatacatgaaatgggctggcccaacgttgaatctgtcgaaaactttacctagatttttctttctgaagtccatggaaccaacttactaacaacataaatgaaacaaacttttattttgtcaactcataaactacttaatctatactttattcatttgcctttccaatacagtaccataataggataaacacaccattggataccatgtatttgaggcatgttcctagaatctcttcaaagttgattctttttcttcactttatccactttccttttgaaatctcaagaatctaaacttttcattttattatcaaaattaaaacaaataagctgagtttttatttagcataattgtgtttccccatcaaattatcaacaaattttgttaaccccagagcccagaggattcataatcagggcaaggaaaagcataaaagggcggggaaaagctacaaatttactaaatagtaaagcccaacttcaaagggtctttggtgagcctagcccaattgatacagttgacctgttcagtataacgatttgatctcggttactctctcattaccattacggcattactcattaggcttttgaatttatttattcattaaggagtcaacttgtaaactcgtgaagaattaaaacaaaaaaactcacgtactattgaccagtcactgacgtggattgataatccaattgtcaactaaaattcagtattccaataatgcaacataacaaccagtctgacagtataccggattataccgaatttgtgttagatcggattggtgggaccataacaacccataactcgcacgtgctggccagctaatatttttaccacattttctttaagaaactttaaaaggcaatctaaaaattgaaaagaaaaagatgaaaaaaagagagagaggaagaagatacgatcacatggccaatgagtaaagtcatggcctaaactagagctcttggtggttggttacttagagaggcactggatctttgtcatcagaagtcagaatatgtaaattttgatgtttaatgcactggtagggttatgaagacttttataaactacgttgtatcgaccatcgtaagttgtattgcatcataaaccaaagttttactagaaacaaatacacaaacagaaggagaacaaatgttggattttgaagccaacaataatacaatattagttctcgtttaatttgggtgtatttactagtttcactgggtctgttgtctgtcggtttcgtataacctttttctggaaataatttttttgaaagaaggaaaacttttgttttatgaataaagtttagaacaggaaaataaataatattttaaagcgatgtacaatatatccaatccaagttaacgacagtcacatcaaatgtcaaaaaataaaccactatggttaactgatttaattgaataattttccaatgaaaaatgacgtggatgtaatcatatttcgtttgattaacagataatcgaaccgacaaaatagtgttaagtgagctcaactaatttaccctgtacttcctgacacagtaattgaagctagaattttttttttcactgaagctcagtttcatgtaattaattatgttaatgtcaatcttgtggatatatatattgaagatgatatgagagcaataccattctacgacacgagtagttataatgtcctaattattgaaagatt

SEQ ID NO: 62563 - DNA, 547 bp, Arabidopsis thaliana landsberg
  unsure (1)..(547): unsure at all n locations
ttgataagaagaggatacttcttgctcatagttactttagttaccataacttcccccaacatactcgggctgaggcgtcgaagctaaattgttcaacgaaggggtattcataagcttatgagtcagctcaggatggtacatcacttggctgcggtcatatgttnnnnnnnnnnnnnnnnnnnnnnttggacagaccgcagacggttgaagttcaacaccatggtaaggtaactttgcacatggtgggaacaaagcatcataggatgaccctgatgcatacgggttgtgcatatttctgtcacccacttcatctgagaagtgaggaaactgattgttctgcatcagaaaacccgtgcaaacgtaaaaaaggaaacgcaaagagaaaaacatgttgtacacgtcaaactgcaagctgcttgaatatttctactaccgatttgtcgccttcgtaagcttccagctgctcagttactactacactaaagtgacagtcggaaccaaatgctatatcaagttatggccatcatactaaagatatcacgagttt

SEQ ID NO: 62564 - DNA, 642 bp, Arabidopsis thaliana landsberg
tatataaatttatgtatctgaatctttatgattatgagaaactttcactattaattccaattctgtgtaaccatcttcttgacattttaaacttttagtggtacatcgtaagaaaaaatggaaataacttaatacacgcgttggccgttgatcatataagacttatacgcatttgttactgtacttaccataccttcttttgttatttttattcagcagatctgatatatcttaagttgagcaatgttttgtgaaaatgttacctgtataattttagagaaaattaaaaattataatatagatattaattatttttgtctgtaagaaagttatgactctttaaaactatatagaatttataaatgttttaaaatatattaccaaaatttacaaggagttgttattgtgagaaatatgaatagttgtaagtgttgtagacttctcacagctcatatattacatgcatttggatgttgaaagaactgacggctgatatttgaaatgaacaacagactctaatctgtgagttttattttgacacgcatggaaaaaaattcttgtgacgatgatatggtgcatatttttcattatatatacacgttttatagattagaacatggaaaatccttgtgaggttttata

SEQ ID NO: 62565 - DNA, 270 bp, Arabidopsis thaliana landsberg
ttggtgcactgaatccaccagcccgatttcggtgcgcttgtgcatttttgtcggtctagcgatctaccattgtctcagctagcttttctatacagaagcccatcactatgcccatgttgcgctcttgtcgtttttcgaggtctccctgggttacagatcgtgaccccgagcagcaagtataattcgggcgggtggttcttattgagcgtgattgtggcgaagggtaacgagatgcatgtgtggggggctacgacttcagatgtgaacacc

SEQ ID NO: 62566 - DNA, 426 bp, Arabidopsis thaliana landsberg
ttgtgaacttggaagtttctggacctgccattgatgaggttcataacttgttggttgtcaccttaaaaaacgacatgcttatatcctcggctccatgcgtgttgcattgccataagtaatgcctgcagttctgcttctaaagtatttgcgactcagtgacctttactttgtgtggcttccttgtaaaatccaccactgtctctcatgatccatccagctcgaacctcagtgctttgatgattgtagctacaatcatagttacatttatggtagccatgttttggagccttccatccatgatctgtagtagttgacctcgctctagcgtgtgtataggggttgtttccttgctctgaccattcatatgcatgaggtatcgcctgtagagcatcttttctccaatctctacttttgtgtggatagata

SEQ ID NO: 62567 - DNA, 705 bp, Arabidopsis thaliana landsberg
tcgccgatgtggtacccacctttttgttcgaaaagaacagtgtgcacaggtatgagtcggctattttggtgctggtgaagagcggaagctctagaaagtgtataaagcccagattgacacttggcgtattggttgttggattgctgaaagctcatcgggttaacatgacaagaacaaaatttggtggtggtaataaccagctttgatttggtttaatccggttaaaagagaaccaaaataaaatttttaaattaaaataaataattaatttaaaaagttaaagataaaattgaaatttttaattattcataaaatcatgtataaaaataacaacatataaaattttagatattaattcgtatgttttaattagtatatgtatttttttgactaaaaaaatttggatattaaacttctaaataaaaaatagtttgaattttttttagaatttttcctataacattaatcttgtagaattcacaaaaattttgtagagcccagtgccttaggagtatcttatggtgggaatgtccacaacgtattttattgtttttggtttttggaggcttaacctatttatttttttaacttccaaaaatttctacttgaggacaccttgtccgaaacccgaagttttttttttccccaacccccgaaaaaaatttcccaaccttctcaaaacctaacccccccccccaataaacc

SEQ ID NO: 62568 - DNA, 419 bp, Arabidopsis thaliana landsberg
ccatttaattcgtattgcatataaagctggcattggtaaaaccaattactggaatggaatccttagaatttaaagtatctaataaattaaccttatttaatagtgcaaccatagaatcaaatcttccagaattagcttgtgtcagatcatcttttatcgttccatcaaaaaaagcgtctttattggtataattatagtaatcaccgcgatcctttgaacaactaattgataaaatcacaaaggaaattgcaagcagtaataaacttctgtattccaatctgagtatcattattttaaatatttatttttttgatgaccaatgaggattttgcgtcaacaaaggattagcctataacgccttatttgaaattggccaatagatcccaccttcatcaattaatttattgcaatctgggtca

SEQ ID NO: 62569 - DNA, 502 bp, Arabidopsis thaliana landsberg
ccgataccaaatggatggacgaatacggtgatatatatatccattatgtgcagcctgtcaaccttattccagttggcaaggtgcgcgaggcaagaccagtagataaggtattgaatattgtttttcccttaggttgttttgctgttttaattctttgcattattgccatgatcaaagggtttatagtattatttagttaagtatttgatccgtattcatcagtctttttccgtatcatccttgttccattagaaccacaaaatgaaaacaatttcacccctgctcctcgtcttactgctttgcgcctgtggcaacaaaaaacagaaagaagctttagatatctccgatgcagagagcaatattgaatcattacctcacgatacactggctgcatgggatcaaccttcggatttcaattttcgaatgatcaattactctaatatgccaattggagatccctgtgtcgacagcttacattttgtgctgtggaaagaccctaatc

SEQ ID NO: 62570 - DNA, 1044 bp, Arabidopsis thaliana landsberg
gcttctgaatcttaattatcgtttatttgcttaaagttcagtttttaacttttttcctcgtttcaggactagaggatgtttttgttggttatctatttgggaggaagaaggcaacgaaagtagctcatgtgtgagtactttcaacccaaactttaaattaataacaaaaaaaatgacttcttatacgtcttcacatttaaagcttttagactttatgtatctcaatagcttaaccttggagcttactatctcttgattaaagaaaattgaagctttggatcttagtgttatggagaatgttgatgctttaaagctacataaaaacttgcttacgacatcactgctgattatcctttcagtgtgtgggagcaggtaatccaaaagggggatacggtcattgatgctacctgtggaaacgggaacgatactttagcaatgttgaagatggttatgcatgattctgttggttgtggtggttatgtctatgctatggacattcaaaaagatgccattgaaagcacttcatctttgctcgatcaagccgttggttcaaaagaggttagatgattaccagagcttgcttcctatagcagtgtggttcttactaatatcgagccttgttccatttctgctgaagaaatacagaaggaatgcgtcaaactttttaacctctgtcatagtaaaatgggagagattgtccctgaaaacgcccgagtgaggtacagtgtaaattcattgactcgatgccacattgttgatgaacccctggcaaaaatttcctcactttgcacactgctttaggttttcgctaatcttcatatgatgatctcaggatggttgcattcaatctggggtatcttccaggaggcaacaagtcgataatcactctctcggatacaacattatcggcattgaaagctgctgagagaatcttaaagcccggtggtctcatcagtttggtggtttacattggccatcctggtggaaggtaataaagaaatgatagcaaaaattctctaattatctaatcagatatgaactttc

SEQ ID NO: 62571 - DNA, 411 bp, Arabidopsis thaliana landsberg
  unsure (1)..(411): unsure at all n locations
ccggaggccgcagcatgcggtgcaggctcttgctgggccgctcggtggccgaggccagcccctcgaaactgacggtggcgttgaccaggtcgcgcaggatcacccgcgccgtcgccggatcgccgttgagaaacagcgaggccgcctcgtccagcaatgcgcgggcaaacgccggctcgcgctgcacgcgctccaccacggtctgcttgaaatctctgctcagtgccatctcatcacctcgccctgaccttgcgggccttgcgcgcccggtactcgtcccacaactgctannnnnnnnnnnnnnnnnnnnnnnnnnnnnnnnnnnnnnnnnnnnnnnnnnnnnnnntcagcctgtcgcctttccgcatcaggtagatgcggtaactcggcccccagtcgatgcggtattcg

SEQ ID NO: 62572 - DNA, 2008 bp, Arabidopsis thaliana landsberg
  unsure (1)..(2008): unsure at all n locations
ccaatgttagatttcagaataaaggattggggtcctgcaccgaggtgggttgcatttgtagatttcttcctcgcgtgccgtgctaaacatgcggtgatctccggtgctaacaggcgagttgggactacttatgctcagttggttgctgcattagccgcggcaaacagtctcagttaagatcgttttttagtttcctcaacacttatttttctttccttctgatctgtctcattaacagtactccttgactggttaattcacagaggatggttcgagcaactcaagctttgcgttcctgagtagtttccagagcaatttgttagcagatggtctgaagaaccaggtaggttggggacatgtctggaaccgatacgctggaccgttaagctgtccaaaacagccaaaccaatgcgccttcacgccgcttgcacctcctggttggtgggacggtatatggcaatcgcccatcccacgggacactcgtaggcttgcagctttcggcattgagctttccgggtttggtacggttaacgaagaccggttccacgcctattgtagcgccaagaaagagtacgtaagcactgtaacaatcatataatgacttcttgaaaaagattctggactcttggttataaatggactcactggttttattcttcaaatctccttccccttctttaattgaaccggccatatcaaactttttgttctaaataaccggacccaaaccgaattaagcaaaccgaacgcccaggcctacgagtaactggctggcctcttggttcaatatatggttttactactcccttcttaaattgaaccggctttcttaccaggtctaaataactaaacccaaaccgaactaactaattaaaccgaagtcaaatatatccagctataagtaagagaagacttttggtgtttattagaaacaaagtaagattaagagaggaataaagctggtgtcagacattaaagatggaacatcatctcgtggaatcaaacttttcctaatacaaaaattgattctcggttagtgaaacttcaatttactaccagattgttaatttcattattattattctcgtcgttagaaatatgctactaacattgcaagtaggttcaggtataggtgagagctagtttaagatggacaaaactaattatgtaagtagttcttgtaaaatatgcattttaaaggtaacaattgctattttggtgtaaacttttgtaatgaataaaagtaaataattgtgatggaaataaaatctgattacaaaaagatttgagaacgtcatgattcattcataatcatgtactgtctaccatactttttattctacgtactaccatacaatctccaaattttaagagtggtatggctccatgactcacatcacatgatttacattacatattgtactaatgtcagaaccttaaccgatcgtaaaagccgatcaacaacgttaaccatcattattgaccgttatctgtcgtcataaaatctcggccaaggcttctttaaagtcttggctaaatcaaaaacaacttttgaatttgaacctcatagtggagctagagaagaacacaaccaagaatcaaatgtgtatacgttcgtataattaatacttgttaatactgtttccctctcctctttctttagttttgttaattactagacttttatgcacaaaatgataagaatggagtcataaaatccatagaaaccataaaaaaaaagttccgataattatcattatcgtatattgaataatgtgaaatagaagttgaatgtgtttccaaatttggttcggaactgtcttatgtctcagacagagaatctttgataaaatcttttaacttacattgcatggatatattggcctaaatnttaccattatcagcgttccttttaattttgaggttaaacataaggaaaagcatcttgccgtttcatcgtctggtaaaaaatattgattttaaactgggatctttaatacttgtagct

SEQ ID NO: 62573 - DNA, 721 bp, Arabidopsis thaliana landsberg
ctctatgtggtcatcggtctactcggtctaggacttcttacgttcgcgtccaaggtgggacaggagcgtaagccaatcactggtgccgatgtcacggccgcgatcatcctcgtagggcttgaaatctccgccctggtctacgtgttgggacagctctgatgctcggtgtccattatcaaagccacacgctcaagtcctacaaggaccccgaagttgtggtcatgaaacagtacacgctcttcacaggggagcgcccagaccggggggctttcatggtcgaggtgaccacggacaagcgagacaaggcgtacggcatcgtggtccgagccttcaaccgcctctccttctcaatcggcttctacccggacggagttgtctgatgtccgcaacgatcacactctaccccgatggcgacaactggcgttggcgtatccaggtgccagatgccgtaacgggcctgacggttgaggtgcgtagcggctcggcctaccccgacaaggagcttgcccgtatcgacgcagagaccgccgtccaggatgctctagacgctgccgccaacaccgagcgctattagtaccccccggaaactccggtgcccaatgagccgcccgcctcttgacccccgttgggagtggatcaatgtccgtacgctcgaaaacccgtaccaggggtcaaaggccggtgcctgcacaatcgacccaactcccgtgcatagtttgct

SEQ ID NO: 62574 - DNA, 470 bp, Arabidopsis thaliana landsberg
ctctgtcttttcactgtgcaaaatgtgaaccatttcttcctctcactccatatctgatctcttttttttggtgtaaagattcttaaatctcattctttgtttaactgtagagtttctgaaaaatcggtgaaacaacagaggaagcaatatggcacttacttggactcataaagacaggggagaaattagggttcatgagaatttggaggaactaagcatagacttggttgattatatagctgagatatcagaagcatcaattaaagaacatggtgctttctgcattgtgttatcaggaggctctctcattagcttcatggggtaatttatttcacctaaaagtttttaagaatcccattttcagtctccttgatctatctcctcatggattacacattcaacagaaaattgatcgagccgccttacgacaagattgtagattgggcgaaatggtatgttttctgggcgga

SEQ ID NO: 62575 - DNA, 281 bp, Arabidopsis thaliana landsberg
aggcatacggggtggatatggcatctatggtttacacgattctatgaaaacggctagggagagaaagacatagcattacatctttatacattatttgcatgcttggagaccaattgttctcatgagagaggacatggttgtaatcgtctggtcttgatggtgcatacttttcaactatgttgtgagaacttaatgatctttatgaactgctacaatgtggaatgcttataatatgccagacaatgattaaacctccaaccttgacttcattttttaacctc

SEQ ID NO: 62576 - DNA, 1289 bp, Arabidopsis thaliana landsberg
aacccctcatccctcacttcttggcaatggacaagctctaagatcttttgtttcttagctgaacatagagcctccatcccggtgtcggtgaatacacacacatggtcacgagaaagctcgcgtactgggcatttctggatcagagtgattatcccctggagtgtgaaagagaagagggaagggaattcaccgtctgagaaagatatcttgaaagattcgagctttgagcagtgttgagctatggcgctgaggctttcatcgcttaatcttaacgtgatgttgtttaagagaggcagagtaaaatcggacgggacacggagcgagatgcttcttaggtgactagctttctgaaccaatgctatgatgtctgagtcgctgacaccggtacacatgtccagatgaagcttctccaggttcttgcaatttctcagcacacaagcgagccctctaccaggagctatgatgcagttaccgaggctgagctccaccagactgtcacagggaaccaactgtttgggccaccgttccacatctaactggtcgtaaaccttcatgtacctgtaattggcatctacctcaaactgcagacttgtcagctttcgccagctattcctcagcttgatcaaatcaccttccccaatggctctgcagttcttgatacagagttcttctaaagtctcaagctttccgaaatactccaaccactctacacttgcaacgtttaggcatcgaatgagatgaagtctcctgagtttcttgcatcctacagcaagtgacaacacaccacaaccagtgatcctgggagcgaaatttaacttcaacgaagaaagctctggacacgacgacaaatggcctatgccaacatcggtgatgaaggtgcagaagctcagagtgagatcagtgagagaatgacagtttgtggtcaggacaagaaggccttgatcgtcaacttgtttgccaagttttgacatccagcctgagtatataatctccactttggaaagatttggaaacctcctgcagagagaaagcaatgcatcggatgcagggactaaaccgcaaccaatccgcagagagtatctttgctcgttgtccagcgagaagaaacgtttgcatgagagtgaaagcgagtttctgtcatcggtagtatgaagcttactgagaatgtcccaaaccaaatggtctggcaattcatccatttgtctatctgtgtgaacaaaaaaggatcaaagcctaacatgtcaagtgaaaattccaccttgaaaacacaaaacagagctttgatggaa

SEQ ID NO: 62577 - DNA, 1126 bp, Arabidopsis thaliana landsberg
aagcccctggcctcgaatctcggtattaaggctttaaattcttttgattgatttttaagtttttgctttgttaattttggctgtttcacaaatagcgcaaaaggaaaaaaaagcaaaagaaaaaattctacccattcccaccaaaatttagccaatcagaataataatagctgaaaatatttttcaactcatttactcttaaaatagggaaaaagtcaaaaacaataaaacgaaacgtttcacctacttttaaaacatgagaaaaaaattcgcgctaactttacttttttacttgtcaactttttttaactctatatatctacacaccaatcacaaccttcatgttctactatttcacgtatcattgggaattatgatttgtgtttttttcatttttccccgtcatggctgatggctgaaaccaaaatgtactttaaaatcaatttttttagttttcaaggtttagtgtacctgaagtctaaagataaagcttccagtgtgatacatactccccattcatggtttgtaatctaatcatttagcttgaattgaaagtccctattaaaatgctcaagtccctcctagggggacttgaaccgtttcttgaccttgtatgttgaaaattcttcacgtcaagcattaatctttactcctttattcttggctttgcctttcaaaagcaatgttgcttacaagtaacaaaaacgcttttatcatggactttatatctaaatgttgccatttacatggctagcaaatgcttagcatgttgtcaaactcctccaataaaagttgtgtagtctatcatgaacatggagtcttcaacggtgtataatcaaattgtagtcgtctaatagaccgtttcaactaaccttccgaattcgatacttttatgaataagattattaacctcagaaaaacgattatgttcttagataaaaacatttacttgtcatgctctttgtgtttcacatctccaactcgttctctaacaattctaaatgaaaatggtgatttctttcaagtcaaaagaaaaccaagattggatcatggatctacaaataagattgatccaaatttaagtttaattggagtaaatccatattaaagtagcgaactcttaaaa

SEQ ID NO: 62578 - DNA, 534 bp, Arabidopsis thaliana landsberg
gaaaccttgataaatcagctagtgtgtgcgaagttcaagaaacgacaatggtttttattttatttggaaaccgacaataggttagtctcaaattcatcggggatattgatcaaattgcttgatataacaaaagaaaataaataaaagtattgatggatattatttgggtaaaacaatacgttaaagttccatgcacatactattcgagttttccactgatgagtaaaaatctaaggaaaaaaattataatatgatgtagaaatgaagaagatcaattgtggagaaaattaagtaaagacttcataacagagtatggacaagcatgaagggtgtggaaataaaccaaatggagcccaatttgaaacggactttacagagatgtggttgtaggagtaccgtcaatggtgttgtcttcaactttgggtctgccacaagtgcttacgtgagcccatctttatttttaattgtaatgacaaaagtattagttgactagctcattgatgacagtctcttttatcctaagtggatccattt

SEQ ID NO: 62579 - DNA, 537 bp, Arabidopsis thaliana landsberg
acacacaataatataatatactttcgaatatcaacctgaatcagtttacaaatgatcaaacttcgtaatatgtctatataaaatctaatgtaaatatagagtctcattaatatcataaataagaaattgtataaactttcagaaatataactaaataaaatggttggtatttcgtataatcattgatactatggctgcaaatcagcaaatgtgaaatttgtgactgcaaacaaaagttgattatatattggacgtgatgacttttaaaaatttatgtattacctaaaactctcttcctcattactctcatattctattaaacctactcaattgatttttttattaatatccaaagaaatcaacaactcatataaaccaactataccagattcgtattcatcgtgacattgtaaaacagcttttgtttttgtttttgtttttgttttgtgggaaaggtatatgaaattaatctaccggacaaagcgtgagagaccgatcaatgtgtctttgtttgtcctttttttcactagcaaccca

SEQ ID NO: 62580 - DNA, 132 bp, Arabidopsis thaliana landsberg
taatgtttgtaagtagaaaaaatttacttaagaaaataaagtaaacaataaccgataacatcaaatggccttggctttccttaagccgggaaaccccctccccccagaggcactcaaaacacaatgagaaag

SEQ ID NO: 62581 - DNA, 573 bp, Arabidopsis thaliana landsberg
cgattcatatacataattatcataacaacaaaaatagcattatctttaaaacacacgcgacaagattacacattaaagtacaataaaaatggaaaaataaattccacaacttcatgatcacgtaagttccacaaaatcacgatcacagaaactctgcaaattcacgatcacgtaaaaggaaataaaaaagtacatgaaagttgcaaaaatacacttttcaacttcacgaacacattgaatgtgcttaggcatgaccaaaaaatttaactgtaaccgtatttcggcttgtaatcgaagtgtctttaaatcataagtggtttgtaaccgtatcaagcgtataaaaacctgaaacgttaaccataaaaatattagctatggttaaaaaatacagttagtgtaagtgtgtacaatgcaaagacaatgatcgaatgttccgataaagatttttttttttaatgataccgcatgtgaaaaaatgtatgttaaagaaaaatattgtcttaaacaaatatgttgtaatgccatattgcgaaataaagaaatattgatctacaatatttttttccatcttat

SEQ ID NO: 62582 - DNA, 586 bp, Arabidopsis thaliana landsberg
aaatacatttgtttaaaaagtctagtcaaaactgtaagcggtgtaactatctggttgctttaaccgaaaattattacaaattcgaaatagacagaatagtagtcttttatggagaagtccaatctgaagtactttggtgcgtttatactggaacctgccggactaaccgatatagtttatcaaaaagaaaaaaaaaacaatagaaccggagttaagagttctataaaaagcaaagttagacttgcgaggaagtagtttcttcattcttggaaccacaacattagaatagcaaaataattatgatccatgtttaatttttgaaatatggaagctaattacatgtatttttttaaatcttttttctcttcaggatcattaaattaatacactaaaatttctatggcagtatcttagaattagggaaggtcatgtcttgcggacaaatcttacaaataaccctatcgaacaattctgaaaagattcttaactaggaactaggaagcattttcttctgaaatccggttgtttatttcgatcacgccataaaacctaaatgattgcatgagccacaacaaaacagagagtc

SEQ ID NO: 62583 - DNA, 670 bp, Arabidopsis thaliana landsberg
gcggggattgatgaccgacatggcgttcagggcctggaccacgtccgggcagttctggcacgacagttagaaataggtctcgaaatgatattcgccgggcaaggcgcggatctgctcgatcacggcatcgtccagcttggccgggtggccgcccacctgcagcagcgccagcaccagcgaggtgaattcgtggcccagcggaaggccggcgaaacgcacgccgatctcggtgccggtccgggcgatctcgaacgaaggcacccggccgtcggccgcctcggcctcgacgaccgacagccggtcggacaggccgccgatttcttccagaaagacgcgcatttcctccgcctgggtgctgccatccagggaggcgcgcaactcgacgggttgcgtgacccgttcgagataggttcctaattgtcctttgaggtttgcatccagcattgttcacacctttttggaaaaagcttcccctgggcataccgccatggcatcgcccgatcgaaagcacggggagaaagaacagcggcccgcccgctggcgggccgctgcgtcatcacggggcgcgcatcctgcggcgcgccgtttccggtgacgaccggggatcagatcttgcccgccagatccagggagggggccagcgccttggcgccttcttcccacttggccg

SEQ ID NO: 62584 - DNA, 2360 bp, Arabidopsis thaliana landsberg
gatactaagagaaaggaaagcatttttatcaaatttaagcccgagtacgacatttacgcttatggaataaatgattcgagatttgaaaatgtaaagaggctatagagaaagtgagattgtatttgcggtcccctcaagtaaggccaatgaaagtgaagaaactgtctcataagatagctttgtcgtcgtttacaaatatcaaagtgtttgtttgggtctcaagaaaatgcggctacctaaaaagtttctctttaattatcactaatatttggtctttacaggtaaattaattatcactaacctgactcatcttccatgttaatcattttaaaagattcgaaaatcaagaaagagccttttgtaggaaaaacacttcagagttcagactaagttctcgacttgacatgtgtatgtgtcggataaagtttctcaagattattaaagaaaccaaaccagagtctagtgttagtttagtttaatcacagtttgttgttaatcaatcggcgtgcgtgactttttgactcttgtgcacaatcacatgaataaactctccataaggaagatcaaaaagatttgaatttagaatcaaataaggtctaatgactcatattgaacaagaaagataatagccgaagatatggtgctaagtcatttaactctgcacaaactctgaaacctattctggtttcataattcataaagagccaaatccaaagagttagtagagagattgagaagaagaataaacggaatataccaatattactatcttatgagagctttatggacatgaattttagctgatcaggcaggaagataaggctctgtacagagagagagcttcagtgagaagtattccgcttcttggtgaccggtgtaggatcttcttctgcatctgcttcttcccgtggcacgcctgtaatctgattgattatcttcatgaagtaatcaagctttacgtcatccccttccatttcatgatcattcatctctggctcatccattagcagctgcataaaaaccatttcaaagatttttctgaactctttttcaactccaaacaaacattttatcattaggaaattatcgaataaacaactcttacgtcttcaaggatagggtgaaatcttaagctagatgaaattggagagttgttagtcaaacattgcccaccaatatgtgtctgaggcaccattaggtgttcgatatgatcagcaggtatacattgttgaccattttgtacatgagtcaacggggcttcaacaagagcacatttcttgccaggtggtatcatagagtctctatgacagggagctaccatttgaggcattgatgatgtatgagcaggctgagaatcccacatcaactgatcaacacgcttcctcaatcttcttgcttttccctgtgcctcatcaatcttacacagaaactttgcaagtacatcatcagaacaatctaactcagaaattagactatcatcttcaatcgcatcttgcttccccgtagctttgcgacctgtaccaaaatcttaacataatattgatgattcagtactaaaactcccattttcaatcagacaatcaaaatcaaacaatctgtatatatcttacctgaatcaagatactgccctttaacatttaccggcacccgcttatctgataagaacaaaaagttatacaccattgttatccccaaaaagaagaaagttaaaagaagcaaagaaagctgcattgttgatataccagcataagagaaaaggttatggttagacatataagcagcaacatctgtagtctcttccactcgtttccttcttcctctcttaaaaacattcctcctttgattgttttcacgaaaaggaatcgatttgccatcaaagccttccaatttcgacttctccaaatcaaactgtttagtcaaatagtaatctttaacttctttctcataccctctagcttgagactgaatctccttaaccttaagctctatccacttacatctccacattataggcttagtcaatctcctccacctatcattcgtcttcttcttaggcaaacccaaaaactcagtcccatcatcacaagttccaggtaatggataatcattgcttaacatagattgtgcttcatcaccaaaaccaaaatcatcaccatcacgagcacacattgaatcaccaaaagaacttgaagaagaagctccacacaaaacctcttctctttcctcttcaaaatcatcatgccacttcaagatatcaactatatcctcttccacctcttgtgcatcctccactacattaaaaccatctggttgttgatttgcagaacaatctgagatatccatttcagatcttggttttg

SEQ ID NO: 62585 - DNA, 452 bp, Arabidopsis thaliana landsberg
ggagcggatctgcagggtggtgaggatgcggccgactaccgcgccgtggctgtggtgcggtgccggacggatgttgccgaccccgagaatgcccatgacctcttctaccaggtccgccttgccgcgagatccggcgctaggagggaaccgctaccgagacacgctcgcccgatcccggcacggagaaccccaggccggagaggatgttggtgctctacgtttccgagacacagaggccggacagactccggacttttgaaaacgggaaaacgactacctttcgagactaacgcttgtggccgccaacatcgctctttgctggaaggccgccgcaaagtctcattaccagttcagtggggcagtatgggctcccgaccatgttttttgggttcacgcagcgctcctatgcggggcggacataggggaagatgtcgtgcgagccgaccgtcttg

SEQ ID NO: 62586 - DNA, 857 bp, Arabidopsis thaliana landsberg
gaagaagagcgtttgcgatcgaagaagaacagttgagggattagtgtacctgaaattgtgagcaaaacgtctcttcgtcttctagatgtatcaatagaaagtgctaagtttgaatccgatgtatcaattgaagaatcttgattgtgaaagaaagtgaaatgtagtggtggtggctttgaaatcgccatgtattcacgtttcaatgaaacaaagtagctgcaccattgaacaaaccaacctcatcacaaggataagaaccagagattaatccaacggctactagtgataacacgtgtaaactagtgcagataacacttacaactacccgcaaattttcattttttttgtttgttatatgaattatctcaaagctgctaattgtaatttacagatacataacgtaacacgtaagatactaaaaactctcaatttgcgttttgacaaaaaatgtttcaaagtaagaaactaattttgttacaacaactaaaagtctaaattgaaatcataaccaaatcatcttcgtagaataattacaaaacatcaacaactaaaacatcgtcatgagacgaaaaatgaagttgtggagacgcgtctccggagctataaaggacaaactcagtctcatcaccgcgacggatgaaaaattcacggcggcggttatcaaagcgacgagtcataacgatgtctcaatggacatcgaaaacgttcaattcatctatagatacatacagagcaacccttccagttttaaaccaattatacgcgccgtctcgttacgcgtggaacacacgcgtaactggacggtggctttgaaatgtttgatgtattgcacggcttgtcttctccgaatcatgacc

SEQ ID NO: 62587 - DNA, 701 bp, Arabidopsis thaliana landsberg
ttttcattgatcgtgtatataacaacaaaactgggacctttgtttttccttcttcttcaaggtaacttcttcgtttttagggcttgatcatatcttaattcatattctgttttgtttgtttgaaactatttcattcagctttaggtttgaaatgttgacttgtaacattagatgttgttttgataaaaaatgttgttatgttaaacaattttaatgaagaagaaaatctttttataagatgtttcaaggttgtttatttgcatttttaccttatcttatacacattaacatacacagatgtacaaacaacgttagactataacatgattagctactaattacgtgattagaaggtaagaaaatctgatggactattagagcgctcctcgctggtcaccaaatccaccatatccgccgcggttaccggcgttacttttgcggctttccaatctaactcgggggcgatatggagaagcttgtcgagaactatcatttgagattccgtgattcgcaagatattagaggtttcttgagcgttggtgacaccaaaacctctacagaattcgaaatacttgaagagtttttctctctgcgacaaagatttcgccacgatattcatcgccaaatccgcctccgcggacgatatctcgagcatattcgactgtacatcggataagaaacccgcgaatccgcggcatata

SEQ ID NO: 62588 - DNA, 1208 bp, Arabidopsis thaliana landsberg
cgcttgttagggcctgcaaccggcttggcaatgtatcgtgaaccacttgagcagcatttctcatacttggctgcattcctccagattgtctccattccctaataaccgaaaaagcatttgttattgataggaaaagagaagaagcttttcacttgctcaatcggataaatgctcagatttaagatcttgccttatccttcgtattgtatcatctgagttaacacggcctagaagctctctatgctcctcattcgataaactcaactctttgcgtaattcagttatgacactttctttttcctgaacataaaatacatgttattccacctaaccagacactaacacaacaagagaaatcaaagtagatcaaaaaatacccatgaaatagcatctccttgggctttaaaggctcttaaaacagagatatatgcttccttctcaatctggtgaatctgagcttccatatcagcagcaagatcatcatacatctttgggtaagatggcggaagattcaaaggtcttccattaccagccacgcgtcctcctcttcctcctcctcctcctcgtggaactctatgcgacggtggcagatcatcatcagttcctgaatacaccaccggtaaaatcaatcaatgttgcattctcaataatcaaacctttgtgaatcaatcattaccacacattacattcaaaaggtttcagcttaaatcaagaaacagcaagatccaaaatttcaactaaaaacaccaatccaccaaaataacacaatgtataacagtaatcgcacggagaaatcccaaaagttgtgaaaaccctaattttcagtgactgatagagaagacgagagaaattctacacagttttcgggaactaaccactgctatcagacgatttgcagtccatgacgaagcttaaatcaagagacgaatctcgaagatgaaaattggagaagctagacgaagaatcaagcacaatttgccaaggttgatttcaatttgacttagaagaggactcgatttttggttttgagctcaattttgtactttgtcgagctgctataagaaagaagcgacggatcaatttcttgctccggtaacaaatctgagcttcactataagtgattcagcttaaaagattacagattttgcctaaagctcattatttgccaaaataagaagaactcagacgaaatttaattttataagaac

SEQ ID NO: 62589 - DNA, 1815 bp, Arabidopsis thaliana landsberg
agaggaaaacgcgaatatttttgatccaataaggtttcaaatataaaaacatctcaaattcataagtttcgaaaccctaattacatttgattcacgagattacgatatagcgtaattagaacgacaacggaaaaaaaaagcgttctctgcttaatcaataatccgcaacgataatcaatcaccatttctgtttcggttcaacgcgagaatcgccattttcatatgaatttgccaaaactcatagcaaatatccaaaacaaacctgagtgaagtaaatgagacaaacgagccacagaaacgcgacgccaaacgccgatcgcagctgcttcaaccaatgtatcatccttaatcgcaagaaattagacaaaacacgtttcttatcttctccggttcaacagaagaatcttgtctccgtcgcaatctctctgtttcttcttataacgttttttttttttccccagatttatggctttccttcctcgtctacacaaaattcaatttttcagttgactgacgcaaagaatgacgatagggatatttgcgtcttttcctccagcaaagtgcttgagacacgttgttaatcctatagaatttagacacgtcatctgtaggacccattcagcattaactgttctttacctcccccgtcaccgccttgtgagactagtctctctttgacttttgactaaagacttttatataaacaaacttctcttatccttacatcaaaacactttaagcttgatccatattagcatttcacaaatccaaactacttagtattacaacttacaaggacttttacaaggtgtctttgaatcagcaataagaaggtgcatattgaggtcgatacacaaatggtttcacggcatgaaagaaaccggaagggcggttataagtgaatttgattccggtattagtttggtgtaggcgattgcaaggtgtgtggaagctgctgatgggtcttgcaaggcaagcgtcccaacgttcgctctctggcattgtctctgcaactgtgtagacaccttttgagtttgtgaaagcttggtagttcacaacttctcccgatttggttatgcacagaaccgcaacctcagctcctgtaaagattgaacaataacagctcgcaaatgtgattgatacgtcaatgatatgaagtgactggatcacataacacggttaaaagtgccaaagagatcatttcactagcagaatggtaaacacataaaaccgagtggcttctaagcaatcccggttttgagttatcaacaagactatttggaatatgaagcagtgtggaaaaatcattaacactatcggataatacataaaactagctggaaacacaaggatgaacaaactaattactaagttccggagagacaagagatgatccaagccataagctctcctaaatttgattcatggaattcagagaaccaaatacgaatcagaaaacttgaaaagattatagaagtataacataatctgcaaaaaccatttgacactataggatatatacaaaagcgcagctaaaaacataaggaaaatgaacataacagatttttatgtcgcagagagaccagagatgatactaaacaaaatcccctctaactttgatttatgttattaaaaaagaaaaataagaatctgcaaaaactgtagacacacactcacaaagatatgcaccatttgctcaagaaataagaacaaacagtaccaacaagcttcgggctaataaactactctgaagaaattcacaccaatttgatgtgtgagaaacaactactactgaattgaacagtaatcactctg

SEQ ID NO: 62590 - DNA, 571 bp, Arabidopsis thaliana landsberg
caaagaccaggataatctcacttgttctgtaacaggctttttcgccaacttcaacatcgtttactacagaattaggcattaatatgacccgtagaccaagcacatcgttcacttcttccggtttacgcccatctcttaggagcttcttcatcatgctgtaccgacttttataccgacctttaatatatacatcattcaccatttcagccaaaaccaaatcatccttcaaagaccgatgaagctgctctttgtacacgtctatcaacggtttagacccgttctcgtgacctcttaaccatgaatctaagtatatatacgaacacggaaaaagataacggaaagagatgtcctcgagctcaagtgacaggtgattagcccccaccgcatgagctaaaggagaataaatcttcaacacttcaagagagagaatctgctggcgataccttggcaagtgatccaaatgcctcatctcatcaagctttgaaaccaaatccataatcacagctctgatgtcatagtaggttaaatagaactttctcaatgaagcagcagtttcatcgtctaacacatc

SEQ ID NO: 62591 - DNA, 1262 bp, Arabidopsis thaliana landsberg
aagcgcctcaagactagggtttatcagaggattagggatttgaatcaagagccatagtttttttttatctgctaacagattaaccggtcttcttcgttttcggttttcataactgagcaggccggtaccgccctagttgacctggttgaaaaatatgggccaaaaaaatggtttactatatctcagcattaacctgggcgcataggaaagcaatgtagggaaaggtaatgcaaaggctctcaacttctttccgataaaatgatatttacatacattgggtggtacttcaacgcacataaacaatattgtgggtgatgtaggtggcataaccatcttaaccctgggattaataaaaatgcatggactcaggaagaggaactgactcttattcgtgcgcatcaaatttatgggaataaatgggcagagcttatgaaatttttgccaggaaggtaaatatgtcttttccatgggtcctagtataacaacataggtgtaacatgtccgtaaaattggtggcctcataaatgaaataataggtttttgatgctggtagttgtggtctatcgttcctgctttggtgatttgcttattttttcttacgttcctgtaggtcagataattcgataaaaaatcattggaacagctcagttaagaagaagttggattcctactatgcatcaggtcttttagatcagtgtcaaagctcgccattaattgcccttcagaacaaatctatcgcttcatcttcctcgtggatgcacagcagtggagatgaaggtagttcaaggccaggggttgatgctgaggaatcagaatgcagccaagcttcaactgttttctcacaatcaaccaacgatttacaagatgaagttcaacgtggaaatgaggaatattacatgcctgaatttcattcaggaacggagcagcaaatctcaaacgctgcatctcatgcagaaccgtactacccttcctttaaagatgtcaaaattgttgtccccgaaatttcttgtgaaacagaatgttcgaagaagtttcagaatcttacttgttctcacgagctaagaactaccacagctacggaggatcaattgcccggtgtctctaatgatgctaaacaggaccgtggtctagagttattgacccataacatggacaacggtggaaaaaaccatgcacttcaacaagattttcacagttcactaagaataagcgatcaaccttttttgttaaactgagtcacagatccggaagctcaaactttg

SEQ ID NO: 62592 - DNA, 1433 bp, Arabidopsis thaliana landsberg
agacctattagaaaaaatacctcgtacgtatacaaattttgcacgacttgtattatgctcaggcgggcagggagtacaaagacgtttgtcagagccttcgacgttcttgtaagtgccaatggggcattcctggaagaatacatgaatccagatatatcgagaagtatcaggcacaagcaaacaagacagagatttgcaattatgctaacagaacgctactgggcctgtctaattttgtggtttgttacgcccatttaattgctagaataaaagatgagcagaattggccaagggtaagccataaatggacagtgtcgaagtaactacaacataataaaccagaatacttaccaagcagaatgtaccgtagagtccctttggacactttttcccagtcattgttccctcttccccgaatcgacctccattgtcccctgcacctcctctgaagacaccagaaagaaaacaatttaacgtctgtgttagaatttcatgaagacaggttttgcaggttaaaaaaatttctgtcaggcccagacttccaaatgttccaaaatattcataagggaatagtacaggcagagtctcaaccatcacacactaagataccattatcctctcatatccatgacgctgcctctactaaatcaacgtatatatgcatgctttaccccagtaaaacaaatgacccagaaagtagcaagcacacaagtgagattactacacttgtcatgataatggtgcatacctattactaatggaccccttgacaattgcaacaggagaatactcgtccccagtatgtaacatgtcccagtgaaagtgaagtctccctcctccacctccaccacccccaagaggcccaccccggccccctcgaactgatagagatgaattctttgagagttcaagcatctgaaggaaaagaagaatcgtcccaccagatcccccaccaactccaccgaccaaagatctgttaccattcgctgttggcttccaaaggctttgaccatcagagctcagagatccccgcagattaagagtcaaaagaggaaactggatggagccaattactgaaaaggtggaaaacaaatttgtatatgtcacttgacagtgctagatgagtagatagctatttcaagagtattggctaccagattttctaaaaataatagaaaatatataagcagaaaagtgaaatacaatagtactgacctatcatccctccaccagtcacattcccatatgatttatctggactctctgctccgcttcctaactcacagggaaaatcaggatcaccataggtatgtcctccgctgcatactctcccattgaaaatgcctgatccccctcgtactgcatgcccagcaccactaccagccccatttgaataaatgcctttcccacccagcactgctacctgccaaagg

SEQ ID NO: 62593 - DNA, 572 bp, Arabidopsis thaliana landsberg
  unsure (1)..(572): unsure at all n locations
caaaaactaacaattgtgcgcaaaactacgagaaacaatgtaaggttagccattttcgtatcgtttaattgggaaattttacaaccgctaagctcccctccagtatatttaccttatgcccgacccgttactgaagatagaagagctttccgtttcctttannnnnnnnnnnnnnnnnnnnnnnncattaaaaaacataagcatatctgttcatcgcggggaagtgctggccattgtgggggaatccggctcgggcaaatccgtaacctcattatccgtattacagttgatcccctctcccccggcgcaatatctttcgggggagatatggttacataaaaacgggcagcctgttaacctgttgcagctttctcctgcggagatggcatccatacggagcagggatattgccatgatcttacaggaaccgatgacatccctcaatcccgtacttacctgcggtttgcaggtaatggaagccatccgcacacatagaaaaatattagaggaagaagcccggcaaacaacactggcgcttgttgagcaagtgcaactgacctatcccacaactg

SEQ ID NO: 62594 - DNA, 1060 bp, Arabidopsis thaliana landsberg
cacctgccaccgaagattcacattacttccttcgagatgtcccatttacctctgactctgttgatgctgcaggggctgctcatatactaagacaccagaacaagccaagtgctcaactaccgctgacttctggctcttcctctctgtgggatgatgaagaaacacgtgatgccttctctttccaaaaaaatcgtttcgcaaattccaccgagctggctagtgttgcttctcctaaaggtgttggcagagtaaatggagagccttcacagttggtggaggtaactatatcagcctcaaattccacttccctcaattgtttacaaaactaaaccatctgattcaatactttctcttaggcttcatccggcgatgagggatcttataaccctcatgacgatggagatccaatggaagagggtccagcagaccctcatacgatggattctccagggaagaccccttgtggacttgcggatgtatactgggtaaatttagaaatctcatatatttccccaatgtaaaaaagtcatatatattcaacaacaacacatgtttcctctttgcagcccgactcgttaggaccactggatttagacattagatcgtcaaagtatacagatgatttgatccttagtgagagcctcgggggattgagccgtctgatagcaaccagccttgatgcgtttcagaactgctcgctctttgggttcgacaataagaaggacaagtctaacatggtatgaaatggaaccaaagctaaagcatggggtccaaatgttgatagttgaaaaagaaagtgacttcttgccttttgaaaaaagaaacttttatcaccaactgatagcttcactgtacaaaaatttgatgtaaccttttactcttcctttcacacattcttttgtgttgatacatgtttctctgtgtacacttttactgttaatttacatgtttatttggctaccatgccttctttcttttttttttttttttttttggtcttttggttatagaaagtttcatgacaaataagaatttcaattaatattcttaagttctttta

SEQ ID NO: 62595 - DNA, 167 bp, Arabidopsis thaliana landsberg
aacaaattgtaaaaatcgaaactttattgtgatttagcggaacccagttatttatgtaatccatcaatgaatgattgctctgttttttttttataggttgtgtgcagaaaaatcatgactttggcttctcctcgagtttcaaattcaaagacgactgtgttgttgtt

SEQ ID NO: 62596 - DNA, 525 bp, Arabidopsis thaliana landsberg
cgattgcttcatcagggtatgcatcttgatcttctttatttgatagttgattgttgatccagttatatatgaagttgagttttgagtaaggttggattgttgtagggatgtgatgcgtccattctactagattcgacacggtcaaaccaagctgagaaggatggtcctccaaacatctcagtacggtcattttacgtgatcgaagatgctaagagaaagctcgaaaaggcttgtcctcgtaccgtgtcttgtgccgatgtaatcgccattgccgccagagatgtggtcaccctggtgagtcttcgtaaaagagttgaccctttatgatcatattagcgtaatataattcttttacggttgaaatttggttctgtttgatttaccttgtgtgatgttttacatttattagtccggcggaccttattggagcgtactgaaagggcgaaaagacgggacaacttcacgagccaacgagactagaaatctcccaccaccaacgagcaatgtttctcaactgatacaaag

SEQ ID NO: 62597 - DNA, 678 bp, Arabidopsis thaliana landsberg
taacggagagcttccaagtggggaataatttccgcgacacctgactggctttatgaatgtgttagacaggttttcctccagggattctatatctttgaaatagtttctttgacatgggatctttaaatttaacggatagttctttttgaatttcttatgtgtagaatcaagttgtttgtacagataacttccatccaagggaattgaccactcaagatcgagaagcagggtctcagtttcatacacagtttgtaccaatggcctcaagggacagtatgtctctacctgtaagtcactctgaagacagggaaaaaattcaaagttttgctggcaaaagtggttgcgggaaaggtgaagtatataacagacttggagaaattggaaaggaacaaacttttccgtctaagaaggcaaaacttttgagagatggtcaagaaagtgatgtgtttcctgtgagagaacttccaagcaattgtgatcgtccttcgcattctggagatggcattgtgactggatatgatgtagcaagtggtcgtgaagttccagatgtggctgatactattgaggatctgttagagcagacaagcaaagtaagtactttttgcttctttctccaattatttaatccaagtcatattttctctgtattcacgtctggtcttctgtttagattcaaga

SEQ ID NO: 62598 - DNA, 858 bp, Arabidopsis thaliana landsberg
atccttaaagtttgtgtgctcattcattttttttttcgtgggtaatcaatatttggcattgtttgactccttgatgacaaaacagcatttttcaactagtgaacaatacaacactgggaatcactctgtcactggcctgtctagacactggataaacaggtatgttcattcattaaatgcaaatccgcactttgcagatattttttggttttcgaccttaaatgcaaatcacaagtttgcttggggtctaaatacgtacatatgcatgagcctcaaaacctttttcaccttgtttgactccccaatctatagctattacttgatattgccatataagagtgtatcatactatcatgattgtacgaatggaatatatccaccactatgctgtacgtatggaatgtgagcaaataaatggtgtgcaattatgagtgtaagcaagttaatgatgtgcaatcgatttgagaaaagactgtttcaaatctatatgctactcgtatatgatgaattaacgtttgcctaccaaactcttatctatttttcagggtccataagaatgacgacatgggcagtcctccaggagatgcaactactgacacttacggaaactttagtgagacgcagacagaatcacaggttatatataactcttgctctgattatattataccttgaggattccattcacaacctgaaattgcggagttacttacaaatttcaagaaatttgcaggttgttggttacgaggaagatctttcaggaaggcagatgcttatagacagagttagaacacgaagcagcttatcataaagagacagagtgaggtgctcgttgagacagaaacatcaaccatgtgt

SEQ ID NO: 62599 - DNA, 466 bp, Arabidopsis thaliana landsberg
tacttaatttgttcacactacgtcaattgtaaatttcacacaataatatattaatatcctatacttttattttgctatggttttaagtaattattcttattacagggacaaaaggacattaaattaaaaagattggagaggaacgagaaacgcggggcctgacaaaagggaagtctgttgccgtgttggtggtcgaaagcaatggtctaatgggcacgtgagacaaatgcctaaattccatgtatgcatgttttttttttatatcaatgttaagtatttatatggttttcaaattttaaatttttttttatagaattatactaatagcggaaaagaccgaaaaactaaataaggaaaaaaaaaaaaaacaatagagcaaccacaattactactagcaggtaaaaacaaccgtctattgaaatgggatttaacggggaaatagattcttcttaaaggacatgcacgc

SEQ ID NO: 62600 - DNA, 722 bp, Arabidopsis thaliana landsberg
cgatggtcagcgccgtcttttcccaggcgttgggattgcgcagggcccattcccgcgtcgagaccgcgacctgcgccagatgctcgggtttcgtcccgtaaacggccatatgccgctgcgcggcaagtgcatagcctccgaccggcagcaacggcctgtagtccgtctcgtagggaaagtattcggtggccgctgcgacctgccgcgtggcggaccgctgcgtgctggcatagacgatcagcgccgtcgtgcacaggcccgcatggatggcagcacgcgcatgcacgagctgcgtcacggtcgacgcgccgcccacgccggtcgagtcgaaatagcccggcttcagcttcaggtattcgcagatgttctgcggcggcaaccgcgcctgccccgacgacatgaagacgccgtctatgtccgagagcttcaggccggcgtcctcgagcgcgcggtacgtcgcctggccctgcaggtcccatggagttacgttcggcgccgcctggccgagatcgcactcggccgcacccacgatcgctacccgcgtgatgcctgtcttgtccatcacacggtctccggcggaacgaacacaggatagggttcgtccttgttgtcctgatttatcctcatctcgacacgaagccccgcacggatgtcatcgatcccttccacgcggctcatcatcctgaatccttcgaccaggtcgatcagcgaaacattgtagg

SEQ ID NO: 62601 - DNA, 532 bp, Arabidopsis thaliana landsberg
cggagaaacccatacagtattagattgatggagatgtcttattttctcctaaagcatctgttttttaccctattcactcttttcgagatccggatttccctaaatcgatatcatgtctcctaaatgtactcttaagatgataatattattaatttcccataaaatgtctacagcgatcctttcttatggctttagattaaacaaagaacaacactgtgctggagaagaatcttgttttgacacacttgttgttctgttaaaagaaattcagattcgaataaacttgacctctttcaaccaaaaaatatatgaactttttaatcctttttgttcattttcgagttgacttaatttggactagcttagatatatatcagaaaaaataaaatcattttcgaaaattgggaagaagaagaagaataaaacctcaaatcttgatttctcttgttttacataaaacggaccaagtggaaaaaaagaaaagaaccaaaatgttgttgattttttaaaaagacaacattattcttctttc

SEQ ID NO: 62602 - DNA, 1231 bp, Arabidopsis thaliana landsberg
caagtgattggtgttgtttctggttttttgttgttgtctcggtgttatggtttcatgtgttttttttttttaagtataccggtgttgttttttatggtttcatgtggtttttatatgttttaagtgttaataaagaatcctgctctcattataagtaaaagtagttgagttttttgttacaaacccacatataacaatgcaacatagtagttgtagacaaatccaccacggggcattagatattacaaaagaatatttcacattctcttagtgttttaggataaaggaaaggtcgagttcgcgaagtcattttccacataaccaaattgcattgttgtctcttgcttagcatcgtctcgagcatcaattttcaatttaaaacacaaagaggagatatatatgtggaaaaattaggcagagaatcaaagatacttttcttgaacaagaccagtactaaatcgttttaaaaaggtactcaagtttcaactattacacttgctactgcttccttcactatcaaactacgaatcttaaagataaaacatgcgactaagcacacgcatgagatcaatcccaaaaggtaaacgtcactgggaaatttaagaacaaatccagagagcctatcgactcaatttatatagacagtgtcactatgtcttgggggtctatcaggaaccgtacctggtttgaatctggacgcttcatgtctcgccagctcaggaggcaccgcactgttgctctgaacaagcatctgcttcagatcatagaagacttcggtatcatgaagtgtcaagaacgaagtcgcaacaccacttttcccagcacgtcctgtacgtccgatacgatgtgtgtacatctctatatgtttaggcatgtcgtagtttatgacatgagccacatccggaatatcaattccacgtcctacgacatctgttgcaacaagaacgttgtatctctttgctctgaatccttctaagctgatttctctctgctcttgtgatttcccaccgtgcaaggtcgtgacacggtaccctgccttatacagattcttagcaatcgagtcacaatttttctttgtgttaacaaacacaatggcagtcttctcgccgagctcatcgagcagtttctgcaatctggagaatttctctgattctttcatcataataacatgttgcgaaatcaaatccgtagtcttttcagcagtaccaatggtgacaaccacccgggtcct

SEQ ID NO: 62603 - DNA, 713 bp, Arabidopsis thaliana landsberg
gagtattatgtatccatcttaaacatgtgtgcaggcaaaatgagcttactgaattgtctcgcagatcacgttatcatgcagggtggttctagctcctatacgtttcctggacttaacgcattttgagatatcgatagcaacttcacaggttttgaaaatttgcgactacactatagagataacaatagtgactgatcaagatactaacatagaaggaacccatgattcacatattgctcatatactcagaaagagtcatgtgacccttacatataactatgcataaccatgaatctctttgtgcttatcctctaaaaaaacatgtgagaaaatggaaatatataaatgttagagaagaagtttaatggttgttgaatatttgataaacatctaaacatacactcatagtgatatgtgcaaacatgtggcttaagccatttttaaaagaatcaacccacttgacaaatgcatattgctatatgtgaaccttgcgttccttgtcaattgtctgcatcttttcgttgccgtcaacatgatggttccagaggtggatcatgccgcgttcttttatctgcctagccttggaatactcatggaatatgtcgaaacaaaaaataagctctgaggaagacacctcctttgcttcaacttcgaaaatgtatagatgatccgtcataaatggataccattcatagaaacgccatttcgaaccg

SEQ ID NO: 62604 - DNA, 314 bp, Arabidopsis thaliana landsberg
  unsure (1)..(314): unsure at all n locations
aactaaataaatctttttagttatgtgctctgggccttatcccctggcttgcaagggaaacttcaattttttcttagaatgtggcttctgtgaagaannnnnnnnnnnnnnnnnnnnnnnnnnnnattaaagtgggtgtgggtgctgactgaggtcaagggatgttgtgaacagacagccccactcacaggcatgactggggatccccaaactctgggaagtagagccaaaacaaaaaaaacaaaaaaaacaacaaaaaaaaaacttacccttgagcagttggcaatgggacatgttacagttttctgaggggt

SEQ ID NO: 62605 - DNA, 610 bp, Arabidopsis thaliana landsberg
  unsure (1)..(610): unsure at all n locations
aagcatttttggaaatgagtataatttatcgatagctagctagtagagccgctaaccacacaattgtttataccgtcggcctttgtaaatgtgtcgaattcatttaaagtcaaaactccgtttcatttaatttacggatataaatacaaatatagactcgtttttaggaaaaccaatcgaaaacaggtaactttgtgtagaaaaagaaagatttacggatttttggtctactaactaaacatgttatccgaacattgttactaagaaacttaagactaatacaacaaaacaaaaaaaatggatctagagatcttaaaagaagcgatattcgccacgaagatagatcactcgttttggcggtagattaactgtcgagaggttgccaaccaccttgaaatgcatattttgtgtatttggtttttctttttcaataacgattgttaccgtttattcgatttttatatcgaaaaagtccaaactcgaaaaaatcgaaaacaaagaatgtncaaatcaaacgaaatgaaagtagacaaagttttaggatagtaaattaagtacattttttattaaacccaaacaatcgaagaaacggaccgaaaccctaatcgag

SEQ ID NO: 62606 - DNA, 572 bp, Arabidopsis thaliana landsberg
  unsure (1)..(572): unsure at all n locations
tcaccgactaaaaacagagacaaaaatcacgagatcaagatttaaacgatctgtaaaatgagagatcaagtatgtgcgaatctgagaacattatgcgtcaatgaattttggaaagaaagcaaacgaattttcataaacgtagaagaaaaggaaaacgaatctatagggtttagagtaaacaaacctcagcaaaatctggatttgagaaagctagagcctttcgaaaaccatcatttctgggttcatcgaatcctggggattaggtaatgggaattttctggaaaatgctcgtctctcagagcttaaggcgttcagattcgaaagagttcttgccactacaccaacctttcacatggtgcggagagctgagtggttttagattctttttattttcttcttctttttcactatatataacgtttttttataaagatgaaaaaaaaactgtacagatttcacaatatatataaaccaaaggaaaaagataatgataagtaataataaatgatgtataaatttttggattgaaatattattttttgaattatgattntgtgattttggggaaaaaa

SEQ ID NO: 62607 - DNA, 1435 bp, Arabidopsis thaliana landsberg
tatgtttggcttaagtcagagagtcgttgttgcagggggttctgagacaaaggctttctggtcagggtcttgcttttattatcgctggcggctctggtatgcaactaaagtttatctcaacttactgctctttaggtttaggccttttaaactgatcctacttcatttgcttcataaagttgtacagaaaaacctggaggtgggagaagttctcaccattgacgtttcttgcattgccgctctcactccgtcgatcaatttccaaatcaaatacaatgctgctcctgtaagacgggcagttttcggggtatgttatgtttcttccttatccattacaaacaatatgtattaaggttggtccttttgtgtcaaacttacaaatcatctacattttgtcaaaaaaagggtgataatgtagtaacagcaactctaacgggaccaggcatcgtgttcatccaaagtttaccgtttcatcgactctcgcagcgaattgcaaggttaagaatcgacaatctcctcttggtataaataactatggtttcttgtactagactcagcaagggtttttgcttgcaggtcggtgacgtccccaaatatgagagaaaatccaagattattagttcaaatagggttattcatatttcttgcatacgttgtaattgtgtcctctttaatccttactgaaatgtgaaatacagaggtgcactcacatttgtatcctcttttgctatatatgggatttactacacccatatcaccttttgtattctcttttgctattaacctttctcagattcatgttggcagcagtggctgggatgtttattgtgaacagatacttgaaatcattcatatagtcgaaatagcctttgagatccctaaaactttcatcatcttccacatgattaactttgctagagcacaatatcttaaccttagcttcagcagagtaaaaaaaaattcttgaaatatcaaaagacaaatttgtcttatgtttcaattaaaacccttacacgaaatcaaataaatgcctaatttaacatttggtatcaacctaattaaattttaaaactttgttgttaaatctaatgtgccaaaatggatgctcaagtgttaaattcttgtaagacaaaacctctctattaatgagttccaatgtgtacatctgaaattgcatctcaaacgatgtaagaatgaagtgcttaaacgtatgctactcaatattaggctaattcgtactcaatttcaaccagtattttaacatatactaacatcatataagtttaaaatcaaatatcacaaattatttcaaaaagatgacccggctggtatttaattaaataagaagtcatacaaatctttctaaataaaaaaccgaagatagtgagaataaagacccattaatattacacatattcgattacatatgactttt

SEQ ID NO: 62608 - DNA, 162 bp, Arabidopsis thaliana landsberg
gggcaagtagaagaaacttacaacattgtagctgctcacggttattttggccgattgattttccaatatgctagtttcaacaattctcgttctttacatttcttcttagcggcttggccggtagtaggtatttgggcttctgcggggaggtttagaactatg

SEQ ID NO: 62609 - DNA, 263 bp, Arabidopsis thaliana landsberg
accggaccggaattcccgggtcgacccacgcgaccgcggacgcttggactccgctgggccaccagctatgacgtgcgcctcccttcccctccgctactgctcctccccaccccactcccccgcaggagcggcggtggcggctgccaggtcgttccccacatcggcaagcggcggcagcaccgccggaggcaaaggcaagatgttcgggcgcgcgccaaataagagcgacaacaccaaggactacgaaaacctcagggtgccca

SEQ ID NO: 62610 - DNA, 573 bp, Arabidopsis thaliana landsberg
actctttggtatgagttttttttagcaaactcatctggggtaatatatatagtctaaagctcaagttaaagtggccacacacacacgactttgttcgaaatagaattgaacctggaacgtctacaaatttttgtccttagatacctcatctcaatgtgcgtccttagattcgtgtaggcctaggccgatttaaaaaatatggcttttgtaatattttaatttttaaataatcatatcatatttcacttctattgttctatacttctataaatcttcaatatatgaccatattttgcttatgcaatatttctatttcgaaaatcctgtatactttgtagttgctctatgaaaccaattaaatcccttcgaaaaaataaaaaatataacgtgggaatagtataatatctaaagtaactaacaaagattcacaacgttggcattatctgtcgtacaagtgcgtgtgttgctgttttcacttgaaccacacgaaatggcaagaacaaaaccatcataattaaccaaaacaatacaaaacattggtaaatgacaatatatatttatttagataaatga

SEQ ID NO: 62611 - DNA, 1257 bp, Arabidopsis thaliana landsberg
gtatcctcgagttgtttgccaacaaatcatgtttgtccattgtgcagtttcgtgttaccatgtgatagttagatgaactagtactcgggtgaaactagatctagaatttagttcaattgtttaagggttttcaatctttggcattttaaaagtggagttttaaataaagtaattggcacaagtaatcgagtactgtttctctatacctcaaaaataaagattgctcatctttctttcttgttttggtttcaaggttaatatacagactgaaattataatagttgggttcccttaggtaaatgatgttacatttaagaaagttgcataagctagtgattgtgattgttgtacaagttgctgaggtaattgagatggtggtgttgctgcaagttagatgactcgaaatcacgaaacgaaagagatatgagagtatatgaggactccatcggataaattcaatatgaaatttcaaactacatagtcaccattaagaaatagaattgttcatattgagcaaaatgtttataagaagcaagtatgtcacgtctgtatctatagaaagtctcattctttctttttaatttttatttttccacaaataaaacgagaatattgaactaaaaggtcttcctcagcgtcttttctcacatttgtataccttttggttctttacaaaacaaaatgttcatcttctcttgtgtctttctccgatctaagagagttttaaatttgcgtcccacacagctttactaccttcaccacacatcacatgaaccatccacattctatcgactgatctgcatactccactacacttccagtcaaatgtagccacacacatttcgccagcctctgccctcatttcacagtctttgggaaagagagaaataaaaggagagtaagaatatgagaaaaactcaattatcttttcttttttactaacttcttgaggcatactaaaaaaagaaacaagaaattttacctggaggagtaccacaacagaaattacgatcatcgatttgctcaacctcaagaccgataaaccatgacccgagtgtcacatcttcatttgcatacttatgcaaaattggcctgcgaagtcaaacatcaaatgttatgtttggttgatactcatttcccttggaaaacatatcttaccttgtcaaaatccaaaaaccatacagttggtcacttactgggtgttagatatgtatggggcaagatcctttgatatggcaaaaatctggccccgagcat

SEQ ID NO: 62612 - DNA, 524 bp, Arabidopsis thaliana landsberg
ccgcgcccggcatcgtcgtcgagggccgcgacatcacgacggtcgtcacgcccgaggcaccggtgcgcattctcctcaccgcctcgcccgagatccgcacccggcggcgggccgtgcagctcggcgcgagcgacgaggcggccaccgcggccgcgatcgccgcacgggacgcgaaggactcccaggtagtcgagttcatgtcggcgggcgccggcgtggacaccatcgactccacccacctcggcttcgacgagaccgtcgacgccgtcatcgatctggtgcggcgtcgtgccgccggacaggcagacgcatgagcgaaccccgcgaaccccgcgaacccgagcaggaattcgacgacgaggcggtccccgcgctcgacgaggtggaggccgagcgccttcgctccctcgacgacggcgttgcggccgcccgcacggcgtctctgcgcgcggggctggccgactacgacctcgaggacgaggacctcgacgttctcgacgcggcgaccgaggacgtcgaggaca

SEQ ID NO: 62613 - DNA, 569 bp, Arabidopsis thaliana landsberg
  unsure (1)..(569): unsure at all n locations
cgcgcggaagccctgccgngagccgctactttcgcatcgccccgctcttttattttgttctgtgcatttggctgtgcttctggctacggcatggcgggtttcccgcgtggagcgacttgctgctcaacatcacctttctgttcagcttcgatagttcagggtatcaaagtctagttggggcaggctggtcgctcggcgtcgaaatggccttctatgccgttttcccgatcgcgttgctttgcgctcgggacgcgaaaggcgcggcgcttctcacgctcgcgctgttcctcttgggatattatgtcgatcagacttgcgggttgaaaccggatgacgcgctgcgccgtatgtcgctcgccgccaatgccgcctacttcgctgccgggctttgcgccttctatgtttatcgtgcgttgaaagacttgggtccggatcggcgcgacaaggcatcgcttgcatcgctcggccttgcccttctgatctggctcagcgcttacgcgttctccgcgcacttcgacggtgttgccgtctcatacgtatggcgcgcattcgtcgccgcagctttccca

SEQ ID NO: 62614 - DNA, 1368 bp, Arabidopsis thaliana landsberg
ttttgtagaatttggagtaataaggaattgaggaagaagtacttaatagtgcagtgatcataagtgagttgttacttatgttacttatattttacactaggtaatctcaaatcgaaaatcagattgatggacaatattattacaacattctatgtctaccaggttcccataaaaaaaactttggctttcatcggcctctaaatattaatctatcaataattaaacatactgtacgttttctgtaaagttttgtattgtttaacagtaatgtttatttttctattatatgttgtaaaacaaagtttatacacctttctaatgtacttagaggaataatagtaatactggaaacaaagaatggtctggatttgtgttggaggagctacggcctttgggtttatatcccttgagtgacaatttatttgagtgttgtaaaggcgctgtacaaagctcatgaaggcccaacacaaatccatgtaaaacaaactcttattgagtacttctacaacttctcttgtaatatttgttaacaccatgtgtaaatcctaaaaaaataatatattcgaattaaaatttaaaacgtagtttaaaataattgtgtatgaaatgaattaacgaccgtatagtataactattgaatgcaaatgacatactaaagatcatctgactttttgaagaaaaaaaagttagatttgacaaaaagaaaaatatagatcgtccaactagaacctaaatcgtaatgggaaggcttaattatatatgaaataccattatagttcattatggtcaacttaaataataatcctatattcacatctcataattttcatagatcagtggagtaagtatatgtcacattaatgctcatgaatgtagacatttactaacatatttttaaaagctcacaaaaatttaaaagaaattataaactgtcattgaacatcaaattaaatattgttgctaagagtttacttctcattaatccacctcagtcaccacatgcaccctttaataccaatccaagtagactcactctccctcacacactctctctctaaaatctatttcatcttggagtaagagacagagagacaaagaaagagcaaagcaatgacgacaggcaaaagcaagaagaagaagatggtccttaaggcagtctctgtcgtagacatcggctgtggcaactgtaagttcccaagcttgtcttcttttttcaacccttcccccaaaaagccccgcctctactcctctaattacggccactgccactcctccacccccaccacggcctcctcttcctccgccgttccctccacctccaaatggttctctgacacctcttcctcctcggcaacaccctgcgccgcc

SEQ ID NO: 62615 - DNA, 1273 bp, Arabidopsis thaliana landsberg
  unsure (1)..(1273): unsure at all n locations
ctcgataaaagcgccgactcacatcgtgtctaatgaataaaacagcaatgtcaatgattttcctccaagcgacaccgctgaactaactgaagaaaaccttaaggtatgatctttctgaaatctgactttattcattttgtgacatattctggtgatctatctatctgtattgagacctctgttcaaatccatttacagggaaaaccggtggtcctaaagtacgtaaagtttcagaatgttcgtaggtaaggatttaccatgttctgtgtctttgtatatatatatatattataatattaagcgcaatcacagctcgttctaacgatatctatttaattcaagcttgacgatcttcatcgaagccaaccaatcaggttctgaggtcaccaaggttcagaagattgctctctatggctcaacgtaagtctctgaaatctttctgtacaagtctgttacaaagatactctgnnnnnnnnnnnnnnnnnnnntagcttttcatatttctgaaatctttaacttgcaaatttattgatctttacaccattctgtgcaaataacagggtggagacgactgatatgaagggattgaaaaagattgaagatcactgagcatacaaaagtgttttaatcatatgatcgtatatcagtttgatttctagtgttctattgcgtttcatcgtttgttttttacttacttttttttgaattaaaatagaccagaacttgtgattgcctattcgcaggaattcgaaacgaaggataagtcaatttgaaaatcatcttgcaattcttaacagtttgggcaggactcaacttttatctttgtgtgttcatattcttgagggggaaaagggcgtttatttatgaggcagttattacacaagtaaaatatgaataatgatagaactaggcatcaaatagttattagtcttaaactcttaattaaacatagatccaatatgaaatcttgatttataataactattagaaatttggaattaggattaaaaatcttactgagcatttttattgggattattttctttctttgtctgaaaacaattaattaatttttggttttgggctatatcattttttggttttgggcttgaaagcccatttagggttttccggagtatcttaattcttaagcgaaacactctttaggggtttcgaaagaagagaaagaaacagagcgaaaaaacgaaaatggcggcgaacggagtagcgacggcgggacgtcaggtatcagagaaagaagctgatatccaga

SEQ ID NO: 62616 - DNA, 2021 bp, Arabidopsis thaliana landsberg
atgtgaatcgtgatcaaagggacgtagccaaatttctattattttatggacggcaaaacagtactcacatattaatatattgaaaattgaagagatccatattgatctacaaataataactctgcggtaaaataattaatgatctatctcttaaccacttggatgtctgtacctaaaactggtaatatgtcgataaatgtactgaatatgataagtttggattgtagttgccaagctatcgaaattttgttggtcatattgtgttaattatttgtttttttctttctttttacacaaacacacttcgcttattgattcgacaaacgtatgatcgacatcgttcaaacaataagaagcaaaaataaaatgcttaaaaaataaaatcgtgttttttttttcccttctaataaaatagtgttatttgtccatgaatattccttagaaacacatgagagtatctaaattataataagataataatatttttatataatttagtttaaattcattaaaaaaatcaaaccaacaatcaagtgacaagtgtgatatgaacttcttattaatatgccatggatacttaaacaagaacccttctcctattttatttttttcattagtttagtgggtgatgtctaaatttaaacacaatggaaatgctcttagaactaatttcaagaaataataagtattatacaaatattttgctaatccactcagatttgatcttaaagctgtttaagcttctgtgtccttgacaaaaaaaaaaaaaaaaaaagtctatgttagttattttgttacgatgcattttaaagacactaaacttaattattgtatcaaaatgcaatacacggacgttacatagaaacagtgtcggtcgaatcaagaatgggacgcatttgattcatgtgtttgacaaatgacatgcgtaccgcgtacgatattttccatatctcctattcaatttcataacgatgagaaaccaatgtccaaggctacaagcaatgcacgtaaccaaaatacacataaccatgatcaacgtatacgaatcaatttcatatacgtatgctttcagttttcttcaattgtctatatatattttgttcttattatctttgtaattatcctatgctgcttttaattaaaaaaatattttcataacatgtatcaccttaagacaatatagtgatgatgtttgcataaatattttagaattttgatctggaattaatatattttactttgacatatctcataagaaatctttgtcagaacttctgaatattatttcatccattatagatcttggaaaaacatcaatcattgaaaaataagttattgtaaatttttaaaaaaatcttacaaatttacacacttacacattctaatcacctcgtaccaacaataatcatttttttttcagaaacaacaaattaccttaaataaaaacagaagtcggcattaaacataggaacatgaggcaatagaacagtcattatccaaaaaagtacacttttgaacgtccaatgaggaaacttgttgataatatcttaggacttgatgactatatagcaacaccatcttgacataatgtgacctagctagttgattagacatatggtagtgtaaataactccacgttgtttattaaaattgtattacatgattgaaaaagttggggaaaagagcatataatgtcgttagcagcccacagtccaaattaaattttgaaagctacgtgactagaagtcccgctataaccgggggctggtccgacacggtctttatttgtttctcgtcttcttgttttcgatatatatggattttgcactttttgttcaactctatagatacatgaacccgcgtgtttatacaagtgaatgaaatttggtaggatatttttttttgattaagaaaaaactgttaactaactaaataagttattgacctataaacaatatcaaattgcatcctataaatatctaggaaagtatctaatctattgatacttacacacactacac

SEQ ID NO: 62617 - DNA, 1204 bp, Arabidopsis thaliana landsberg
aatatctctaagaatcgagtcaaaagcttaaaactttaactccactaatccagttcctgaagaatccatctatttttatccctcagaacagtagaaacaaaacacatgtgggatccaaatcaaattattgagttgggtaagagacgcatagacaatgaattgagggaaatgaagcaactagacagagaaagatctagcaaatgaaactttcagcaaatacgatcgaacccggaattagagaaattcaaacgtgaaagcaattgattttacacaccttttgggtttctctgtggatgatgataatttctgggtagtgagaaaccccccaacgtctttcaattctcgcccaatagtgcaaaaaccctgactttatgtaaacgagtccgattcgtgaagatacaatctagtccgtttattaatgttttgagttgatcttgaccgttgattcagctgatcggcgacgaagttgtaagtagcttttttttttcttccccaaaggtttagtttttttttttttttttgttaaacccctaaaatttccttttactctcttcttcttaaattgagtaatccctaaaatgaagaatctctaccatttccgaactagatgagattcataagaagtcaaacttacaaatacagagaagtgttagcttctgatgttggacggtgttttcacttttttgttgtcttaataattaacacaatgttctggcctctgggataggaaaaagagaatgttgtcatgaacattgacttgtattatatatataccgctttagaatacagagaatccaaaaacgacttattgtataaatcaatatctactcgtcagccaaaaccgttttctgtctccttgagtttccttgcagccgatcaatctcaccgtgcacaatctctttcaccagatctttgaagagaagcctgtccatgtcaagcactaaaccagggattgcatcatcaaagtctgtccatttctcagattggattgccatatcttcatcccatatacatttcaagaaatcttcttcttcttcttcttcttcctccaacaacaacaagttttgtgatctcttcttggcttgctttagtagtatctctatctttgaacatagttccttcaacagattttgtgcacttaagaccttctttctcgctttagcttgctgcatccatggatgtacatagctctcaacaaaagcta

SEQ ID NO: 62618 - DNA, 581 bp, Arabidopsis thaliana landsberg
gcaagaaacattaaatttttgatcatatcattacacttacacatatgcttagttttgtacaattaggacattttattgttcttctaatcagaaagttttcatccaaacaaactttttagcgttaaagctcatttcttggagaattttgaagtgttgaatttttcaatttcgtgtttgattaaagatttgacagaatcagaaaataagggttgatttagagagtttggtgttgcagattaatcaaattcataagtttttgtctatgagttcaaaaatcctgaagagtccaatcttaagatttttcagaggcaagttttgagatgatccttttgatctgaacaattatgtaattagtacactttgagccacctgatattgaagagcatgtttttgttcagtttttgagtgtaatgagtttttgaatctagaagttctagatgaactttttatgtgaataaagattatcattttgcctttgttgtcttaaacttgaaggacaagtttctgtcttgttttggctgagcttttaaatggattcttgaattctttaatttgatatctgaactgtgactgaaattggt

SEQ ID NO: 62619 - DNA, 1095 bp, Arabidopsis thaliana landsberg
  unsure (1)..(1095): unsure at all n locations
cctctctttctctctctttgctaaaggtatttgaacaagaagaaaacagcagaagaaatggaacaacactatcagaacacttcatccgttgattacagcttaaaggaaggagaaaccattgttctccaactcaaaaatgtaagatttacagttattgtctggatacatttcccacaaggtttctttttgtttttcacatcaaaatgattgaaacagagaagcgataaagacagcaagtcaaaaacggtagagaagagtctgggcaatctctcgttggaggataaaggcaagtcaatagaaaccaccattccttcaatcatcctgccacctccacctccgggaccgctttcccctgtcacaactgctcagaagtccccgtcaagtctgccgccaagcctcagcctccaaagatcgtctgaacaacaagatttagatacaaagcgagaagaagaagaagaagagaagaaagaagacctaaaagccaaagatggaggggttgaagatgcaccagatgatgactttggagatttccaagctgcgggttgatttaaacttataatcttttttaccatacacaaagatcgttttataagtaatgtgactgatcaaagtttggattgtttgctactgagagcttatcttctgtacaattccaaaatacaagcctatttctctgaacttgtgattagatagacaaaactctaaaggtttcattttctccatatacagatatgagctttgcaagagaaacatcagataaatatcaaaaaattcgcacatctcttccaattctactttcttcaactactgaaaagagacgacattgagagtgtttctctgttcttctgcaaatctattgcaaccatcaagaaatgtacgccatacaggcgcatctgcagggaaaggcatttcccgaatcagatgctcagcttccttcaggtaaccatttcttgccaaaagatcaacggcgcaacgataatgatccatttctggttcaacaccgtaatccttcattttctgaaacaaacccattccttcttttaccataccaccatgtctgcaagcagntagaatagagatgaacgagacacgatc

SEQ ID NO: 62620 - DNA, 1523 bp, Arabidopsis thaliana landsberg
ttcctggagatgatatccattatgatcttggcatctccttcaagccatagatccgtcaacccgttctctagagccagctcgagccctcttttgagggctgcgaattctgccatggtgcttgtggcttcccctatggattctgagtacccaagaaggaactcggctttgtggtttctgaatacccctccaatgctggcttgtccttctcttcctctggatccgtcaaaggttatctttatccgtccattttcaggtttcttccacacaactttgacaggctgtttgtggtagtctcggattaacaataaagtagcccgggtttgcagcaacccttggaatctagcaatctttgtgaaagctaacatagggtttaatttttttggttacagattttcttgtcgtgacaaaatggtcgactcagatttttcttctggctctatagtcgctgtgttataccaagagtaggcaatattgtggaaggggtttgttagggaaatgatccttgcaaggaaagcaaagaatgatccttaattgaattgaaagggaaggcacatttgcagaatttagtaagcagtgttatatgaggaatgttttgaagaatgattctgtttcaatggagattttaagtagaagaagttttaacgaagaaaatttaaataaacatgactacttttgtcttatccctaaaatactgaaggtctctcctcaacctcaggaggatctctctttctctctccctctctagaaacttgcaagcaaagaaggaatgagaaacagagtttacccacatttcccggaaacataagttcttatacatgaagttatgatttatgttggttctgtttacgaagcaagattcacaacagataaacaactaagaaatgattcaatatggagaacacttgtcataccgggggccacttgtcataaaaagaaaaacttagtgtccaagaaacagagcgatccccattcaaagaataataatgcgatactctgacattgtctgatacttttttcccctacatcgtggatccatagcctcttcgaccaaaccggaaatcacagagttcggtttacaactcgagaacctaaattaaaaggatcctaaagccagagacaagtaaataagcaaaccgaaccgttgaccctgttaaaattacttaagctcagcattaccggtcccggttattatattattcgacccggaccgtcgtcctcactctatccctcagcttaatccgccgccgttggttcaaacgacggtcgtattgatcttcactgattggatctttataatccgtacaaactcccggagctcttgggctatcaatgtccgggattgatggagctatccaaaccagctgctctgttacgcacctctggaaccacggcgataagcaaaggcgtcgaattgactcatcacgggaacttcattactttgctgttatttccaagcaaaggattgtgagaaagtatgttcatatagtacatgcaggagtatgttctgtgctgaaaatgaacag

SEQ ID NO: 62621 - DNA, 459 bp, Arabidopsis thaliana landsberg
tctaagggctgcaggctaaatcggtattgaagaggcaccatatgtgaacatgctatctaatatgcacgcgtgtgccgaagcgtcgaagcggacaaacaatgactatacaggacaaggccctggccggtttggtgtagttcataatgcataacctaccaagcaacatggaggcataaagatgctggaccactctaccgtctgacaatatatggcagagggccaaagacgtaggtgggtaaaaaaacaacaatagatcacctacttataaaaggtttaatgattgggtggccaatgatgtgcacaagttggctacatgtggctacagaagcttgatgagcctcattggacattgcaaagctggtgagcactatatcctaataaaacaaatctacgcagaagtggatttggaggagaaacaatctgggatgaaggaacctaccttctaagaaagctttgaaa

SEQ ID NO: 62622 - DNA, 560 bp, Arabidopsis thaliana landsberg
  unsure (1)..(560): unsure at all n locations
tgttggtgttgggaaaggagactcaagtatggaggcattgcgttgggctattgacaatctaatgacttcttcttctactcttcttttcctcatccatgtcttccctgagactcgcttcattccttacccctgtttgtatatatcctctcgtccatttgttaactttgattaaatgtgcgtccgactcaagtgtatgtatgattcgtgtagtggggaggataacgagggagagagcaagtcaggaacaagtagaaagctttatgtctcaggaaagggaaaagagaagaactctgttgctcaagttccttcatgcctgctctgcttctaaggtcccatttctctctctttctctcttttggtgttgtatggatggttaagagtgcatcaagatagttagctaacatatgagcaagtgaggaacaggtgaaggtggagacattactggttgagagtgactcggtcgctaaggctgtacaagacctcattaccattcttaacattaannnnnnnnnnnnnnnnnnnnnnnngtctaatgctaggtatatcacacaaagatgaac

SEQ ID NO: 62623 - DNA, 645 bp, Arabidopsis thaliana landsberg
gacagcaaacggttcgggtgtatttcctgtaaacacactccgaaccagaaagagtgtttcgggttcgaaaggggatctctatggtttcccccgagccaaacttgggagaatctagaggttaagatatcacctcggggataagtaattcatcttccatcacgccccgagccacaatattttacgacccaaaaagttcttcggagcgccatcaagtccaaatcttgtccgaggcaaagatttaaaaaattcaaatcgaagtgttattattttcggaaaacccgaaaatgatatcaaaggatctccgaagacgtatataattttttttgtgaactattacaattattaatggaaaaaacctcgaatatgaaattataatgagaaaattccttcgtttaaacccacccgacatatctagcttaattgatattatcgattttatttgataggaaatgacagatattgtttctttagactttaaatattgcggtgtctattttattgaattaaacatcactagtcgcaatttgaaagtcgatctatatatatatatatatatatatatagaaaatagagccggctttgtgcttatctgttcaagacatatccaactcttgtttattttttggctggttaataacctttgca

SEQ ID NO: 62624 - DNA, 1047 bp, Arabidopsis thaliana landsberg
gagcaaccttttgtaacgggagacaagaagattcttagacaggtgagtaattaaaaagataccatttttactgtaagaatgcctcaagaacattccagaaacttcataaacctgaattgttgcgtaaaatcttgaaggttgcaagcctgcttggtgtacatgaagttgcaaagatgcctaagagagcaattcaggtaagaagaagagaactttctgagagaactcagtttcaaacgagtaaagttgaaatctttttgttgtgagttctctctctctcactgttgctttggactttggttgtggttttagtttggatcaagaatcgctcgtgaatcaaaccggaagaattttggaagtaaccgtgccgcaaaccaggcttctgccgggagcgtgagattcctagcaccgtcacactaattccctctgattcatgttagatcaatcattgttatacattgtatcctatacaaagagacattctttcaatgatctcaaaactggtttgaacactgaacacaaatggactaataagaggacatgttaagacttaaaccacttggttcggtattttgctcaatttcaagggtaaaattggaaaaatcacaagaaaaacaaaagccctaacattattgtctaaaatcaattttctcctccggtggtgatctctgtgctccggcgcataaacccctgtaaagccaataacttgttgttccccaaagtttggttcttcatgttggaaaccgaaagcagtgtctgcgacaacatcgccggcaatgagaaatggcgagcggaagctgaaattggtggcaacgagagagctctgcaagcgcttcgagaactcattatcttcccttttcgttaccctctcgaagctcgaactcttggtctcaaagtacatatatccacacctctgttggactcatagcttctctctttcgcttaatttgcttaatttgacttatcattgcagaggcctagaggattgcttctctacggtcctcctagaaccggcaaggtaaaaactctgtttctgtttgttggattttt

SEQ ID NO: 62625 - DNA, 761 bp, Arabidopsis thaliana landsberg
gctcgcgggagcttgccaagccccgcgtcggatatttcccaaggctgacctacgtccgcaatttttccttctgggtcaaaacagtatctcacgacgtcatggggaagatccttcaatttttcaactttccctgcttgggcaagactgctcgcgagaatagcaacaagataggcaatcccgacgtaataatattttttcatcctaataagctgtccttctgaatccttcgagaggcagcatgatcggattctcataattattcacggtgttcatattcaaaaatccgtcgtcctttgagctagccctggtgagccttcataaagtaaagctcatccgctcccttaatcatataatcagacgaatggctttgcgaagcataaataaattctgattgtacgccactcgcggcgagctaagcgtcctcattgtaaaagcagctcggccgggtcacttcgcgggcgtcaaatttatgctacggaatagttaggctcagaggtcagctccgcagtttgggcacttctcgttcgaaagccaaagtagagtcatggcgccggcaggaaagcttcgcgagagcctgtatccgcatttcgaacatctaattctgatgcagaaccaaaagccaaccattatggaaactaagccaaatgccatcccagcctcactattaactagcctagcccccaccgcgccgacgagtgcaaacatcatcgccaaagaaaagataacgagcgacccgcgtttacttttacccaatactccct

SEQ ID NO: 62626 - DNA, 603 bp, Arabidopsis thaliana landsberg
gcttacgataaagcaaagatttacataacctgaaatgtgtgtgaacatttattcaagctgttatggtgctatggttcacttccattgaaaaaaactttactgctgtccaagattgagtactatgatgtaactcaagatctctgtgaaagggctaacacatggacaaaacggtcaatactacacataattacatgagacacatggatgcaaatacactggtattagtattacactatctattgaacaacttagatgttttaaataagtatataaccatgcctttttccgcaagtctcattatagacttgaattgaataacttatatcatgcatttctgcaacattgtagatagctttctcacgtccaaagaacatagtttttattcggtgaagatgtgtgacaggactaaaatcacagtccatttctttctataccgcactatttctataaatatctaaacccatttttggtttgttcatccggtcaagctttgtaaatttcaaccttggccagatgttggaccacacaaaccttgtgtacacatgtgtcatttgaaaatataatcatagtttatcattaccttatctcattttctcctctctc

SEQ ID NO: 62627 - DNA, 613 bp, Arabidopsis thaliana landsberg
tgtatacacattatgcaagtcgatatctaaaacttacaagtttattataaatacatccttagattcttaacgacccaaacccggagacaattcgatgaacaagacgcagccggtctaagacatgtccacgtataaactactttttctttttgttgttttaggtataaactacgtttatatttaaaaatcattccattatcgtatttagaattgtcacttaacattagcataacggcgattgggtcaacggattttagcataaaccggccggtttaatttcgatgtaagcgttgatggatattggcaccttcgaggagcctataatccatgttatctaatccaataagtaaagacagttactaatgaaaacaactaaaatttgtgccatcaaaacacaaaatttggagaaggaatattctagcctaatattgatatgctcaatggtaccacatctatgaattcgtacgaatacaataatcatatgtttaacaagtgaatggttatcaatttcctgacgagttgaataaaaaacgaggccgtccaagttggtggtagtgacatggtagcgaatacttattatgtacagagaaaagaaaaatatatgatttttaaa

SEQ ID NO: 62628 - DNA, 1304 bp, Arabidopsis thaliana landsberg
tcttctctctgatattacgcgataatgtgtacttatagtacatatcctgcttattatcttgagttaggttcaagctcatattagttcaatctagcttggtgagatcttggatattatagtattagtaaaattagattcattttccgttgtaactaaacatcgaaaaaagaaaaatttacttctattagtatagtggtaggcgtcagagtgacccatgacatctgagtgggaatttatatacaaattagttttacctaaatattcatttagcagtactattaaacattcctagttaatactaatctaaacccacttgttggatcgaactcacacatagtggttacagagtgttgagccaaaataatcgagaaatgaagaagagtcaagtatcacaaacaataaggctttttgtatacatttgttccttaacaagtctttatgaacactgcaggaaacaaacaaacataaatgacatataatttaccaatgaagcctaaagcatgacatataatttaccaatgaagcctaaagcttgcaccttgcattagcgggtgagcaaaatatgccccaaccgttaacgcagtgattgcaagatatggcaacctgacaaattctttgtagtaatcctcaggtaaaacttgccgtccttcgaaaatggcagcaaatggaatcacacttgttctcttcttgatgctttcaaaatcctctccatatctttttgccaatctcctgtctccattccacgccccaaacaaatggtgtgcaatcaaaccgagagaagctgatgcagctactgtgtttccgatccagagagtatgtgctaaacaccaaacgatttgtccaaccatctggagaagatcagaggagagaggtgcaacaatcaagtctcattaacaaagccagtataatgaagagagaatagaacaaaccaaaactgaagctaaaatgcctatctttctatatattatcaagtttttccaaacacatgatgaagcaattggataagaattttaagatcaaaagcaatatcaagtaaagtaatcaagcattgatgtaataaacatagaaggatgaggagatttgattgtgctgatgtaatgggtgtatttaagtcaatggccaatacctgcccataattgattcaatgattgggggtctcattaacacagccactaataaaccttggctcataaaaatccaatctttctgtatttttgaaacacaaaaatgaaggaaattgtcttcatgtttaggcacattagggaaatgttcaaaacctgtggatgtcgagtgattctcatgat

SEQ ID NO: 62629 - DNA, 314 bp, Arabidopsis thaliana landsberg
aaaaaaaaaataaaaaaaaaaaaaaaaaaaaaaaaaaaaaaaataagaaaagaaaacaaaaaaaaaaaaaaagaaacaaaaaaaaaaaaaacaaaaaaaaaaaaaaaaaaaaaaaagaaaaaaaaaaaaaaaaatataaaataaaagagaaaaacaaaaaaacacaaaagtcaaaaaaaaaaaaaccaaaaaaaaaaacagaaaaaaaaaaaaacaaaaaaaaccgcgaaaaaaaaaaaaaaatccaaagaaatctaaaaagattaagaaagatataaaaaaaaaaaaaaaaaataaaaaaaataaaaaaaaaa

SEQ ID NO: 62630 - DNA, 1493 bp, Arabidopsis thaliana landsberg
taaagagtatagttgaagatagttggctacgtactggggatattgcttattttgatgaagatggttacttgtttattgttgaccgtattaaggagattataaagtacaaaggctttcaggtaaaggaacagcagtttctctttcagccaactctaaattaggaaatattaattctttgcatttatggtttttgcagatcgctccagcagatttggaggctgttcttgtttcacatcccttgattatcgacgctgcagtaacagcgtaagttcgaaaaaacaaatcttgatcatttactaaactagtttaataagtgaaagatactgcaaatccagttttggagaattcgacagagtctgttactctactgaaagtatccaaactttccatttcagtgccccaaatgaagaatgtggagagattccggtagcattcgttgtccggagacaagaaacaacactttcagaagaagatgtaataagctatgtagcttctcaggttaggttcccactaattcaaaatggcttttcccatttcaaaacactgatcattaatgtaatacattattatacattacgtgttctaggttgcaccctacaggaaggtgaggaaagtggtgatggtcaactctataccaaaatctccaactgggaagatattgagaaaggaactaaagagaattcttacaaactctgtttcttcaagactatgattctttcttcatttgtttggtaataagtagcacacagagagatccactaatatagccttcataattcaattcattggttttgtagcatcaaaagaaataaacagagacattctttgattctcagtgaataaagcattgtaacccaatacggaaacaaaaattctttctgagcccaaaatgtaattttagccttagtattttatttacataaaagtccttttaatcgttggctattgcatttatcgcccaatacttgtctttgagctcaagaaatatagtttactaaaaggctgggtttttctggatttcttactcccaaaccgatacaagatcgaagctttgccttctgtttcttcgagaatctaccatggctgctctacaataccttgaatcgcagaaaaatgcgcacccagagcttggtgagtggtacaattcgctcgcagatctgtaccagaagaagctctggcatcagctcactcttaagctcgagcagttcatcgctctctctgtctttcaggtcaatctcttgaattttcatcgtttcgtagttcttctgtgtgattagggttcatagatctcgagaaagttaataggagtcgtcatgttagacttgggtttatagagagatctgaaggattcgttccgactcttaggtgatttttcagattcattgaaaagctttgtattggtgaattatcgcacttctgtgaccaaagctttcgaatattttagctcagagatacccaaaaactcagctttacaaggtttacagatttgttaa

SEQ ID NO: 62631 - DNA, 740 bp, Arabidopsis thaliana landsberg
acaccttatttaactatctcaacaaaaatattatttttcaaacgattcaacatctcaacaaattaaatatttatttatataaatacctcaatgttgggttccccttatatcccttgatatatgcccgtgagacgtacaatggcgggatggaagtgagttacacttgctctgcaattagggaaagtgagtgtagatggatccgtgaggtgtgcatgagtcaaccgagctgagataaattttcttatgataaacacaaaaaattgtgacataaataagtatattatcatttagcatgcatatccaaaacaagacaccatttatgttgtatctcatctgcaattatacattatgatatttcttttgaaaattacatagtcgactattttaaaaagtcatcttcttctacatgaaaatattattgtttttgcttcttataatacttacacatctaatacttaaataacatgacctcactccttaaatgttattttgaaatgttaattttgtgatgtaacatagatatcgtcttataaaaaaaaaacttaaagtgtactttaaatatgttgtttgtaccaaatttgtttgagttaaaataatttgattcaattgataaagcctcatacctatttttctttttgattaatagttgtactttccacttgaaaaatatactttttttcgagtatatgctacaccccccccccccaatttttctttcaagaaatatactttttttaagc

SEQ ID NO: 62632 - DNA, 1681 bp, Arabidopsis thaliana landsberg
gagtcggtattgcagaggccattgcgctatctctcgggtctgatttcttgatggatgtcatggctataccttttgtaggggctctgggctcacgttgaacttcttttatataagctgttatctttgaagttttgtatagctgatcgctcttctttctcggtttgtaatttgtttaggattcaccaatgcggataccagcagagcagttcctcagacttcgagcgtatggtgcaccaccaattgttgttgcattggctgcgcaaggagcttttcgaggtttcaaggacacaacaacgcctctatatgccgttggcaagtattgcacaatcatctatttttttttgtatttatgcatgaatggatctgaggaaataaatagtatatgcgcattagctcactagaccgtatatatgcattagcagtttcacatacatgtttctaatatggtgaactctatatcaccagttgcggggaatgtacttaatgcggtattggatccaatcctgatatttgtccttggttttggtatctctggtgctgcggctgctactgtgatttctgagtatgtccaaaaatgtggtaatagactcgttttctagtaaagcatatctatcttaatttgtggcttcttatgtttctcacttgtcaacgtttcttcagatacttgattgcatttattcttctatgcaagttgaatgagaatgtagttttgctctctcctcaaatcaaagtgggaagagccaaccagtacctcaaatcaggtaattccttaaaattttcaagttttctttaaacgattcagaaaggctactatatgaaatgtattgattcatgcttaggtgggcttctcattggtagaacggtggctttgcttgtgccattcacattagctacttcgttagcagctcaaaatggacccactcaaatggctggccatcaaatcgtcttggaaatctggttggctgtctctttactcaccgatgctttagccattgctgcacaggtctattatcttttgcaaatcatcttcgaaacagacaatctctaccaagatttactgtgatataagaatcccattagcatgatccaagattaccttttggggagaagattttcacttatattttctacctctattttcagagtcttcttgccaccacttactctcaaggagaatacaaacaagcccgggaagttctcttcggagtccttcaagttcgtattcataattcattacatccctagtttatatcctaccctatatattcgatgttataatgtacaattgcaatcttttaagtaggtaggtttagcaactggaactggtttggctgctgtattgttcatcactttcgaaccattttcaagcttattcacaacggattcagaagttttaaagattgctttgtcagggaccttagtaagatcttatcttttaatccagaaagagtttgaaaagggtagtctcagacaatatctaaataatgttggctggatgcagtttgtggctggatctcaaccggtgaatgctctagcgtttgttttggatgggctctattatggtgtctctgactttggatttgccgcttattctatggtcccttttccttcttcatcaattgggtcgtttgattctcccttttctttaactggaaaaagttgattatttctcattttggac

SEQ ID NO: 62633 - DNA, 1631 bp, Arabidopsis thaliana landsberg
caacaaaactagagaaaatcaaagttggaccgaaacttagtgtctcctcctcagtgccttaacatcagtataatctaagatcctacatataataagatcaaatgagatgttaagaagggctagaactcagagcacataccatattctttggaaaacaagaggacaaaaggtcctcaagaacggatgattgtcgtctttcaagcccatctgagatcagctttacagcttcttccttgattgaactttcctctcttggcgcatatactgaacaaattcttcaatcagttgaaaaacgagacaaaaatggacaaaagtgtgggtggaattttagaagcgtaaccccaccatcggaaaataagcttttgttttcattaacagcaactatttgttaagacatcagaaactagaagagactaggaaaatagggaacaacaaaataacgacttacatgcatgtatgagaatacgctttgtacactttagtaggcactggcgctgtatgtaatactgaagcagtatcttcaagaataacattagaatagaaggacagcaaaagtgttagcaagaaagctgaagagaaaagggttgaaaactgcttacataataaagtcattggcaaatatatacgtaggacaggagctacagagcttacactataatgagctatagaacttactatagagaatcaaaagtagataaagctggtccttttatgttattgatatggccatgatagcgaaaagctccataatacataagtaacaaattacagaaaaagaatgatagcatactgaaagagtatttcttgagttctttctaagaatttatatcatgaacaacaatcggaatattcaaaagaaatcttctaaccaaaaaacaggaaacaaatatatttaaaaaaacttgtgaattctaactcatagatgatcaccttcacaagattctacccatacaacaaaacattgatttatctgcaagaatgaagactgaaaattccaaaaagaagctgagacacgtaagctactaaccatgtcaatgaattcttgagttagttcttgagctaccgagtcagttgttccatattcctgctccatagatctttccacgaggatgtatgattggatttcatctagattctggccaagatttcaaaaattcagaaaaaaaattcagaaccatgtcagtttttttctccacatccattctacttatataatcattttcagaaaacaaattcagaaatccacatccattctacttatataatcattttcactaatacagcatatatatgaagcctacatgcttgagtgaagactattttgaaatagatgataaagttttctttcgagttcaattgaaaattgaagagtggaaaagaagctaaccagatgagagctgattcgaagcgctttatctttcaattggggctttatcaccaactggtgctccttaattttgactagatccgaattcaaagcttcttttgatttctcactcggtggcttgaacatcgacagagttccaacgaaccacgcgtgattctcctccaacttattcgcctgaaattgatagagcagaccaaaatagcaccagtatcccccacgaaaacacacaaatcgcatacgtata

SEQ ID NO: 62634 - DNA, 654 bp, Arabidopsis thaliana landsberg
accttcctccttcttcagagtaccatcatcatcatcagcatcagaatcttctccttaatatgaacacgcctaatttctcaaacccttttctcaacaactctttaacggatcaaccgaaaccctcgagcttgagaacgagtaatggttttggacacgtggacgttggaacaaactttgaggggcttcacaacattatcgtctcttcttcatcgtcgatgacacagccaaccctaaatactatccatggaccagaaaagagtactgaagccgaaaatgataataatatgctaagatccatcaatggtaatgatcaacccatggtccaaagatccgatggttacacacaacctggtgcttctggatccgagaataatctatcggccgtgagaagtgaaggtatggtggaattatcttggatctcttcttctgattagatgcatctaacatttttacattatggtcgtatttattatattacttaccataaaaaacggattagaaattctaagcgaaaatatatgatgaatggaaacattaattagtgtatggaaagattttggaatcatttgtgttataaaggttctatggtctaattaacgatgacttttttctacatatttcgaacaatgaggttttttttttttcctttttctt

SEQ ID NO: 62635 - DNA, 1485 bp, Arabidopsis thaliana landsberg
tagaaatcttagtcatgcattcttctctctgatattagttttgaatgatatcttcttactcatgcgacctagacactcattaattcattattttttatttttttgaaaacgactatcgattgaatatctcaagctagtctctcatgatgtactttttatgcagcaatcttacagtttccagcagtacataagaaacggcctgcaaagtctggatatcgacgtacagaaatcacgcgtaagatattttctttagataacctcgtccgtagtttttactttttttgctatgctgcatgtttaggtactatccttgttactatccaaagtgtttccaacaccgagctgattgggtacttcaatagccagaggttctcgtgtatacttacttgcttgtgattacttgcccatccgtctctgcaatagtgttgagttctgcagctagctcacaaaatctagagcagtatcataggctcttggggaaatattattggcttgataaccataggatgtgggattactgttctttttcattttactaactttactgtatatattacctttcttctttctggatccgtaatgtgcttacatatcgcctagaaaggcattttcgctctacgttttagacctttcatctctgtttcgttcttgttgatttcagcatcaacttgggaaatcaaaagcttgaaaaagcgcagcgatgcagaaactccaagttgtcttgtaacacacatgctagaaatccactctaaacgttggtgcaaatggaagaggaccagctactcaaagtttgaaaagactattccatatgcattactcctccaagtagcaggttagatgcatgcctcatctccttccagatcttactaagagtatgaacacaagaaatgagtaggaagtctagatgtgatatctgtggtatgtatgatatgtgttgaggaatgagaacttgtgagcacatatgaagattagcagtcactatatatccgcacatctttgggataataatacatgtagtatgcttcgcctttattacaattggaagcttctttttttgggcatagaagttaataaactttatttggcatgctgttgaaagtaaatgcctgacctctaggtacaatagatgtcacaagttccaaatggtttttgtttcatgttcttgttaatgatatatcaggtctgaaggagtacattggagcaaacccagccttcaagtatgaaacttccgccacggttgtccagtccaagttccaagatgtccccaatggtgaatatgtagatgaagaaatggaggagcagttttatgatgccacggactcatcatctggagaagaggatgaggaggaaagcgatgacgatgatgaaaatcaggacaataaggtaactatttggttttgatatcctcttgtcaataaataattaaactttcatatttatagagtaaagaatcatgaacagaaataaaaaacgaaaagctcctct

SEQ ID NO: 62636 - DNA, 1276 bp, Arabidopsis thaliana landsberg
agactgatgattcggataccaggctcggaggctgttagcgaagcaagagaagcgtcggcgtgaggagcgtaaggaagattcatggagaggattgtaatcatagaaatccgacggtctagattgagtagacgctttccaaactcgatcgttgacaagagatggccggtctccggcagaggaacgaatatgagctctgctgtcttcatctctttacttttttttctttatgatttttctactgaaacgcttgttgctttggtatgtatgaatttatgacatattgatatggtagtggagtcccatgtgttaaactagaaaacaagaaaaactgattataataataattaggcttgacaaatttgtattttaatctcttgtttgggaccttgagcatacaaaagtggaacaataaattagcaacattattgcttagttagatctctggatctcagacattcagatatctgaatgatgtgtattagaatctccattgcagaaaaagaaacagcgagacaattattataaattgacgctaaaaagagtagtagagatatcctactggtactggacttgaaacaaaagttgaagtggaagacagcgaattttattctctgtttctttggccaacaaaagtgtggaacattgatttggcaaaaatcaaaatctctggttttgaatcccccttagcttagttagtattagttgtccgtatcacttaatgtctctctaaatgtcaagagatgaataggtttagtaaaattagtatgtactgtctgatctggtgaccctaagtttttaatttaaataaccacttcttttaagagagacgttgtatatgatttatatacgaatgtgatattaggtgaatatcgtgtcatccgacaaaacacgcaaaatccatgcatgtaagtaaacacaatgtaatgcaattatcaagttaatgtaatgcaattacctttgattaatcgaggattttgtttctttgacttggtatctagttttgggatttttcctgacccaaagtcaaacgtagtttaagatagtttttatgtttagaaaaggaattttagatccaaagaggacttttttcagcttcattgctctcttaaaatctgtggtaatctctcttccattgttattcttcaagtaaataatgccctttgctcctctctcaacaccatttatcttataaaccctagacaatccgccgaatttttacccttctccactggtcatccgcgttttttttccgggtctaaggtcaccggacaaatgg

SEQ ID NO: 62637 - DNA, 931 bp, Arabidopsis thaliana landsberg
tgaatgtgcatggtttaaatttctaacgtacgaaatgatgtaaccgtttccgttatataaatgtccaaaataatgatactctacccactaaagaagaaattaaatagggaaacaaactaaaagtacctctttcagtttgatccaaaaaaaacaaaaaaacaaaagtacttcgtgtaaaactccgattttgtaaatatggtgatgtatttcaagaggtttaaaagaattgatttgagtatttatgttacaaaaaatgcatttatttttttgggccctcacaaacaaaatgcatcatttcagaaccccacaactaagcttttttgagatggaacaatttcatgattgatgacctaccccatagtaacttttggtaatgtgtgagttgaaaacaaaatacaaaaaaaaaaactcatggtaatttgtatggttattaaacaagtctttttagaataacgcatcaaccatcggatgagagtgtagcccacaaaccaaaaaaaaacgtgggaatgggacattagcagtacagtcgggggttacactttgtcatttaggtgtcgctatacatgtgcatgcgtgctttttttaattaaaaaataaaataaaaaacaggttgaataattcgataagtaaataaatacacaagtaaattcactaatttcctgccgtgatttggtttaatgctttaatacaaatgttttcttttgaaattaaggttgcgacttgtgagttcttcaaagttgttttttttttctttgaaaataacgttaatttatattataaaaaaaacataacgtttttacatcgaatgcaacgtgaatttgagagtctgagcttaaaagaaatttgaaaaaatgatcacactctaagtgattaacttatagacttgaaccaagcttggagggcgccatcgtatctcctatctcccttgagt

SEQ ID NO: 62638 - DNA, 810 bp, Arabidopsis thaliana landsberg
caacgagttgagagaccgtgttcggaggctcaccgtgccgtgttccaaagttgttcttgagtttagtatagaacaacacgattaaatagctacttatactaagtatagaccacgatatggtcacacatgcagattatttagttttatcaataactacattaactattgtctttgtatagtgacacacaccaattaacatgccttatatttgcaacattatacccatctttttagtcttgttccagttcgtacgttggaatccagtaccatccggtttaaatccaaacctgacgacccaccaaaccaatccaacttgatccaaaagaagactaattaaaaggtaagagaacagttatatgcttttctacatttgaaatatatgtggtcacgtgtttactacattcaatagtgagttgagctcattcccaaaattagtttctttatgatttttttcagtgtagaataagtcaataacataattaagagggcatttctctgagaaatactataatgcacatggctgttcggctgtaattttcttgttttgggaactccagagttctatatcttaaatgcttgcgttcgattatttgtactagaactaagtactattaatgattatggttatgatgacactcatcattactgttgtatttatggattgcatggaaataaccaaatgctttaaatagtcatgtgacgaaaaccccttgcttcgtgggctacggtatctactgattttacatttgatctaaatccataatgttatgtacttatgttcaactgttatcgcaactttttataagtcaa

SEQ ID NO: 62639 - DNA, 607 bp, Arabidopsis thaliana landsberg
tatatcatgcatataacatataataaatacaaaaaaataaataagatatactttatatatatatatatatatataaatggacctacaataaaagtctataataatttagcgttaaaagaatatatgaaaagaccaaagtaaaaaattggattattggaggtctttttgtctcaaggaataaaggagagccttttctcatttttgcatggcaaaaagacattccattttcaaaaaaatccactactggattccttcaacttaattatctgacccaattatacaaaatgaattccttttcatctttattttttagaatggtccaactccaaccaagtcatttctttttaaacaatctttgttttgctttttgaaaattcgtccatagactcactgtcatgggttaatataagttgtatgtgcaaaattactatactctaatatttacttaggcaataatatgataaatctctgaaaatactcttttggttcgtgaacatttggtattttttttataataatgttattgtgtaaattagcctggaacaataattatatttgtttactagttatattagacacaataacctgttatcgaaaacaaaatttc

SEQ ID NO: 62640 - DNA, 2195 bp, Arabidopsis thaliana landsberg
  unsure (1)..(2195): unsure at all n locations
gaggagagtcctttgttaaatccaacagaggaaaattgcattccacgagactgtttattcctgtaccatcaaaagatgaaacaggatcagagaaatttgcttttggagtaactgatcgcattgtggactgcaattcgtcttcaaaagtggctttgccgaaaggtcacaataaaatccttgctattagggtcctcaggtggtcgttcaatgatgtgattcatgcatgtggacaatctaaaaactctgagctagcggagcagctaatgcttcaggtatctcccacttctttcccattcatccatttcatgtccttatccactcgctatgctctgtgcgtgatactgtagagttatgagaagaaaaactctttgaacatttgtagaagacnnnnnnnnnnnnnnnnnnnnnnatagtgggaattttgatcttctgtctatgaccttgatttaaatttcgaagctttcatgatcattgatacgctctttacgtcctcgttgggctataaaagtctgttatatagtccgcttcccttttgtcctttaactggttcgggtcctgctttgtggtatttggtgaaacctcatttctttctttcttcttatctgcactaaaagatgcaaaatcttgggttgctaccatcaagtcacacatatgatggtttcattagagctgttgcatttccagaaggatatgaatatggcatgacactggtaggagtttgtataatgtacaagccatctctttcaacatttctttctttctgtagtttcggttttttttataacgatttctctttatatatcatatctcgacgcagttgaaagtaatgcagcagcagaatctgaaaccatatgattcaactctagctacggttgcagcctattgcagtaaagcccttcaagttgatttagctgaacatctgctggatcaaatatctgaatgctcatactcatatcctttcaataaccttcttgctgcatatgactccttggtgagttagtttgattctacatattgaaagctatataccgtagctacctcgtttacctttcgctgtttgtgtattctgttacaagtatatttcccgaaccctcaagttcattagtttgatcctagatgccatagaaatttcaaaagaccgtacttgtgactatgttgccactctaatcataggagagtcttggaacaaagggttaatgatctgttctattagtttgtactcgaaatattcgtacaaaaataatcggcattctaagtggttgtcttgttagtatgtgtccatttttagtacataatccttgaacctaaacaactttattctgtttatttacgggtgtaactgtgagattcagcttcttactattgctttgtaggatcaaccagagcgtgctgtccgagttttggctagaatgaaagagctaaaactgcgtccagatatgaggacctatgaactgctcttttccttatttggtaatgtaaatgcaccatatgaagagggcaacatgttgtcccaagtagactgttgtaaaaggattaaccgctatagaaatggacatgatgagaaatggttttcagcacagtcctatctcaaggctgaatgtggttagtttctgctccatatagataggtcttgacctgttttaagcagattaatcaaatgtaatattaatctggaaaatcccttttaaggcgatactatcaatctttacttcttcattgtgtatgtttgtgttatatatcagaacaatggacttatcgtttacactttcctttttctttcccagcttagagctctcggagctgaaggtatggtgaatgagatgatccgacacctgcaaaaggctgagaacctcagtgctcacagcaatatgtatctaggaacgcctacatacaacatagtgcttcattcacttctcgaggcaaacgaagtaagttttcatggtctaatagctttatcaaatttccactggaccagcatatatagcaatattgatcgctacttaaattacatgcagactgacatggtgatcaatatattcaaacgtatgaaatcatgtggctgccctgcagacgttgctacctacaatataatgattgattgttgcagccttattcactcgtataaatcagcttgtgccctagtttccataatgatacgtgacgggttttctccaaaagctgttacatttactgct

SEQ ID NO: 62641 - DNA, 357 bp, Arabidopsis thaliana landsberg
tagcgaactattcgtgaatctttaaagatcgtggcatttggccagtcaatggccctttagttgtgaataatcttacacgacagttggttattcctgaactatatgccccggatcttcgatcggctacacgtacaccatctccagcgacagatatcctatcttctagcgtggacaatagccctcctaatactattgaagcgctcgagaggaatcaagcgaagatcctaagagatcttagggagaatacagtgaaggcgcagcgaaacatcaccaaaaatttcaaacaccagctagataagcttgaggagcttgctatgacgcaggattcgcttcggcgagttcgggctgcgcaagacc

SEQ ID NO: 62642 - DNA, 673 bp, Arabidopsis thaliana landsberg
tttttaagtaaataaaggtattttctttttgttggtagtaaatataatcaaggtatagtttgattaatcaaaattacatattctgattgactacatctaatctattgtgaaaacaagtccatacacaaagatataaattaaaaaaacgtacaataaacttatgcgaaaaatctgctaaatgattattgtgacgtgtggaaaaagatattatttaatagagtaggccatttagctttaataaaatttgtatcatttgaatgtgtttgaacttaatgcatacggttctctcgatggtgatgcctcccctctatatttttttctctcttttttgagtattatttacatacgtacaaacataagtaatgctcatatatgaatacttgtttactactattcactcacggattaaaattctattttgttaaggtatatgagtctttaaatacagaattttccaattatacacaaccaaattaatatttgaccaaatatatgcaaacttcgatacttgtccctgtttttttttattacattaactaatatacattgattataaacaacaaacacatcaaaatgtatacataattagatcaaaaataaaatgtatttttcttcatccttgaaatctattactcattatgaatacaataatttaaaatttgggtccattttg

SEQ ID NO: 62643 - DNA, 541 bp, Arabidopsis thaliana landsberg
cgtaatttaatatctattttttctaatgagtcaattgcatctacggtccaacttacaggacgcatgttttcatagatgcaatccctcaaaagcaaaacttgggatttaggtaccgcagatggtaaagataaatcatgagtagatataacgaacgaacaatcaggtcgttcattcaaaagtgacttaactaaggaatgtgaaattgaaggatgcaaatgcctctctggttcatcaatcaaaaaattagttccgtttggcgacgtaaaaatagcaattgctataaatatggcattcctttctccatcagaaagttgcgccaaactatactcacttgaattatttctagttaccattaatgaatcagtttcatcgactctgattgttatattaataagagcttgatttaaacacctattgattttgtctattggtgtttcttttacattaagatcttttcgttcatcctgtggagtttgattaaaatcttttacaaacattctggccgcattgttttcggcaacaattatttggttgagcagta

SEQ ID NO: 62644 - DNA, 657 bp, Arabidopsis thaliana landsberg
tgggaattggtttccattatatgctctttttcttatcgtttatttcctaagatatattatttatatacaaaccaaatccaagaacaatcctttccccatatgggctatggggactgaagaggcagaagatgaaaaagaaaagactgtcctcatatactaaaatatacgcaccactagatttcattcatcgaatttgtaactttactttaaagtttgactttcttttccttgagaaaacaaaaataatgtagatgataattgaaaataaactaatttttctctgaaatcttgtttccacgacaaaaagaaagtttacaaattaaacaacgagtcataggattttgtacatgaaacatgtgcattaatggaaagagattatatgattattacaaagattaaaacagcaaaaccgcaatcacactcaaatttacaaaatgacagaacacaaaaaaagagagagcctaattctattgagatcaaagttgggagaaatgaaggagaaacaaacaaacaaacaaaaaaaaatcccccatttagggagatagtaaaattaccagaaagatctaaactctttattagaagaaagaggaggaggagtgatctgtgggacagtgaagccaccatcatcataccatcttttgttgatctgtccttgca

SEQ ID NO: 62645 - DNA, 529 bp, Arabidopsis thaliana landsberg
  unsure (1)..(529): unsure at all n locations
ggcgatgtccagctcaccgtcgaggcgcagcgcggtcgggctgttataggtcaccgacttgccctcgtgctgggcgangaaccacaggcgctgctgggcgtacgacagcggcacctggtccgggcgcggccgtgccgcgagcggcagccgcgccgggccggcctgcgccagccgggccgccagccccgccggggtcggcgcgtcgaacaccatccggaccttcagctccacgcgcagcgcggcccggatcctgctcaccagccgcaccaccaggagcgagtgcccgccgagggcaaagaagtcgtcatccgggccgaccgtctccacgcccagcacccgggcgaacaggccgcacaggatctcctcctgcaccgattccggcgcccgcacggcggcgacggcgtagtcgggagcgggcagagcggccttgtcgagtttgccgttggcggtcagcggcaacgccgccagcacgaccacggcggcgggcaccatgtgctcgggcagctgcccggccgcgtgctcccgcacc

SEQ ID NO: 62646 - DNA, 306 bp, Arabidopsis thaliana landsberg
ctctacgtgctcttctagaaaaggtaaaccagtaagaaaaagagaaggacccagaatttcaaaaaggtaacaaaggttttgttttactttgagaaatggtaatgtgggaaaggagacgcatcttgttttgaagtccacgatgttattatgatgttcccttattctatatgaagttgaagaaacagtagtagagattacgtgtactccttcatttggtatcatttctgacctatttacacaatgatcataaattacttgctttatcttgagtctcaattgaacatacttcctatatgtttagagttt

SEQ ID NO: 62647 - DNA, 554 bp, Arabidopsis thaliana landsberg
  unsure (1)..(554): unsure at all n locations
taatatcctctcgcgtactgcggctgggtgagaaatactgatacctgactgcatcaaaggtattctgctcttcgggccatgtctgccaaacaaagccagacggaccccatgatgactcattcggatacggttgtcccgatgcctgaaacaaactcggattaaattgaggcacaatgagggaatccgtgctcgtgctgttcatgtgtcgtacaaatatgccataccggtaatccagtagtggtgcaatatgttgctccagatactccggatccggcatcaatccacgaatagtatcgttgtagacatatactcggtaatccggcaggaaagagtcgttgtagatagttgctgcagcttctatgatgcggccatcacccgaagagtcggacagcggatacaggaatgaagttccgcgttgagcatgagccacgtattgcgtcgccgtttcggaggaagttgctacatcaatggcggcgcggaccagcaacaatgagttgatacccggcacagtgtaattcgcgatcgctgactgcagaacatncacacccatagca

SEQ ID NO: 62648 - DNA, 453 bp, Arabidopsis thaliana landsberg
  unsure (1)..(453): unsure at all n locations
tggcagagtgcggcgcaaagcaccgcggtggtacgcaacatgggatgtgtctcctaacgattggacctttgtgcnnnnnnnnnnnnnnnnnnnnnnnnnnnnnngggcgggcggagcagtttcgcgggcggtcctgcgatcaggatgctggccgtaatcgaagccggcttggcgggcgcatggacagccttgggcacagcgcaggccttcagcggcgcagccaggtcgtggccctggcattggttgtgatgatgcggatagttcctgtccgcatcggctggcacttcgtcgtgatcgcccgcgctgtgcatccacagcgtcgcctcggtgacttcgtgcgcgctcgagagctcgatcgcatgcaccgccgcgccattggcgaggctgccgagcatcaggagaccgatgaacagggtcagaagtgcgcgcatcgccgtctcattagccgagacg

SEQ ID NO: 62649 - DNA, 436 bp, Arabidopsis thaliana landsberg
cggcaacatgacacggcgacgcaaatcaactctgacgcagtgtcttcttctacttccttcactgattccgactctacttgttcctttttgactccctccatggagttcccggatcgaatcagtttccggagaatcgattttagtgaagcagctcctactggtgtcgttcttccttctacttccagtgagttaactcgttccaattccagtgagaataagattcccaacgaagatatttccgtttcaacttcttctcgctatttggtttttgataaaattctagctcttatgaagaaatcaccgggacgaagaggagataagactagtccggcgcggcggttagaccgtagtgatgcggtgaggaggaatatcgagtatgacgcatgtgaagattctttgtcgccgcagataactcgcactttggatgaccccgaat

SEQ ID NO: 62650 - DNA, 1879 bp, Arabidopsis thaliana landsberg
atgcttttacaacatagtattgcaatagcctatcattagaagttgctacaaacaacagtgtagaaagaaattagtcttgcagataaaacttcaaaatccagtcaagctaagttattaacaaagaaaacggaacctgataaaacgccaagcattgaagaacaaatttcttcactgcatcaagttccacgtcaactgttgcatcatagtccttcacctgtgagcatattcaaggcaagtaataagagagtcttctttaaaactatgtaaccataaagttaacatacaaatattcaccgcatctctatactctcctactgcgtgatagcaggaacctcgtaggtacaagcactctattgtgttctcaatgctcaagccaatagataattcttggatagccttcctgagaaataagatcaccaaaaacaactacaggtgagtaatatcactgctttaaagaccagccttgtacataaataccaaggtgtatgaccaccaaaagaaaagcttccttttaaaacatccttttgctcaaacgcagatctttatcaccaagagtcaggggaagtaatcttatcggatatcacattttaaagtagacattgagatatccttggatccctcatgaacatttaaggtaacatgcacatcaacatagacaaattttcccctttaaacaaaattcagtttccaacaatcctaatttaccctaacagaacatacctgtgttcgcctaatccatggaacactaatccacgcaagtgataggccttccaaaccctggtcaagacaggaaaattgccatgagtacgatggaaaagcagaaatatagtgcaacacgtggtattgcatcccaaataagagctacctgttgtcgacttgtagaacctgctcaatgcattccaaagccttgcagtggtcggccaactcttgatagaactgccaggaaatgccaggaaataaccatcgagtacagtgaataaaaaggatgagtgtatcataggtaactgatttaagcaatagactaggatgaacaatcaaaattaaagatataagaaaccaaataatcaagtaaagttggtccttcagaaaaatcttaattagccttcaaaagtcataatttaagctttcttcattttgaagtctcactagctttacataaaactaatgtttattcactattacatgcatgaaaacaccaaaaaaaaaagaaaaaaaaaaaagcaatggttataatcctattttcatcacagttcagcttaatagttgaaaattcaatagacaaagcataatctcatactatttattttattatttgtgtgttacctgggcgagatgaagccatgcttcaagataattactatccaattggatggactttaaatgcgcctcttcagcttttttgtattcaccaagagaagcaaatgctagtccctggagagatcaacaaagttttactacgaaaacatttgcgtccatggttactttggaaaccaagaataacgaataacaatagagaatagtcttaccaaataagtgtatgcagacttgttatctttctcttgcttcagacatatagataggtccttcacagcagcagtgaagtccttagatttgaaattaacaatacctgaatccattgtgaatgtcagtagtacttcatggtttttcaccaaagaaatcatgtattaagaaatgaaaactgaaataaggcgcaagattttaaaagaaacactgaataaagacacttacccctttcgtgcaatacatcaggtgagtttggctcaaaaacaagtgctttagtcaaatcttcaaccgcctatcacaaagggtattttaataaaagtgttgtacaagaaacgtttttggatttttaccaata

SEQ ID NO: 62651 - DNA, 724 bp, Arabidopsis thaliana landsberg
gcccgccacctgatactggatccggagctggccttgcgacgcgccagcgacaagttcgaacgtcgtttccgcgtcgttgaagccagcgccgatcatcccctctccgggctcgacgaagagcaactcgatctgctctggcggcgcgccaagaatacccaccagtagaaaaacgttttcgaggcggactggcaagcctgtttccgcctgtcacgaaacggtcatccccacgccatttttccgtcattgtcgccaaccatactccgccccgagcacgagagggacggtgcaccggcaacgctctcccgtactttcaatctgcctgatggagagccttgatgaagaaaaaactgcttgtgctggccgtggggacggcgctggtggcgccactggcccaggccgatggtccgcaagtgtacggcaagatcaatctgtccctggagcacatgaaatacgacccggcgccgggcgcaccggccaacgatgatgaatgggaactgcaaagcaatgcctcccggttcggcattcgcggtgatttcgatctcgatgtggcgggtctcaaggccctctaccaggcggaattcgagatcgccgtggacgatggcgacaacaaaggcgatacgctgtcccagcgcaatatcttcgctgggctgcaaggtgctttcggtaccttgcgcgccggccgttttgatacgccgaccaaagaagcgcagggcaagatcgacca

SEQ ID NO: 62652 - DNA, 2406 bp, Arabidopsis thaliana landsberg
  unsure (1)..(2406): unsure at all n locations
cttttaatggattctcttctccctgatgatttattagaacgaatcctctcgtttctacccattgcaagcatcttcagagctggtactgtctgcaaaagatggaacgagattgtatcttctcggaggttcttatgtaatttctccaacaattcggattcccaaaggccttggtacttcatgttcactaccacggatgatccatctggttatgcttatgaccccattatccgcaaatggtacagtttcgatctcccttgtatcgaaacatccaattggtttgttgcttcctcttgtggattggtttgcttcatggacaatgattgcagaaacaagatttatgtctcaaatccaattaccaaacaatggaggacgcttattgaacctcctggtcacaaatcgacagattacacggcaatgtctacctccgtaaaccgagcgaaccaagcagtaaaccgcgcaaaccggagttactcagtctcgatagtgaaatcgaagcaagttccagggaatttcttccaatgggatctctctattcatctctacagctctgaaacaatgacttggacaacattagtaancgatgtcttatccggatggagaggagggaacgagagtgtgatctgcaacaatgttctttacttcatgatatactcaacgggaggctcagatcatcgccacggcttgatcgcttcgaatctatcctcgataggatcacccgtcaagcggaatcttgatgaggagtttcattccaatgccgtgttctttaacctgcgggagattgatgaatctaagagagaggcttgtgattgtcggaggaatcgggaaacatgatcgaccagaggttataaaagggatagggatttgggttttgaaagggaaggaatgggtagagatggcgaaaatgcctcaaagattcttccaaggttttggtgaattcgacgaggttttcgcgagtagtggcacggatgatttggtttacattcaaagctatggatctcccgcgcttctcacgttcgacatgaatctcaagtattggagatggtctcagaaatgtcctgttactaaaaagttccctcttcagctctttactgggttttgcttcgaaccaagactcgagattgctccttagttgcaatgaagaagcaaatgggtctgtgaaagtcttggtcttttggattgtttttgcacagagaaatcgccggcggctttatgaagatgatgatacggtaatgtttttaaattttagttactggaaatgtttttcaggaatattgttatttgcaatttggtactctgttaattataaatttataaaatgaggcccagatacttttatttaaacaaacgaacccttctctatctcagtgaaatataagaacattttcaacatgtggcccacaatatctcatgtaaatgggtcggattctgaaactggaggttgtcttgttgctgttcctggtggataaaataatgattttgttcctttttttccatatatattaataattatttttcatgttttattaattaattattggtgtaaattattttaaagaattatgtttctgtacttgtataaaattgggacctattttcgtgatgggatttgtcaggtttggcagtgttaggtttacgggtaatggacaacagctattttattgtgtattttatcattttctcaagggtcacttattttcaattttcatagctataataatttactaaattttaaaatataacaaaatgtcattcattagttataatcgtataaaagttgacgaagtgatatatagattctacatactaaaaacaaaattaatttgtgtcattatgccaaaatgtcaaaaggaaaagaaaatttagacaattactctgacacatcaaatcagctaaaacctaactaaatataccaaactagcaacacatatttttgttattaaaagcatttataatgataaatcatgatcagaatcatagtaagcagattcgaacactagtctctcaaatttcggtagtaaagttttcaaccattagaagacaaatacgattttaacatcattagtattgttttttcttttttaatttaagcgttggctttccaaaatgaaatagtaacaagcattaacgagttaagttgtcaatgggggaaactctctcaaccaaaaaattgaccacacaacacatatagtgcccactagttctctcaaacgaatatggtatactttaaaacccacctttattctcaagaattaaagcccagaatttcaacgttctaaaaatagttttgaaagatttgctttttacgggtttttcgtaaaataattatgaacaaaacaaataaatttaaactaatttttacacgtacaaattttgacctccagccctctagatgaaattcaaaatttt

SEQ ID NO: 62653 - DNA, 703 bp, Arabidopsis thaliana landsberg
agacactgcattatactttaaatgatcattgcctctatgcatcataggctaggagtacaccctgtccagctttaaaacattatcgattgctggtttcacttgtcaagacatattatattcaaatttcttacatgaattgtttcagttatatggagcaaaagccaggtcacatttgccgccgcatagaaaacttgagttaatgcgcatctgcatcatcttgaataaactataattacaccataagttgggagagactgatggtcaaaggacgacatatcaacgtgcgaaattttgccacgtcatcaacctggacatgagcacgtgtagcttcttagctttggtgggtcccagaaaactgatcatctattcacgataatgataatcgatctcattttctttctttgctacgagcatgatcatgtccagtttattcttttaaccctttgctggaggatttttttaaatttaaattaagtgctaccctttttaaaaaacaaattctgtattaaagaaagagatgaggcccatcaagagtagggcctgttaaggaaaattatcgtccaatgggtcccatatacttgtgtataaatagatgtaattggcttgactgtcgagtcagcatttcccttttttttgtgggtcggcaaaattcattattgcattttttatttcggtcgccataataaaacttgcattagcagaa

SEQ ID NO: 62654 - DNA, 1550 bp, Arabidopsis thaliana landsberg
gaagaaagttcatacacctgctcattcaaccacatcaaactctgctttccttcatggcttcttacatttgcgaagatcgaactacatgaaattaacaaagaagatgtgactgagacctcgggtttcctggcattaaaaaaactgagaaacactatatttacattggtgaaaggtaacaccaaggtggtagatgcaattggttatgttcttttgttatgtttggcagtctgtatagagaagagggattacaatacggctctcgggttgctacacttggtatgtgtgaagttggtaggtagtgaagatagagagtggaaagagctggacacaatgttggtcttacttccgagaatttacccgataatagagcgagagattggtgaaggaagagatgaagatgaagtgaagacgctggaggctgcaagagaattgcttcaacctgtgtggatgtaccatgtctacgaaactggaaggttccacatgatggatgaagaagaagaatagataagaatgtaacattattcgagagcagtactgtattatgagttactgctaaagcatgtaaatatgagttaatccatgacaatcacttccgagaatttaccagataacatgagctaattcatggtatttattgtttatagaaactaccttagacaagagtgaaatgatacttatctaaaacaaataacgaagcataggcttaacattgacgtttttaaggaatttcatgctttcacatgagacactactcttagggtcttattgaatctcctagtatagctttagacttagagtggcttctggcaagtgatgataccaaacttaatgacacctttcttgtaaccttcaatcatcaatggcattgtcaatgctcctttaatacttttcataccactacgaagcagagacacaaggcccttccatgttaatgcagtccgtataaccgcaggccagaaaggagctacgttctctgaccaatccgcacacttaatatcctaaaaacacatatttcagattctagtttagtaaaaaactccagttaagtaatgttttcggcagcaaaggttagggaatataataacctggagagaatgggattgaagcaagttgacataatcatcggtggagcaccaagccgggagatagaacgtcttacagattttgtccaagatgttttgctcccacggctgcaaagcttcctcccccgcagatagatttctatggcaccatgtcactattattatcctacctcctggagccgccacacgtaccaactcttttacaaacttggccttgtcaggcatatgcctcaccactctccatcgaccacactagatcgaattttccatcttcgaatggctgatccaacgcatccgcaacttggaaggaagcctagaagtccaatgtccatacgttagatgaaattttcacaaaatgaaaggttatgttttatccaaagctaccttttgagagagtgattgagcagtcgcgagatcattggctctcttggcctgaacagggctgagagtaatgccagtgcattcagc

SEQ ID NO: 62655 - DNA, 549 bp, Arabidopsis thaliana landsberg
  unsure (1)..(549): unsure at all n locations
gccacggactggaagatcaccgcgatggtgaccgccagctccttccgggccatcagccgctcgagggcttctcgccgggccgccgaccgggccgcccggggccgcgccttctcctcttcggcctcccggcgggcctccccctcagcccgacgccgctcggcagccgtccgcgcccgcgccgcctcgatggcgacctcagcgtcggcccgctccgcagcagcccgtgccgcggcgacgtcggcctccgcacgagcccgcgtcacggtcaccgcgtccagcttcttcgcggcccgggtgctgtagacggtggtcacgccgtcacccccgccccggccacgtcgtcctggacgtgggcgaccgtggccagcagcgcgcggcgctcgtcctcgctgagcccgccccacacgccgtgcgcctcacgggtcgccagggcgtaccgcaggcagacgggccgcaccgggcaaccggcgcacaccttcttcgcctcacccgtctgccgcaccgncgtcgggcccctccccaccgggaagacaagtcctggtcagcgac

SEQ ID NO: 62656 - DNA, 438 bp, Arabidopsis thaliana landsberg
  unsure (1)..(438): unsure at all n locations
ggcaaagcgaaccttgaactcgcnnnnnnnnnnnnnnnnnnnnnnnnnnnnnnnnnnnnnnntgtgacgcaagccgtgcagatatggttcgagaaaccggacttggcactcaagcccggcagcacgctcaggcgctcgatgagctcgaaggccagcccgctagtcagggcagggaagttctcaaatgtgctggccatctgggctctaccactcgtagggggcgcataccgccggggtgaaacaaggttgtccagaaaaactggaacatgttaagaggaaaaagcgaagggtgcacgttctgcgccgggacggtcgcgcagccgtatgagccccatcccccatacaatggataaagcggcgtgagagctacgatgccgatccttactggcgatcaggcggtgatctatgtcgcacagatgcaggatcgggcccgggggc

SEQ ID NO: 62657 - DNA, 305 bp, Arabidopsis thaliana landsberg
gtctaacgaccgtttgggttttgtttgtgcagagaccagaggtttttgtctcacgactcgcacttaatgcgccatttttgcgcgagggttcacgttttgtcgtctcagaggaacatagctgttttttacagttagctgaatcgctacatatcaaatctactcgaggcatcactaagatgtcttgacgcgcgcgataagagcctcatgtgttggggcgattaacgtagtactcaatttaatcatgataatcggaaaaagggtttactcgcagggtggctggacgcgggagctagtatacatgaggg

SEQ ID NO: 62658 - DNA, 734 bp, Arabidopsis thaliana landsberg
gtattatatatattaatatttgttttcgaagtcaatacttgagactcggggatcagttgcttgcttcgttttgggctccttaaccatggcaaaggtaaagtcttcgaaaactttggcaaagtctttactcttttttttttttttttttgttacaacaacgtacgtgttacaaaacttctcaacttgttgtttcttaaatgctttgtctatatcgcttgtatgaaatgatcttttcaaagaaacaagaagagggaccattttgatggtttgttttcaaagagggtttatgaatcttatcaagaagtttatgaactcaagcaaatataaaaccaccaatatagaaataacaaatatatatgttaagatgtaagaactatataagaaaagataatacgggattccagatttttaagaactacataacacacttaccaaaatctcatttcactgatttgatctataactttgaaattaacatctcgcatcctattataaagtattatcacttaaatctgtcctgttgcttatttattttttggaagtggtgatatcaaccttttggaatgtatatattttatattttgtatgtccaagatatacaaataattgtgtatccatcaaaatgataacaactatatacactaatcatggtttttgaagaattaactgaaagtgtatgaatatcatcatgaataaaattttcataggtttatatgtatgtcatgatttaaaat

SEQ ID NO: 62659 - DNA, 960 bp, Arabidopsis thaliana landsberg
gtgcaagtaaaacaactaattttcaatcggtaaattttatccaatttggtatacttaattgattatacacaatcagttagatgacacatgtggcataaatactcggaacaaaaaacgtgcaagcatataatgtgccaattcatttcgaaaatatctaaatgggtccaaaaccatgtggatttgagtattttgaaccctgcagatatcgtcttcataagcttacaaaaatctatttcaataaaaacctcaaaaggctaataatatgctcacaaaactttgtctcctgatgctacatgaatagagctacaaagattgatgctctcgtctccgttcttttgtgtgattgactataacgagtcaaaatttggttacacttacgctaaacgaaataacttaaactgtcttctgttttttggtcgagctagaatctttgccatccttctggccaacggctcctctcttagacccctggttgattgaagtaagcaaacaacatagaaaaaattagcacaaatatacacacaaaacagagaagaaatggagaaattcagttgtgttttacattagggttgaaggttttgagtgggtcgctgccttttctagaccgtttcttgtttttgttgttgcgaccaccgcctccaccagatctcctagtgttgcccattgcggctctagctagctttaccatcttgcttgcttcttgagtctttgcgtccactagatactcggggatgtcctttagatgtggtgcaggtgcagtcttactcagaggcttgtcatgtctcaacagatctaagtctcttggattagcttcaaaatgagcttttaacctgaagaaagaagtggagaaattaagaagatgaaaaaaataagagaattcacattcccacacgtaagttaatggtccttggctaaccttttaaggagtttggattaatcttcaaattccctcaaaaattc

SEQ ID NO: 62660 - DNA, 492 bp, Arabidopsis thaliana landsberg
  unsure (1)..(492): unsure at all n locations
aacgcctccaccagaaactttcctccttggactattgccatatttactttaactatcgatctctataccattgaacgactccttatctacgaagccgctcctgtttctttctatattataatggagagaaaattgtgttatcggatgtgcaataggataaaggaatgatggaagattttggagatgacatggaataactgtatgaggacattattcaaaatgtattgggatgtggaggagctcatgtctctcctaagaagacgaatatggaataatcccctttttatatgtaccatagaaacaaaaaaccataatcaaataaggtactatgcatatagcagcacgcgacaaatangctcaagaaaaatattaaaaaatgtttctcacagaccatgaatttcttgccttgaatagatagatcttcaatacatatctgctaaaatggtaaggttaaaaaccagaattcttctactgattgaactacaatacatc

SEQ ID NO: 62661 - DNA, 613 bp, Arabidopsis thaliana landsberg
atgatagtccattgttttgggcctaaacaaatacaaagtagttttaagtggccgtttatactaattcagtatctcaatacagtagaccttgaacaaaggtcctattctttaccagttgcaacttacaaggagatcaatctttttcttcaagtttgtactggattgggcttttcctgataaggtttaaatctctgtacttgggcccaaatgactactttctcattgacagtctctatactttcaatacccaaataagctttatccatcatatcatgttttggctcaaattggctcatatgtgagagatcttattagaaaacaacttgtctagtaatctagtatattgattagaaaacatatagagagagattggcatgacatgcaggcgaagtagtctttgccttggattcttttgcgtctttgctaaatatataatactaatattgaaagatcgcatgtttgatgcatgttgacacgtgcggtcatgcccttagataccttgtgtcaccaatgtgttgtgtatgctctctcaccagaaagatctattctttcctttttccttttcgtttcttttttttcatattactaaaaataacattatgtgttagggtct

SEQ ID NO: 62662 - DNA, 1614 bp, Arabidopsis thaliana landsberg
aacatttacctgaatctcactcattgcaggatacttatacaccataaatgcttcaacccttggcaagctgtgggacaaggtacaaaacctgtaacctctactttctgtacatctattgtatcagtgtgaggatgtctgattttgagggtctgtataaaatgcagatgggaccggtgttagaaagagcagtaggatcctttaggcttcttcctcctactgatagttatgttcctccatacaaggatccatggaggttttggtgatgcttccatctgcctcatgaaatttcttttttcgaaattgtcgttaattttgataggagaggaggttatgaaagttgtagtgtgagaaatgagccaagcgaagtgatttttccaaatccgaatatcttgttcactatcagatgtattgagattgagatataactagcattttcttttaaactcatctcaactggtatccacagagtttttggctcagaatcagatttactatcatatgaatatgatatacacagggaaagaacaaaaaagatggagtaactttcttcttcatagtacctcctttactatcataatacattgaccactgcctccttaagattttcaaggtagcataagaatttaacaaatgaaaaagaggtagccagaggggagccacataaaccggcttctacccttatataaattaagataataatatctgaatagatgaaccataattataaatatccataacaatagccataggaccaatcacccaccaaaaccatgagagatgagaccaaaagtattttttttttgttaggtaagcagaagcacaagcaatatacaaaaatgatcatccatggccgcctcagtttaaagaaaccaacagctcttttttcttgaacagatgatcagctcaagcttctacttttcctcttttcatggactcaaatcgatcatggaaatggtgggagtattggaattagcccacggtgaagaacacaccgttactcttcttcttagactccttgtctgaagacgagacagacttgattgcttcttcttcatctccatcctccatttcctcatccagatctatctcctttgaacggcactcactactgcagaacgctttgtatccactgaaaaccaaaaccatgacattgatatttcacaacatattcacttgcgtgtgatctcattacatttggaacgaagctatgcagtttagtaacgaagtactgcaaagaacctaagtttccatatctatgattaggccttttatgttttggagattagattcatgtaagggagtttctattgtaggctcaaaactatcgaaagttggagactttatcttaaacacacaaatgcaaagagaatagaggaacaattctaagtgcactagtaatgaaggggaagaagagagtacctgtacatgtatatatcttctcccatacccaacttcttgctacagccgtagcagaagctcaagaagtctttgggaggtaacacatcaacaggtgttgtcaagtcgagaggagcaacagcaaaaatgctctctttttcgttcttgcacaacggttcttcaactcctcgcgctctacggactccataacctgatccc

SEQ ID NO: 62663 - DNA, 447 bp, Arabidopsis thaliana landsberg
ttctctttcattccttggattaaatatattataacttatagttatatttgaatatctgtctacattacccaaactgcagttgaacaacatgtatggggtttgccgtgggtatgagcagaaacggaccgcgtcaccttcttctacctgtgattgattgcgaaggaatccacataaatagaaaaataaagtaaggatacatagagaaagtcggcaaaacacatatttcggtttggttcatagggaaaaaaagcaatgcttacagaatgttttgcaactaaaccgaaaagcagagacattatttacaaattaactacaagtattaaaccctattgcttttacacccatcaactatatgcctttatgtcttatatataatatatattatttatatcgctgagtttgattctctagacaccctaacttctgtattcctgagatactgaatta

SEQ ID NO: 62664 - DNA, 436 bp, Arabidopsis thaliana landsberg
  unsure (1)..(436): unsure at all n locations
gcgcggngataccaggcgccgtaccagtcgagatgatggatcgtcgtttgtttcgcctccgcttcgctttcggattgatcggagaaagcgtccttacgacccaggcgcgccaccggcgcgaaacggtgcatgacgtggtgcaggaggaagcccaggcagatgctctcgtcgagggcgccctcgtccaccttgttgatgacgtcgtttcagtcgccgctgtccatcagcggcaggccgtgcgcaccccgggaccgaccatgttccagcttgcgcacgcactgctggtacagggcttcgcgcagttccgaatgcgcgggaaggtcgctataggactcttcgccggggccaagcagacgcccttcgatgtagtaccacgtcgctagtcgagtaccgcatggtcaccggtgacctccaggtcgcggtccaccgtcagtgg

SEQ ID NO: 62665 - DNA, 124 bp, Arabidopsis thaliana landsberg
ggctgcagggggggggaaagccacattgagtctcaaaatctctgatgccacatatatttagtaaaaaatatatcatcatgaacaataaaggctggctgctaacataaacaggaatacaacgggc

SEQ ID NO: 62666 - DNA, 575 bp, Arabidopsis thaliana landsberg
aaaaaaaaaaaaaaaaaaaaaacaaaaaacaaaaaacacaaaaaaaaaaacaaaaaaaaaaaaaccaaaaaaaaaaaaaaaaacaaaaaaaaaacaaaaaaaaaaaaaaaacaaaaaaaaaaaaatataaaaacaaaaaaaaaaaacacaacaaaaaacaaaacaaaaaaaaaaaaaaaaacaaacacaaaaaaaataaaaaaaaacaaacaaaaaatcaaaaaacaaaaacaacaaaaaaaaaaaacaaaaaaaaaaaaaaaaaaataaaaaaaaaaacaaaaaataaaaaaaaaaacaaaaaataaaaataaaaaaaaaaaacaaaccataaaaaaaaaaaaacacaaaaaaaacaacaacaacaaaaacacaaaaaaaaaaaaaaaaaaaaaaccaaaaaaaaaaaaaaaaacaaacaaaaaaaaaaaaaaaaaaaaaacaaaaaaaaaaaatacaacaatactaaacaaaaaaaacaaaaaaaaaaaaaaaaaaactaaaacaaaaaaacaataaaaaaaaaaaataacaaaaacaataacactaacaaaaaaattcaaaaaaaaaaaaaa

SEQ ID NO: 62667 - DNA, 273 bp, Arabidopsis thaliana landsberg
cgagacttcatagaatcgattgtgtctcgatttttgactcagcctcctcatgatgcccatttcatcttcggcttcgattcaggcccttacgtggaatgtttcttaggcttatcgtctacttatcctccaaatacggacatagaagcagtactatcaatccctgggagaatggcgcagtatgtttacggcttgatgtgttgtttgtctggttttaaggtagttgtatataaccctaccacaagacagtcctttacacttaccagggatgacaca

SEQ ID NO: 62668 - DNA, 1164 bp, Arabidopsis thaliana landsberg
cttgatgggattgctaatgagagcattacgtttcatgaaccttattcttccttggatcttgatgatgcctttcaacgcatactgcttttcttttcgtccttggggcagggaaagtgagtttgtgaaccagactgtttttgaactgtccttgagatttcctggtctgttttacactgctcagatagtgtctagtgccaccgagatggtttttcaaatggaaacgataagagttcttttaaggagacaccccgagttcttgcgtcgtatgatcatcttagagaatggtcttaaagatagagatgttactggaattgtgctgctgttagcaaatcatttgcaaattctgtgtgattggtggcatgatcagctcttacagttgccatttctccatatctttcaaaggggacctcttgcactagcgtttgttcctcgaaacacgccccttcatcaatttggagccatcagaagggttttttcccttttgagtgacaacacttttgctgtaagtcccagctctctttattcaattactcttacataaagagaatcatgcactgtagagattgttgtcttagctttccggattaacattaatgtttcaccatgttgtgtaacagattcttttcttttctctacaggttcttgccatcaacatctattggtctttcttcagggttcttttaccattttcgattggccgagttgttttagttctcctacgctgtctcccacacggttggattgcggaaaatgcatctgaaatggctgctggagatatggttatacgctcagttttattggcttgccttggaggagtctttactatgtctcgagacacttatctaacaagcgtcagaacgtttttaccgccagttaaggatacattcattttgtcttttaaactcggtgatctgccttggttacttggttgctggctacatttctgcactttccctatactgggaaagacagctttccacaccgttgaggttctttcagactatccactcatggatgacaaacattggctaatgggaacgttgtcctcggtttctgctttaagttgcatggagcttattcaaaaggaaaaattcgaactttttgcttagcctctcaccgccatcagatctagttcttacctcccacatttcttctttcttttct

SEQ ID NO: 62669 - DNA, 301 bp, Arabidopsis thaliana landsberg
aaacacaacaacagtttactatatgtttttatagagaaaaaataactatatgatctcatatggaatctgaatctatttctcgattatttttgagtttttttttttaattttaaatcaaggcatatgcacaaaaaaaataattgtatttgttatattatgataagaccggacaaaaaaattaggaatgagagcaactccaatattttggatttgcacataaatgagaaagagagattgaatatgattgataacatttgtgcatgcactatttatcaaatgggttatgctgtctatataccaa

SEQ ID NO: 62670 - DNA, 467 bp, Arabidopsis thaliana landsberg
atcggcctagctattaaggcccattttatgataatgtcttccaacatttttattttttcacaaaataatttggagtttcaaacaaattaaatacagaacgtcatctgattcttttgtgttttacggagcatttgatttggagttcaatcaaatcaactgtaacccgccatcttaattttagtttgacgaaaacgtcgtcatattttattgcccatcgagctgacattatctcaagaagtgccaaagatattaaattaaattacatacagtcaaattaatttaactaaatttaagaaattaaatctaattgaatttaaatcattggaatatttattaatatatatttaaaaatattaaattattttttcttattgatactagaaatgtataagttacaagttttattttcaaaaaattagtttttaaaaaacagttgtcaatcaaaccgattccaaaacaaacaacat

SEQ ID NO: 62671 - DNA, 370 bp, Arabidopsis thaliana landsberg
cggagaacaggaggaatgagagagcaataggacaaatgtgcatatgatgcaagatcccaaacgtcgtcgtttggctgggaagagagagagatatgtccctctgaatttgtcttaaaccaaaaacaattaagaggaaaataatacgtaagagtgatgaagagaaagagaacaaaggatatacacgtgatggggagggggtagtttaggattctgattagagctgcgcataagtatagacgcttccagactccaattcatctttatgatcaacagacatctaaatctttcattgatcagatttatgaaagctataagccttgaaaagcattcagtatcgggaagaacatgaaactcaaagcggccatgctat

SEQ ID NO: 62672 - DNA, 913 bp, Arabidopsis thaliana landsberg
gtgttcgaggtggattccatggagggggtggtagtggagatgacatgatggatgatcttgatgagatgatattcggtaagaaaaacggctgtgattcttcgactaatccagatcatgacccaaaaaaggagcagtcctcatccaaaaacgacgatctcattcgattctgagacggatactttcaggcgacataataaatcttttataatgtatttggtgtttaattggtagtatgaatgaacaggttcaatgtaagtaatctgtgtttggagatctctttgacttgtgtgatggtttataaaggagatttgttatgatggcacatgagatttgaaatacattctattctagtttctgctatcaaacacattttgacatctatccaattgctatcgcgcacatttgaacacaaactttgtttcaatttagcgtttacagtcgcagacgcaatcgcggttaagtgaagcgcatcgtcactttccacattcatagtaatatgcaacaactgagtaacagaaatttgtaatcgaactcagatttcgaagaagcagatctcacaatgtctggaaaacagcaaaatcatcgttctacttcctccagacccagatccaaaaccctaatcctcatcggctctctcttcaccgtctctctactcgtcatcctctacacctcttcttcctcctcccgagcctccatctccaatcccaacccgtcggaccgaccagagacgtccttcgttacctcgcttgagcatttcttaatatataaagctccgaagctctcgttaccggttagagacgacacggtgcgtggcgagagtgatgatgatgtgaggaagctcgatgagatggtgttcgagagagagaatcgttggttgaacgaagatccgggatatcctgtgaactgagagcac

SEQ ID NO: 62673 - DNA, 1489 bp, Arabidopsis thaliana landsberg
atgtttcagctgctttctggtttgttctgtatgtacaattccaggttcttgctgtttttcatttacaggtttttgagtatcagcaaagatgggtgacaatcttatggacaaagttaccgcatttggtgagcgcctgaagatcggaggttcggaagtgagcaacaagatcagtgctggtgtgagctcaatgagctttaaagtgaaggaactttttcaaggtccaaacccaactgataaaatagtcgaagatgctactactgagaatctagaggaacctgactgggatatgaatttggaaatttgtgatatgataaatcaagagacaattaatagcgttgagttgatccgtggtataaagaagaggattatgatgaagcagccgaggattcagtaccttgccttggttttgctcgagacgtgtgttaagaactgtgagaaggcgttttcagaggtggcagcagagagagtccttgatgaaatggtaaagctgattgatgatccacaaacagttgttaataaccgaaacaaagctttgatgctgattgaagcttggggagaatcaaccagtgaacttcgctacctaccagttttcgaagaaacttataaggtaactatgacctggtaccaaataattttacgctattaaattcaacaatacagtttcatttacaatactttattgaagataccactatcttatgttgagttgaactgttttggccaaagcatatgggttttgaacaaaacagacaaatgactattgtttcaatgaattggctcaatcgactagcttgttgcaggaattgattgaaaaatgaaaagctgtgaggtctgatgtcagaattcattatgattaggtctttaatgtttttatattttttcctatactatagagcttaaaagcaagaggtattcgcttccctggacgagacaacgaaagcttggcacctattttcactcctgctcggtcaactccagcaccagaactgaatgctgatcttcctcagcatgtgcatgaacctgcacatatccagtatgatgtgcctgtaagaagctttactgctgagcagacaaaggaagcttttgatatagcaagaaacagcattgaacttctttccacggttctgtcctcctcgcctcaacatgatgctttacaggtaaattgactcggaattattaggcatcatttcctgtaattctaatgtaataatggatataacatgggatatcggcgatatattttcattatctctctgatttgcaggatgacttaacaacgacacttgtacaacaatgtcgtcaatctcaaaccactgtccaaagaatcattgaaacagcaggtgaaaacgaagcccttcttttcgaagccttgaatgtgaacgacgagctagtgaaaacgctgtctaagtatgaggagatgaacaaaccctctgcaccgctaacctcacatgaaccagccatgattcccgttgctgaagagcccgatgac

SEQ ID NO: 62674 - DNA, 1899 bp, Arabidopsis thaliana landsberg
agtatttgtaacacgtgacagtaaatcctctgatccatctcataagatcaagatcaggctcacgaagaagcaactccatgatttattgagtaaagtcaacgtccatgacttgaccttccagcaacaaaccttctcatgtccaatcttgaacaatcgagggtacgaagaagccaatcaacaacggttatggagaccggttctacagagcataccagaagttaactgagtttttttttcagagatcgccatgtttgtatatgcttagggtttcttcactttcttgatatgtgttagggtaagagttttgatgtaaattttggtttggacacatgacgcttctgtttttgtttgttagaatgtaaatataaaagcataaaagcagaatcaaaaagcttgttgttaataccaggacttacttgatttagctgaaacttgacatgaaacctctcttctccgttgttgatcctctctctctttgactatccgccggagctttctgtttctgtttgggcttcgcgggaggaaaagaagacatattatgggctttagaagcccaaattcactttactcgtccaacgaaaaagaaacaagacattaaatatgatttattaattatcatcccaatgcgtttcgttttttccctcccctaatattccaaaacgtcttaaattcatcattactagtttcctttccttagtaaaaccctacatttctccgcccgcctttgatttctccccggccgttcccgccgccggtctccgatttaaccagggttgagtctaattccttctttttgtgctcattgctgtcggattctctaccggcgttacatcgaccagccagactcttccccatttgactgctttactgattcaatcgctcttttaggtctgtgtaggttttgaaattctgcggatcagattctgaatttttttctttttcgatttttgatttacgattgattgaaattgaaatttgttatagtttcggattatggtaactactttctcataattttattataattgagattaaggatcatttccatagagtacccaaggttttgattctccctctatccatctaagacaattgaattcaggattcaagtaatgtttagattcttatatgaaagcaagtggatatgtaagagaggttaccaatataatccgcaacaagtatcgttggcactagcttgatggagtgtggatacttgtaatcatctttagagtttataaaatttgcagtttttttctcatagtctcgaaaacttagttgctttcgattattcttaaactaacggcatcatatattgttgtctgttatttaagcagattctggaagttgtgactcagtatctccccttcaacgaattagcatcctgcgcaagaatgtctattgcatcatcacttacttcagccacactttgcggcgcctcagtttttcctaaagcattagcctgcagctctgagttccctatcaatcttcccagcccttttgaaagttcaaagatttgtttgacttcgtttcctgcctctagggatctcaagaaaaatgctactttgaatctgactcgaaatgttggtccagtcaggtgtcatgctatgcaagctgggacgagggagttgaagaaatttgaacttagtgatgtgattgaagggaaacagtttgatagagagatgctaagcgctatattcgatgttgcacgcgaaatggaaaagatagaaaagagctcttcacaaagtgaaatcctcaagggttatttaatggctaccctcttttatgagccttctacccgtaccaggctttcatttgaatctgctatgaaacgccttggaggtgaagtcttaactactgagaacgctagagagttttcgtctgccgcgaaaggggaaacac

SEQ ID NO: 62675 - DNA, 396 bp, Arabidopsis thaliana landsberg
  unsure (1)..(396): unsure at all n locations
aatgtangatggtcatggtagagcaattaaatcattagcttatatgtttatcttgaagctaggaagctgaagtatccatagactggcactgaagcacttctcatgggtatttggattgaaggtaacttacttactttacttctggtttattgcttgagatgatacaaaaggttactaggatcttggtagtgagtgatatttggaataagatagtgtttgattttaacgagcaggaactagttgtacttaaaagcttttgcgggctattaagataatgctttacaaagtgcgtgaagaaacggtcaagttgctatgaaaggcagatatgtatttttttaacccggagcatccttctttaactcaagatgcacagagaggacttgactctgctctgga

SEQ ID NO: 62676 - DNA, 1250 bp, Arabidopsis thaliana landsberg
aggcataacaattgtttaatgtgaagacataacaaatttttcaatcacaaaattgttgtttccattttgtgatcttgcctatgcagtagtattaaaaggaaagttatccgaactattcctaagagcactcttacttctataaacggtactaattaagccttttgtctatttttagaagcaatataccaacattatctgtcacatgggtgcaagtgattttgatccatcatgggccgtaatcggatcggtctaaggttcgttcatatatttgtcttctgctaatagtcttgactagtcatttgaaaccagacttctcctcttcacaaaaatgtgtgaactttaaaacaaccattacttaccacaaactaacaaaaacttattgtggtacgggaccatcatacttatgttcttgaaatttaattgcgtaagaaaactgttggacagaaataattccttatcatacaacaacattcatctccacaataagccttgttgacttaaaataatataattggatagtcatcgtcatcgtcatcgtcatcgaaaccaaaagctttacacttcaaggtggagaagaaagtgcgtggttacttcttccacatactataataacaaagaatcttttcaaaatgaattaaaaatttggaaaaactgaatcttgtatctaattttttttctgtcacaaccatattctcgtagtccagtccataacaaggacttgtagtcccatatttattgagatattaatgcacgaattaagtatacgtatacgggaccgctggtgatacgtaggataagcactatgcaattccaaatccaactaacacagaaatataaaaaaacattttctccatggaattatttagattgccgtatccatttggtggaccttaaagtaaggccaacacacctacttactttcatttttctttactatttcctttaatacgaaataaatatattcttcaatcattttccttagcctttcccttcgccactattaacgtttatctcacaaattttatttactctattcccacaatgctcccatttgccaactactacatttcttcaccatccgtctcggagaagaatgctatcaacaacaacgtaaacaagaggaggaagaagaaacgggcgatgatggtttatggtggaggaggaggaggagatgatttagcggtggtgaaggcggcggcgtgggcttggtacttacggaaagaaggcaaaccgattatgagagaggggga

SEQ ID NO: 62677 - DNA, 1809 bp, Arabidopsis thaliana landsberg
catgagagccagactgcaaccgttcaagcacagtgtaggtaatagaatccggtgtgagtccttgctgtttcatctttgagtatagatcaactgcttctgcggttctcccgttcttctctagacaatcaagcaaaatgttgtacgttacaatgtttggttgacaccctttaacaagcatctcttcgaacaaactatacgccatttcgactctctctgttttcccaaaacattccatcagagtgctgtatgtgaccacatcagggtttaatcctttttcttgcatctccttgaatctcacatgggcttcatcaacatcaccgttcttccccaaacaattaatcaaagagttgtaagaaataatgtcgggtttacaatcactcctctcaagctcctcaaatatgttaatagcctcatcaacttctcctacccggccaaaactagcgataagtatattataggtgaatatatccggagaaggaccgtcctttttcattttctcaaagagatcatgaatatgagatatttgctttagcttcccgagcgccgagaacacagtgttatacatcatagtatcagtaaccacacctttctcatgaatcttgctcaacatctctatcgcttcaatggttttacccgcaccacacaaactctcaagcatcgacatgtaactatctctctctcctttcacagggaagctccacatatcacaaaacagcctgtgagcctcacttacatgccctaacttgctcaacgttctaaccaaataagaatatatcccctgcgtcatataccttttcgaaatctccacaactccgtctaacctcacaagctgaccttcagcaactaaaagattcaaaacaagactatacgtatactcattcggccgacaacccgtttccaccattctagagaaaacctgaatcgccttatcaaccattttgcctttcgcaagaacttgcatcaaagtattataaccaacaacattaagcgtaagcccttcagtaatcatctcattaaataaaccaacagcttcatcacacttcccaatcctccccatagtcctgatcataatcgtgtaagtatactcatctcttctacaatgcctcttcttcatatcttcaaaaacttgacaagcctgatcaatctgacaaaaggctgcacacaattatacataaaaaccaaaactttacttaagagagttagttctatgagtgaaaaaacaagtgagagctctctcaaaaagcaagtaccttttcatctttagctaaagcatcaagcaacatattgtaagcaaagatgtcaagtttatgtcctcctcttctaatctcacaatacacatcaaaagctttagaataatcacgagatcttaagtaagcttgaaggagacacttgtaagtgaaagagttcatctttaaatcccatttcttcaccaatcttaaacacatttgtaaatcttccgtgttaccaaagaaacctattaagatattcacagttgatatgtttccatggacgtttgatttcaccatggaatcgagaatcgaacgaacacgatcgaatctgtctggaagatttgaccttgagaggattaagatgatacgattgtaaaggaaagggtcattttgtgagtaagggcaaagagaagggacttatttgaaaaattccacggcgaggagaggtgaatttagggatttgagaatctctgaagcttcctcgggagtgagtgagagtgagagagaagagaggtaatcagagagatcagagaaagctcggagagattgaggctccggtgatgagatctgtggctcggca

SEQ ID NO: 62678 - DNA, 537 bp, Arabidopsis thaliana landsberg
gtggcactctcagactgcaccatgtccttgaactttgatacaactgtttactcaactttttaatctgtgaaagacatgagtcatacggatgacgttaagaacaattcaccttgtctccgactaatgaactaagggataagcgtttgtttagcagagtggccatcacacgctatttttaggaaaaactagagactccctactgcgaacaagaaaaactattaagaggggattaaaacagagcataagggatgaatttacctgtttcagttatatgatagcgtaacagtgtctgtaaggaactgtgcatagtgcaacggagttagcacctaggagaatgcgattcattcatgcactgctgcgtgcacaacaacgctgcaaccgtataacgagatcatcaacttgtatgaggatgtatgactcggccactgatactaaaagcacttgcacagtcaacccgtgacacttgctgtgctcggacattcttagctattacagacaaaactagtagcctaccacagttgagctttcaccaagaaa

SEQ ID NO: 62679 - DNA, 463 bp, Arabidopsis thaliana landsberg
  unsure (1)..(463): unsure at all n locations
accgggaaatacaccgtttttaaacaattaatgtatattatatattgatagtcaatattataagaaatttggttgaataaatacacaaaccgcagatgccagaatttgaatatggattatcttgcataggattgggatgtgtttttaacacataaatcctggtctttaaacagtttgttatgaaaaagtttacgtttattggtagctttctgacactcgcctgtgtcacttgtttcctgatcataggctgtaaaaaagagcaggcttctctgggccagcaaaaccaggacgctgctgaaaataccaatatctccagctctatgggaacaggagccattgttggcctgatttnnnnnnnnnnnnnnnnnnnnnnnnnnnnnnnnnnnnnnnnaaggtttcctgatgtacgtacaaagtacgttggctattccaccaagaacctgatctcttacctgaataccct

SEQ ID NO: 62680 - DNA, 399 bp, Arabidopsis thaliana landsberg
ccaaaaaggcaagacacacactggagaaagccgggaaaaacatcacgggcaagaaacaagtaacaggatgggacaaagccaaaaacagaggcaagaccaagaagaacatccaaaaaagggtgatgcctcgcacgagaccaaaaaggaccatcctagaaggacaagaaaacaatggaagaaaaggccagaccccaagcagttagatagaccgaaaaggcaatacacccaatccgatggagttaagccagaaaagcgaaagagaggaaaacacagaaactgcccgcagaatagacggctgggagcacgagatcaatgaggcccaacagaggcatcatgaaatagtaaatgggcgatttgggcccacaaagaaggtaccaacagatcagggaaccataacaa

SEQ ID NO: 62681 - DNA, 654 bp, Arabidopsis thaliana landsberg
cctgttgtgacatctacggtcaagaatttgaaatagacacaagctttttttgtgagaatatgtctctaaactctaaggtaagcattgtaagaaactcatgattgtgacgagtgaaagaatgggtagatgttgattttggcttctgaggtaaaaatctcattgtcattttcctaaattattttgaggtgaacaatgttcatactttttcttgcttatctctgtccatggaaagacttgagctttattgtagaccgatgatgaaaaaagtacaaagcgtgtggacctgttttcacacaccgcatcagcaaaaatccaagatttgtggttggtcccttaacgttgagtgtttctctttttgtgcgttgatatcttccttccacgtaacctacttgcttaccctccccacttctcttttttaccctcctcacttatttggtcgactacatttgattagtgcttctttgttttggctttagatttcatcattgtaaaaatctaggatattctagaacccaatctctggcacatcttttttattttcttggatcctttctctttctctgttctttaaatgttgcttgtaccaatttggttaacatatctaactaaagcttctgaacaatattttctgtcattatagttagaaatctagga

SEQ ID NO: 62682 - DNA, 1645 bp, Arabidopsis thaliana landsberg
ctcatctcttccttcgtagacactttcgttgattactccgtctcgggcatcatcctgccccaagatcctagctcacaaaatgagattctgcaaacgaggttcgagaagccggagcgactcgttgcaatcggtgatctccatggcgatctcgagaagtctagagaagcattcaagatcgctggtctgattgattcgtcggacagatggactggtggatcaacgatggttgttcaggtgggcgacgtactagatcgaggtggagaggagttgaagatactttatttcttagagaaattgaaacgagaggctgagagagctggaggtaagattctgactatgaatgggaaccatgagatcatgaatatagaaggtgactttagatatgtgactaagaaaggtttagaggaatttcagatttgggctgattggtattgtttagggaacaagatgaagactttatgcagtggtcttgataaacctaaggatccttacgaagggattccgatgagcttccctcgtatgagagccgactgttttgaaggaattagagctaggattgctgcattgagacctgatggtccgattgcaaagagattcttgactaagaatcaaacagttgctgttgttggtgattcggtttttgttcacggtggtcttttagctgagcatatagagtatggactggagaggattaacgaggaggttcggggttggattaacgggtttaaaggaggaagatatgcgcctgcttattgtagaggagggaactctgtagtttggttgaggaaattctcggaagaaatggctcacaaatgtgattgtgcagctcttgagcatgctctttccactattcccggggttaagaggatgatcatgggacatacaatccaggatgctggtatcaacggtgtttgtaatgataaagccattaggattgatgttggcatgtccaagggatgtgctgatggattgcctgaggttttggagatccgcagggactccggtgtacggatagtgacatcgaatccattgtataaggagaatccgtattctcatgtagctcctgatagtaaaacgggtctcgggttactggtaccagttcctaagcaagttgaagtcaaagcttgaagacttttcgttgatactctctgtttagatgattgatgccttttgcaagtctagcattggcggattcttagcatgaccaaccataaacatcttcttggcgcataaattgtagtttttatcatcaaaacgatagataatgtttgtagcaatatggaacattatttcttattcaatataattgttcaaggtctctagatgtttgatctgcttattcaactccatactgaatcaaacttaatggcgtgaggcaatgtaatcaaatcactctcatagaaaaaaatctcagagagaaaccaaacagattttgaatttctatgacaactagcttctccgtgtttggataaggaagcttatcttatggcttctgttttgcttccattgccacaagtatttgttttgtttgattatcgcaggagccgtaaagagtcaagctttcctcgcgccgtctacaattccaattccatttcttctaattcaaccaacgccaatcatttccttcgccggatttctaacttct

SEQ ID NO: 62683 - DNA, 533 bp, Arabidopsis thaliana landsberg
gatatacctaaaaaacgaatgtgtctatttttaatgattttataactaagctaagcacaaaaccttacaataagtcctaaaattaatgtttgcatgatacaaagaaaaaatgtggtattttgccttatttgcaaagtctgtggtccaaaaattccaaaattatatatctgctttattaataacttttaaaattttaaaattaaaattaaataaaagttctttaatagtacctatgtaaaatcatattattgaagctagaaaatttctatgaatctgaaattataacaaaacttgcccatacaatgatacaaaataaatatcatctacttccattcatgagttcaagagcttgtctacagaatattggtactatttagaaatatatactttgtatacgcatgcctatatttgagaagatcatttttcgccggatgacataaactggtgtacacaaaagatatttatttgcaagtgacgttgacaacatgacataaagtcatcgacttatttggatcactaaaataaatgcatgc

SEQ ID NO: 62684 - DNA, 1293 bp, Arabidopsis thaliana landsberg
ctatattcaatcatctgcatccaactaaaagttgtaatatcacaaaatgaatttgaccaactcaccttcaattctcgcataaagtatatttatataaaatcaaagaaaatactatttccactatcaatataatacaatttctgagatatttttgactataaatcaaaaggattccatataaattatatgagaaaactttttccatgcttaaatagttctttaaataagggcttatattagtgcggtgtagttaggacgaatatgccaagtcttaatgggagtaaattaaaagatcctaaaaaagtcactccaaaaaagaataattaaaacgtcaatttgcatgccttcttcgttgcctactttaatttcccgttacattgagtattgtgaatccattataacattcgatgacatggcgtagtgatagccgttgatctgcttcacgacaagctccaaacaatcttgagggtagtggtagatgttgttttctggaaacagtttctctcatgttggtgagttggtgtgagcctgaggctgctcacgaggaaggagcgggagagccttcaccaaaaatgatcagtttcttttttgcttgaccttcggaattgaaatgacttaaaccccctttgtacaaaagttattttatttatcatttgagtgattaagacaaaattgatatctatggaagtgtttttaacctttcagggtgaaaatcttgactatgcgaagtgcatgtactagagagaatatcttgaggagtttggtcccactgatgaggaccgtttgatattttttttataaagcatgattataacaacgagatatttttctccttataagttattctacaatgtatgcttgaaaaatacagcttgaattataaagttaaagtatgtgataatgcacaatatactttgtcttttttttggtatttaagcaaatgtttaataatgaataccaaaattacaagtgtgataaagatgggaagaaatacagctgggtacaatacaaatgactagctatgaaaatcatgtttttccatttggaatcaaactttttgcaaattcattttttgaggaatccggcaaatttgaaagtcttccaaacgtttaaaccagctttattcccccacatctagttagtcgtcgaaactcgatgaaagatttgtaaaaaaagattaatcaattgtgagtattttttgaattccctgagtaattaattttactacgtacaccatattttcaaatgatgataatggaaggataacaattttatatcttgatgagtgatgat

SEQ ID NO: 62685 - DNA, 371 bp, Arabidopsis thaliana landsberg
accctatttatcccgaacaacgatatcaaccggaacagttctaaccattctatcaaaaatgaatatctaatacgacgtgtaagctattatatgttataatctatgcatggatagggataggcaccaaaaaaaaatatctatctacagagacaagtcgatcgtttttcatggctaatgagtcaattccaattgttgagcacggcatatacattgactagagtctagctatatcttcttcaaattcaaggatggcaatacagataacagatctaacttgggagcatgatttagtttagtcgattcttcaagaataaagggtatgtgagtgcatatgtggaagatttgaagttaagattggtatacaaactcct

SEQ ID NO: 62686 - DNA, 478 bp, Arabidopsis thaliana landsberg
actttgcacgttatgtatatcattagacctataagaaaccatcacatctaactatatcatggtcatatgcccctattcgatacttaccgccaaagttgctcgcgatctatacgagagcttggattcaacatcattgaggcgtttccatctgattttccttattcagagtccctctggaaaagatattccttctggaatatatgtgtttgtcctcttctctcacagttttgttaaaatatttaacaaatcttctgttgctgaactaaacctactttttattccccacagatttagggacacttgaggaggacaagttcagtatgcgatgatattcttggcataggctttaaaattttcaccaagcatgtcaacactctagaacatgaactggtggtaattatgcttccggatggactttatgtataaatactttttttttaattgttcatctctttttgagtcaaaacattacatctta

SEQ ID NO: 62687 - DNA, 211 bp, Arabidopsis thaliana landsberg
ggaaaaaaagaaaaaacaaaaaaaaaaaaaaattacaaattataaaacaaaaaaaaaacaaacggcaaaagggaagagataaaacgaaaaccccaaaaacaagaaaagaaaaacgataaaacaaacacaaaacacaaaaaaaagggaacaataaccaaaaaaacaaagacataccaaaaaacagaaaaacgaaaagaaaaaagaaaacaaa

SEQ ID NO: 62688 - DNA, 146 bp, Arabidopsis thaliana landsberg
tttcgcagaatcctaacgtatcgtgttgcttcctagatatcgttatgatggctgtttcaaaattcaaattgagtggaatcattaaagatactatactataatgctattaataccctcatttcctgtagtgattgacattcaatagg

SEQ ID NO: 62689 - DNA, 292 bp, Arabidopsis thaliana landsberg
aagcagccaataggatcattctgaaatttcattgcgcgtacttgagaaagaggtcccagatggggccacgccatattttgcccatctttttgttcagaaaacagtcgagactagcatgatgcaccatctgaataaaagaccacacaaaattaaaatacacaatggagcaataaaatctatgactattggcttaaaggtataaggttttcttatgggtagaccattgatttgatccctgctgattagctagatttaaaaaggtccatggtctggtttaaatatactcacttta

SEQ ID NO: 62690 - DNA, 541 bp, Arabidopsis thaliana landsberg
tttatgcaataatagggtactacccatatttaagttccaaaattgaaaaatattatcaattaattgaaatttgcgactattttgcaaatcacaattatacaatatgtcaagctctattaataatttttttttttcagtcgaatacggataaagaatttagaaaatattttaatatattaacaaaaataatcaataaaattaagattaatagtttaatatattgaaatttccgttataggaaaaggaattctcacatttttgatataattttttttaacttatgcatatatttttttctgatagagttatacagcttttcttatatttatctttaaatatattaataaatttagatttgagacatgatgatatcgtgatcacataagttagcaacttgtaaaattcaacttataataagatggtcacattaaataaaaacacatgtatgattagaaatttccattttacaacctaaattatatgtctcttttataacaataataataatgcgtctgttaaaaaaaaaaagcgtcttttacat

SEQ ID NO: 62691 - DNA, 462 bp, Arabidopsis thaliana landsberg
  unsure (1)..(462): unsure at all n locations
ttttctcttctgtgcgctttttcatttttactgctttatgttctcaaaacatcgtacaccctgatggctactgtttgatttttatctggataaaaagataaagccagttcattgtcaaatggggtaggataaacaaccggttttttattatccccgcnnnnnnnnnnnnnnnnnnnnnnnnnnnnnnnnnnnnnnnnnnnnnngggtataccataacccattattgtatcggggttggcactcatatttgcactttgctgaatggattgaagcagctccatatttgtagcatcagggtttgcctgccacaaacaggccacagcacctgctgttatggggcaagaaaatgatgtgccgctggatacggtaataccacccgtatttcctgcatttacagcattcaggccacgggccacggtattgtgtttgatacgtccgtcagcttgtagcccgcgtgagctt

SEQ ID NO: 62692 - DNA, 856 bp, Arabidopsis thaliana landsberg
cgatcacactattacgctaccactaacaaaatatgaacattcccaatgaaacagagcaattcagccttaaagcagaaatttcaagagcataaatacattatttcgtcgcaatttcagatcaagcagacaaaaaataaattcggacaaacatgtggaacaacaccagtaagaaaaaaaagaagtgagctaagttcctgtctaatgaatagattcattcgcctaccaaatgtcgcagcaagaaaaactcaaaaatatggcaaaataaacgtaatttcaagctagcaaaggaaccaaacaacggagggaaataaacagtggagaaggaagagaaagagacctaattggagaggaggagttatagagccaaaagatctgcgatccaccatagatggataaacccaaaaatccaccaaaagagatcttaagctttcgtaatcaaaaagagaatcaacgaaccctaaccgatctgagtatgcatgaactgagaagcttataatcttgtttccttcgtttcgggctatatccaggtgtgaaaacgataccgattttttttttcctttttttattgaagcgagaccgaggaagagaaccgaagtaaatcgctttgtttttaaacactgatttggaccacgtaaccaccaataaacctccgacacgtatacatgtcagatttgtctggcccatcaagtcttttttcttgggcaatcaagtccatttccttgaatttaattatttaaacttttttctaattcaagattgatgtcaaatgtcttttccctctctttcccgcggcggcggatctggcagtggagattctcagatcttggtggagatctaataagtctatcagatccat

SEQ ID NO: 62693 - DNA, 796 bp, Arabidopsis thaliana landsberg
tgccactaattttctgcaactttaatttatttcgtagtgggtttctgcagcttacattggggtgtcttgttctgccgtgcctcatgttgggttatatgggacaagctgcatacctgatggagaatcatgcggatgctagtcaagctttcttttcatctgttccaggtaaagttcagctgcttccttcaatcagtaatatacatgcctctttggcaaatgaaaccactttgatttccctgcaaaggctgttcttgtggtgtggattagaaacttgtatttcaaattagtattaagttattgattcatcattccgttctgtaggctctgcattctggccagtccttttcatagccaacattgcagctctgattgccagtcgcacaatgacgactgcaacattttcatgtattaaacagtcaacagctctgggttgtttccctcgtctcaaaattattcacacttctcgaaaatttatgggccagatttatatacctgtcctaaactggttcctgcttgccgtttgcctggtcgtcgtctgctcaatctcaagtatcgatgagattggaaatgcatatggtaatagttgttttctatgcttccctgtctagcttcggtgatccgatatgcttcccccgttttgattttctttttcgatttcccagggatggctgagctaggagtgatgatgacaactacaattctagtgacgttaatcatgcttcttatatggcagataaacatcgtaatcgtgattgcctttctggtagtttttctcggagtggaattagtctttttc

SEQ ID NO: 62694 - DNA, 588 bp, Arabidopsis thaliana landsberg
tattgaacagaccctctgcttgcagagagatatcagcgattcgccttaatcagagtgacacagttatcataaatcaaagcattggcaaattttgccaattcaactttctctaattaatgtttatattattatatcaatgcacagcgcgttacaacacatatgcttcttagttaataggagtcgttactctatcactagtattattggtttggtcactcttttttggggtggttacccacgtatatactaaatatacactatgatctacttagattttaatatttgtgatgaattgtgaactataccaatctagtggttatgactgaatattttcatacatttaataaatcttccctcatggcataatattagttaggtaatatatagtggtatagtggacactattttatatttgttaaacatggttcgatgcattggtggtctttatatcaagcataaaaaaacactaaagctagtattggattcatccacttacttgctataccgacatttgatgggactaacctactgcatttagcctgaatcttgcctagactcagggctctaaaataatcctccctcatgacg

SEQ ID NO: 62695 - DNA, 1695 bp, Arabidopsis thaliana landsberg
caatgcaatgattataattaaatcccatattcatttcagggcaaacccattaatcttgaacggacgattatgatattattaagtttatatacacacatatttgagtcattgatcaatgcaccacagcacctgatcttgattgtggttcaaataatactaatgtttcccaaaattatctataagctaaatagcataaaatttaattaggttaaaagagagagaacaaatcacaaatctacttataggtagttaggcacatacatggaccatatttcatatgcttaattacaatattaacaaaataaatcaacaaagaattaaatatcacgactaaatacaacgtagctccaattagttgatgagtagcccggcattgcttactcattaaactctgcgaatcttttactcttttccactataaatatatatacacacacagttctcaaactattaaacgcaacaaatcaaaagtaataatccaaattatatatacatatatgcaccatttggttaaaaactaagaagaaaccaaaatgagaagttttactaatttaaatccttgctacgttctcttaccgttcttccttgtcctagccacgaatgcaacacatacaaacaatttcctcccaaggccacggactgggtattacggtagtgcatgctggaatgtagaatcgatagttcggtccgtggttgagtctaactatcttgctaatccagccaatgctccaggcattttgcgtatgcactttcacgattgtttcgttcaaggctgtgacgcctccgttctcctagccggacctaactctgagcgaacggcgattccaaatctatcgttgagagggtttaatgtcattgaagaagctaagactcagcttgagatcgcttgtcctcgaacagtctcttgtgctgatatcctcgcactcgctgcacgtgacttcgtccatttggtataacttacttttctaattttacttaattatatacataagtctatcgtgcgtcttgggttttaacgtcacatgcatatatgtctatctattgacaacgtgattaaatgaaagttttatacgtatgcatataggccggtggaccatggtggccagttccattggggagactcgatggccgaatttctctagcctcgaatgtcattttgccgggacctaccgactccgttgccgtgcagaagctgaggtttgccgaaaaaaatcttaatacccaagatctcgttgtccttgctggtacgtagtgattttataaggcctcgatcgcttgtgttaaaacattgttttttcgattatgtttgcatgtgaaaattctaccttttttatatatttctgcaaacgtaaagtcgtaaacaaagaatcaaagctagcttaacattcaaaggagataataaatactttctgtatgttacaaattacatattttgaaattgtcatgaagacacctggctaattcacatagagggcttggtatataacagctggacatacgataggaacggccggatgtattgtgtttagggacagattcttcaactacgacaacacaggaagtccggacccaaccatcgccccgagttttgtccctctgatccaagctcaatggccctctgaatggtgaccccgcgactcgtgtagtgctggacacggaagtggtgaccaatttgatacgtcgtaccttaacaac

SEQ ID NO: 62696 - DNA, 1434 bp, Arabidopsis thaliana landsberg
ttgggaaagtataaaagctgctgttgatataactggtcgaaagttggtatgtctttccccccaatttttagctcgggctatgttttgcctattttccatcaagattgtagataatcctccaactcctgctggcgttttttccatatattccaccatttattgcatgtcgccaagtgtttctcaaattatgaagcaaaagtttcatttaggaagttaaagaacaaaggttcatttgtttttgtatccaggtctttgttggcatgtcgttgcggacatacctagaggcagcttggagggatggaaaggctccaattgacccgtcaagtctggtataagacctttctcttatacaatgaatttgaagagaaacttttcgacgttagcatatgctccaattaacttatacgataaatgcataaagtttgtttttaaataaaaaagcgccaacacctgccatatgttagtttgatgattcaaacaagttctggtttctgatttcacctaattgtttatccttctttaatgtttacgaagataaaagtcgaagacattgaagcatatgctcctaaggacttactgattgtcacaactggatcacaagtaagttaatcttgtcaacttgtggagtggtgatttcaattcgactttcctagctaatttatttgttactcttatttgacaataactctaatcaggcagaaccacgcgctgccctgaatcttgcatcatatgggagtagtcacgcattcaaacttacgaaggaagacataattctttactctgccaaggtgtatatatgaaaatctacatacataggcttaagagcatctaataagttagtggctgtgatcgctgatatctatttcggtctaatgttttaatccaggtaatcccaggcaatgaatcacgagtaatgaaaatgatgaatcggatagcagatatcgggccaaatattatcatgggtaagaatgaaatgctccacacatctggtcatgcctaccgtggagaattggtaagctgctgcttctcttaagactgttgataccttcagaagttttgttgccagctttcctttctgtttcttttcacttcatcaatcttaggcttttagcgcatatgtaaaggtgtaaaggcaatagttccctgtttgcaaactgatgaatatctaagggaaaattttgtttctaatgattgtaactattccctattttgaaggaagaggtccttaaaatagtgaagccgcaacattttcttcccatacatggagaacttttgtttcttaaggagcatgagttgctcgggaagtctactgggattagacacactactgtaagtctctcaccaaagacatatgaactaaaagtagataaatagcatacaacataggaaaataccgattgtgaagatttgttctaaaagtggcaacaacatgtt

SEQ ID NO: 62697 - DNA, 491 bp, Arabidopsis thaliana landsberg
aacaagactcacgcttctggttagagaaaacgagcacttacggggctgctaaaggatctccagggggtcttctcaaggtaatcgcaacagtcactatctcgtgtgcctggatttccaagtcattagtttgtgttggcgagaacaatacaccatcttggtgaagaaaagtgtttgatagaacattttcacctcgctagaaatgaaatgcctttcaacatcttttgaaatcaccgagatgatcgatctttattctatatatcttataaaagtaaagagcctccacgatgaagagcgcatgaagaaaataggctgtcataatataatttagctgatagttataagtcttcttctttgtgcttgttagttcgcttcctcttcttctctttcattatcgaattctacactttggttgatctgcgctaaactgggaccataagagccacaacacacatgcgggtaatcaccaaccgaacgtttgctcaagttgagag

SEQ ID NO: 62698 - DNA, 596 bp, Arabidopsis thaliana landsberg
ttgggttggacttgtagcaagtagtcgccttccagaagacatcctggccagcataatcaccacagaaggtcgtgtcgatgatcaggttgtggttcttgaactgtttcgcaacatcgcaagagcctccaacggtggtgatggtggccttgcgccatttggtcgggtctgggtttgcgctcaaagcgtcgataccatcggcactgaggcgagggaagttccagaccttgatagtcgttccggtccattcctataataactgtcagtaggaatcgggaaccaatgtccgtccgtacttaccagcgcgtagatcccaccaccaacggagttgaagccgtcgccatagttgttggtggagtcggtactgtcaacagagcaaccttggttctcccactgagttacatggtctgcgtagtagttggagcagtgcgaagtaaccaagcttgctccctgagcagccttggaaagggtgcagtccgtagtccctgtgtgcagggtgacggcattctgcttggcctcgctgattattctcgaagatatcaatcttaccatcatttggccagttttgctgtccggaagtccagaaagccggccacaca

SEQ ID NO: 62699 - DNA, 329 bp, Arabidopsis thaliana landsberg
  unsure (1)..(329): unsure at all n locations
acgattgaggggctgctgttcctactaccaagggcggacccccaacagacttaaacgcaactgccgacacgaaagcggcattagctttaacaagctctatgccaatattgtcccaaacagctgcccttatatcataaacccaaacctcggccaaccatgtttccagcaaggagaagccgaccctggcccnnnnnnnnnnnnnnnnngatggcggacccacgaaaggactgcctcagagcttgaaagggatgatctcccatgaaaatggtaactactcgtaactgttcttcacaagtgaggcacacaccattcttatccttgaccaccaa

SEQ ID NO: 62700 - DNA, 442 bp, Arabidopsis thaliana landsberg
aataggtagaaagggtttgggtataagccttatagtacacccaaatcacatatatatatatatatatatatatatatatatatatattcatgtgaaataaaaggaactatatatatatggctatggactaacgcatatacaaaaccattcacgatgaactagaaagtcaatcctattatttaatgatgtacatttcgagagtggagtggcaagtattgtccattatcatcaaacatactaaagtcggtccactaaattccatgtctcactcgtttctttagaactaattaattagtgttaaactaaggggaaattgagtcggtcaattgcaatgataaaatataccaaatttagaagtgttatgaaaaactaaaaaaaaatattttggtgaatatgtgcgtgtgcctatccttaagcatctcaactttaattttcttataca

SEQ ID NO: 62701 - DNA, 377 bp, Arabidopsis thaliana landsberg
caccagggcccgcggaagcgcacttcgtcgttatacttcacggccaaaggttctaattccatgaccaacctttgcatacccggcaaatttaaaatccttattgatttcaaccccaatctgataatcggccaatgcgccttagtcgttcaataccaggtccatttgtttttcgatcatgctgcgaaagccccctgactctttaaaaacgctgaaacacgcaattttggctgaggaccggatagacaggaccaaccctgctgcggaggtaccggtcccaaccgcacaggccaccacaacagaaggctggtttatttccctgaggatctcggtgcaacccaatacaccttcataattggcgcccccttcgggaatgatcc

SEQ ID NO: 62702 - DNA, 267 bp, Arabidopsis thaliana landsberg
cgcccactaggctccgtgcggcaatgatgaagatcttaaccgtataccggctttgccaaaggtagatgtaagacacagctcagtccaacatacacgaagcgctggtatgatgatgaaacatagggaagacagcatccatttaacaataagtgaatgaccaaacggcatcacagggaagatcctgaaaacagaaccttgtgcatgacaggaacaagatattcgaacgtactcattagatcgcttatgggtgcacatactacctgacac

SEQ ID NO: 62703 - DNA, 727 bp, Arabidopsis thaliana landsberg
  unsure (1)..(727): unsure at all n locations
ataagtgctaaacttttattttgaccagtaaatttttttagtgttccggtctattaaacaatataatatggtgagttaactacacaatgtttacattatacactttctacgaaacagttaggatagcaacatctcggatcattttagtgccaagtgaaccaaatccccctaggaagaaagtgatgaactccacattatatatatacgattttcttgttgtaaattccataattgtaattccaatgatgtctattttatttaaaaacttaggtggaaattttaaatatagatgatatattagaaaaagcttatatattcttaaattaatttaacatgaaagagattgatgatatatgttcttacttaaagataacaaagacaaattatcagaaaaagtttctaatttcatgttgtaaattgtttcaaaaggttgaattttatcatcaaaaatacaattagcatgaatttctatatttttaatgatgcgacgaagaatattttaatgttcaccacatatctttcatctgtattctttatttctaatgtaaacttttattaacgttttatcaatgactcaaaagaaatcaaatttgtcaaactttaatactagttgttatcgaaggtttttagttaaaagaatatctcacatgtcaattatatgtagtgccggttntattttgatgcattttttttattaaatatgtagcttggtttactattatttaac

SEQ ID NO: 62704 - DNA, 572 bp, Arabidopsis thaliana landsberg
gttattgcccctgtaaatctttttctttctgtgtgccgtatccaattactactaattggtttaatcctgttgttatagcagttaatactatattaataacgtgccgcccattcacgcgtacctctttatgcttatagccgagaaatgacactaccaacaccgcattatccggtacttgcaagctgaatttaccatcaacatccgtagtagtaccagtagtagtcccactcacctggatcgttacgcctgaaagaggggttttattggcagagtctgtcacagagcctgttaatagataagaagtcggcactggtttgagtaatgaggcagcatttgtttttttagccttgaggataaccgttttgtcaatgatggcataggtaagcggttggcctttaaggcaagcttgtaatgcttcttggagggtggcatctttaagagaaaggctcaccggtttggcttctttcagtaattgatgatttataaagaaagaatagcctgtttgtttaccgatctcccggaatgcctttttcagggtaataccggaagccgttaaatttacatcctgagaa

SEQ ID NO: 62705 - DNA, 1215 bp, Arabidopsis thaliana landsberg
gatcagcacttgagtgtgttgaagttcaaaatggtatccaagaagctgatgttccaaatggtagtgaggcacatgatagcaatgttggaagtatttctttgtttgaagttgacgtacgagaaagattgcaggcctttttgcagtcttcagatctatatgatcctgaagaaatcttggaattggtagaaggatcagaactgtggttggaaaaggtttgtctgtcaaatttgtttccttcgattttgaatggttcttaaaaagtgtcatttagatgtgtatgcgcacataggatgcttcatgattatgttggtgcaccgattttttattcaatggattttttactgtcaaaattatgtgtgtttgcccatttgtcatgtgtaatttttttttatttgataggcaatcctataccgaaggattgggaaggagacattggtcctccaaattcttgctctgtaagttgatttaaataccaagaagtgataaagaacaaaactgaattgtctatctgattgtgtgagcaaatatagtttattttattgtgaatttgaatgtggttactgataagatcttctctggttgggcgccaggaagcttgaggattgtgcagctgcagagcaatattgtgtagagattggaagaccagatgcatttatgcagtaggttcttttccttcatttcgttacttattgtgaatgccattgtacgatcttttttccttgtgaaatccctttaaacaaaaagtttatcttaggttgcttgatatgtacctggatcctcaaaatggtaaagaacctatgttcaaggctgctgttcgtctgctccacaaccacggggaatcccttgatcctttgcaagtattggacgtaagaaacccagtcctcctccatatgtgaaaaagacactgatattgcctcttatcctacagctttttcatttggtagttgtttgatgatagagctgatatctttttttatatgcagaaattgtctcctgatatgcccttaaaactggcatcagatacaattttgagaatgctgagggctcgggttcatcatcatcgtcaaggccaggtaaaaattcacaacccctaccaattgtgtgtttttagttgtcaaatttgccatgtgtaacagtaatatgtacatttaaatgctaagaagagataattattgaaagtagcatagataaacttatcaaaaagttgttactctg

SEQ ID NO: 62706 - DNA, 103 bp, Arabidopsis thaliana landsberg
  unsure (1)..(103): unsure at all n locations
gnacttggactccaacgtcgttaatcaactccacangtcattacaagggaaatgnaaagtggctcgagtggaacaaggacgagggtgaatgggtgtatggctt

SEQ ID NO: 62707 - DNA, 564 bp, Arabidopsis thaliana landsberg
catttcaaattcatttgaatatctaataaagtttaaattttcaaattttgttttttttgcttttagcgcaccaagtctgcaagtttttccggacctgaggaagtttccataattcaaatatttatagcgaagacacttctacatgttggggttagaaagaaaaccaacatatcatggtttagtaacatgattttgtttaaagatttaattatttatgtaattatgtggctgaactgaagcaattcatagtctatatagaacagcaagagtcgtgacacccacattaagtagtcttggtacttgcccagcacaatatcagcttcaacataatttcttacaatattttatttaatttatctatgaaaccgcatttaatttttgggtttccttttttgtacatgcacataaatataaaatatatttatgtggatgtgaaaatcagatttgcgtattaggtttttgatgaaaaattgataacgtacgcatacattaaaaataaaatgtgtattgaaatatacagcaaacggatggattttgtttaattatttcaacgggaataaacag

SEQ ID NO: 62708 - DNA, 1359 bp, Arabidopsis thaliana landsberg
ctcgactttgatgatgagctgagacatgggctaggatctgcgaccaatcagtggagaagtgagttttgaatataccttttgcaagcaccgcccaaacctccgatgcataggtgcaggagaagaacaggtgatcccgggtttcgacgcacgttgagcataaaatacagtcccttgacgctcctctattccacttgagcatgcgggctcctgtggctagtcgatcgtgaacggcagtccaaagacaaaaggagaactttggcgtggcatgaaagaaccaaaaattttataatttttataattttatggaaaagaaaactgagaaaaaggtggcaatgtgtatgtgtttgatgagatcgtgaaggcaaacactaatcatcagaagcgatccaaactccaaaaacttatcagtgagaaatgagaggagtcaaaccttcatggatgagaagcgtcattacggattgatggaatctcaacttgatgagagcctcatttgtgctatttcattagtttcacgtgatactagcaaaacaaagaggctggtgaattggcatttgacttttctgtaattgccggagaggttttggatggtcttagctatccatctctatcatgtgtatgttattatgaaaatagtttgtacactttatgttttgggtggtacatataacatatgtactcaaaacttcactatagttacatgtaacaaagatatgttaaattctttattttcatctttctctataaactcattcaaaatgttgtttatatatatattgatagtaatatgaagtcaaaaatgatgtaatctaaaaaataattgtagaacagcacttacattatcttggaacgtagatactagttttctaagttggccaaaaaaaaaaagatactagtattctaagtttgagaattaaatttcttattaaatcatattatgctaacacttccaacacgtatttgctttcaaaatttcttttacaaatatcgtttctaggtatccagtttctatgcattgtgaaaatgtagatcgagactcgagaaatgtacaatgaagactaaaaatagaaagatccaaacttgtgttgccttagttggtggaaacagtacagaaacagagaggccaagatttggtgggaagtaagagagttaagtgaagactgatttaattcataaatgggacaagagttcatatatccaccacttcctcttcttacatttacttctctattccattacagttagaagttggaagacactaactacttcagtagcttgcattgaccaataagcaaatggtttccacaaatgtcgaatctatatcgaagtgtcttaaattataagtccaagggcctggttttg

SEQ ID NO: 62709 - DNA, 740 bp, Arabidopsis thaliana landsberg
ttaagtataaaaaaaaaattatactggtgtaaatttcatgtccttttcagcttcttgggatttgactgaaaatataattcaaagattttgatatatttgctttaataatagagatgatactatgggctttgatctttgaagttacgcatataggggtatggggaccaatttctggctaaagaaaattaagttgcattgtaaattgttccaacatttcaaataatcagttaatatatacatatatatatatatataacttttatcctagatcaatttatatccatcacacaaatataactatgtaacctaaaaaatcacaccaaatttataatatttttttaaaaaattcttatgaacacacttgcactaaatatctttactcctgatcataacttcatgagattagaaatctttgtcagcagtggagtggagatgattttgaacaggaagaaagaagtactttgttgtcacaccaaaaacagtcctttgtgataggactgagaagatgattttcttgtgggacaagttaccaataccatctttcatatcttcaaagattcgcctcaaaagaatcttttggtgatccatttcatgtccatacgtttattaattgggatttcttttctattatataaggacaagaaaatacataatatacaacaagactagttttagagtctagtatggggataaagtccgtattaccataaagttatttgatttagttgttggttcgtatt

SEQ ID NO: 62710 - DNA, 577 bp, Arabidopsis thaliana landsberg
ccacagattgtgatcttctaaacaaatcttggacctatagacccatcaggccatcacacagtgtcacagacctgattggtagtttctacattcagtcacacacacgcacacacaatctgtctcttatttgtgagttacatatatagagagagaaagagaaagagagaagagagagagatagagagagagagacaaactttggtagctatttgtaggtatacagtttgaattcaatccaactggaatgaagctcaattcaattgattagagaaatcccttgacccagtagttgaccagccaacagctcgtttacagcctctgtgggatgaaatccatcccaaaacacatatcctgtggcatttacacacgttccgaaggatagagaattgcaaaggaacgatgtttctattgtccctgttccgcagcatgccctttttgtttcaaagaatcctagaatacatgtagtttagacatttaataagatgttaatggtatcttgttagttgctaactagattaaatatctgaggtcttcttcctgtgaatagctcactctatcatggtctaaaagtgaatga

SEQ ID NO: 62711 - DNA, 701 bp, Arabidopsis thaliana landsberg
acacaaatccataaaagaaaagtagagcacactagttcaaccagaggcttcgattggttaaatctattgcaaaagacatgaacaaaaactgaatgtttcacacaaaaaacaagaaccaaacaaagtcacatgctcgaccgactttgttcttgatcagaaagtacactcgacacctttgtgtggaagaacatgctttcaagtctctcccttgtggaattaaggagacaaaagacaaacaagtagtgattaagttttatttgatctctcaattgtttaagctctattagaaactttcttgtatttgttctacctacgtaagagattgttgtaaggacaaacagaaaactcgtcaatcgtgcgtctttttagtgtaaaagaaagagaaactgacatcaaaaactaagagagtagtaacataacaaaagcttgaaatttttctcaatttcctcttggtcaaactcgacctaatcccaaaagatagttatacaaataaaaaggcatggaccttgttaaacaaagtacgctacgaatacatcacaatacaaatcatgaataatgatcatgatggtaaccatgttcattatcctgatggtatataaaagcctattcacttgtaaacacaagtgttcaacgactatcatattatttggcttcttttcattttttttcttgtgaacggatcatatttttctaaagtaatg

SEQ ID NO: 62712 - DNA, 1723 bp, Arabidopsis thaliana landsberg
cttgcaacgctgcaaactcaattgggtacagtaacttaaagtcactttttctctgttgattttattaatttgttcctaaatgtgaattggaggatcataattagggaaattaaggccatttctataagattagatactctcttgatgttgattaagttgaatcactgatttggttaaattctatactcttaaagttgtgacctttcctttttttttgtttggtgtagctacaagtttaacaacatcaaccttcttcgccgtgcaatgactcatgcttctttttctcaagagaacaacaaagccttgagtacctttggaacccatatcattgaaaccgcggtctctcttcagtttctcgctaaagatatcgatatttcctcgaaagcactgggccgtttgatatcagaggtttcaaatgtggagtcctcatgtgctcttgacggagaccggttgggtttggggaagataatcagagtttctaccaagacagatgcatcgaactcggccattctttgtactggctttagggcaatctttggagctatagctattgatgctggaacggttgatgaagccatcaaggttttctggaaggtacatggagctcgagctggaagactagtctctatgttgtaaattagagctttattaagttattaaagtcatgttttttcggatgccaagttctaagagactcttctccaatgcttagaattttatggttgatgttaactattagctgctgttatgagggtgtaagtgatcatactatagtgttgactccaaaactatctatttttgttgcagtacctgcagtgacttaatgactgaaaacgttaaaatgacaacaaatcagtcaattgcaaagaattatggtggtatctccatagaaaatgtgaaagtggtccaaaatgtgagagatgtgcatgcagacttgtggatccaacagttgtgaaagatgttatgtaatcagaatgtgcaaatgatgcaatagcgacacattagtaattcgaactgttacatgtgttgcagtaagcaagtcataggaaatagggaatcccatcatcatttacttgttagtatgttgaatttaattgatatattttgtgaatataggattacatatgtatttaatgcggtattttgttaagaagattttatgagagaatctgtaattatattctaatttttgtcttacatttgcaatatatacgtttgactaaaattaagtgatccttaaattgcacatattaccatataaaagtcacgtgaacagaagcaaacgtttcttattggacgaaacacatcacccacttcaatggcacgacacaaccaaaacatatgtccaaaaaaaataaacgattttgggagaaaacaaaacgcaccgcgtcggtcgtgctgcaacgctttcttcttcttcttcttacctcgctaatttattactcacggatctctctgactcgagccgtttcacacacttcctttgtttgctccatttctcgactctctctagaggtcccgtctttgattaccgatattggctaatctctctctctctttaatccttcttcggtttctgaattcgtggtagatctgttgggggaaaaaagggttgggatcgtatttagataatgcacgagaatgatgatcttccgcaggattctatagctgatggaattgagaatgatgaccagtctaatgggcaagaagaagaagagtttga

SEQ ID NO: 62713 - DNA, 673 bp, Arabidopsis thaliana landsberg
ttgtgttgacaaaacttcttttattttatttttaatttcatcttactatatgtgcaaatttggctggcaaagactgccatcgaatcttcgagtaagataatcatgagttattgattgggtttaccccatccgactaatcaaattttagattcttaattcaaatataagaaacagtggaacattgaacccttgaaagcttataaatatgtttctttatgcatattcgttttgtaatgtatgaagtatataattcatttttcttcgttgactcacttgtgaatcttctatttttgtcgttatttgcacgctatgaaatatatattcgcactaatcatgaatttaatggctataatataataatagtaataacttggaagttggaatgatatccatctatgtattcttttcttgagaacacaaagaatcaatctcctcagaaaaccaaacattttgaaaacctatttgagcaaaatattattgctttatataatatatataacacacacgaaaatacagaccctaaaagctacatttagattcagaccagaccattgatttttttataaatggctcgtgttgatctcttaaaaacttcttcacacttatattaataataaagatatgctttcttaattaaggggaattacattagccgtttatgagtaaaaacttg

SEQ ID NO: 62714 - DNA, 581 bp, Arabidopsis thaliana landsberg
gattgttaattctagtaatatcgagaattggactataacgggaccatgtggtttgagtaatcaaacgtgaatgcatatacatgtattatacgttgagtatgaatacgatcaacgatattgattctttagcgaataaatgtccaaaactagttgccgaccaaatccaaaaatatgtccaaaagaccaaaaccatcaacggaagaatcgttctaattttggtttaacaaaggacgtgggtggtggaaatatcattaacttaattaaactaactaacatctaatcatataagaaaagctttttaagaaaacaaaatataaaatatgaagaataatcaccaacaacctacttagtacgtggaatatattccataaatactaatatacatagtaccaagtcaattcaattagggagagttagtgatctattgttccaaagcaatggacaatttaagagtttgttagtgaaatataatacttttaagccgggtccggcttcttttcaaaaattaagttttttaatcccgttttaattccaaaattcaaaactgtttcacgttggaatttctcctggaccataaatgg

SEQ ID NO: 62715 - DNA, 291 bp, Arabidopsis thaliana landsberg
  unsure (1)..(291): unsure at all n locations
aaaaaacacaaaaaaaaacaaggggaaaaatttgaaacatttaaaaaaataaaaccccctaaccccccaaaaaanaaaaaatataaataccaaaacaataaaaaaaaaaaaaaatactaaaaaaataaacaaacaaaaacacaaaaaaaaaaattaataaaaataaaaatcaaactcaaaaacaaacaatacaaaaaaaaaacaaaaaataaaaataactaaaaaaaaaaaaaaaaataacaaataaaaaaaaaaacaaaaaaaaatacaaaaaaacaaaaaaaaaaaaaa

SEQ ID NO: 62716 - DNA, 577 bp, Arabidopsis thaliana landsberg
  unsure (1)..(577): unsure at all n locations
caattggcatcgttatttaccagcacgggaacatgataccgcgcttccatcttctttttaaggggcacttctttccaggacgggatattttgcacgtcatacacaatacctttttccacgtctactacgctgggtacgccgatgccgatggctttgactgaatcggtcatcaattggtccgtcaggcggtacaactgctgcaacaccgcttattctgcctgtgaagcggtaatatcgtcagacaatacgccggacagccggtgtttatctacccgggcgccgcgcacatgcgtacctcccaaatcaattcctattatcatatcgccggccgtttatcatgtagaattgtttataccgaagcaggtaatcatggacaacctgagaacgaatttcatacaatttagcagctgtaccaagaattatttgacatgatacaacagaagatgaggatttcccgttttacccggagcggttgctttttcgtgaaaaatatatagttttacctcgtccttttatgtcacaaacaataaaatgagcagcaattttacccctganaaagcgctggtagaagaaatga

SEQ ID NO: 62717 - DNA, 1473 bp, Arabidopsis thaliana landsberg
tacagctttatttgcatactggaccaacaaatttggatcaaaccttatccaaccaaatttatataccttgaggcttgagcccatatatctgcaaaaattacagggggtcatcaaaatctcatcgtaccagagtaaaccgatcacataaccatttggcaacacatcaaaccggttaagataaaatcccacaattcctcttcataatcttgggtgagaaaggagaggataacttttggtgatgtgaatcagtgaatcctgcttaaccaattatgcaagacaagaccaaagacataatatcggtccaaaccagtttacataaactggagactggactcctcatcatcaccattagcatcattaggatcgttgatccgttgtaattagtaactgtaattctaagctaaaacaaaaagttgcagaggattgatcaatcgccactgccaccttccaagagatctaaaagagtgatctttccgttgctgcatcggtcaagtttgtcaaactgtttggagattggtaatatgtccttgtcggttattttctccatttccttcagtttgtatatcacatactctgctttactgcaaaaacaaagaaaaaaaccagaagatatctcaggtttgagtgagtatacaagcaaagcatttctctgtgttaaatccgaaaatgcgtctaagcctccctttcatggtcattcaaactttatatcaagccgaaaacatacaatgacacgatgctttcgcatcacacattcacagatcttcaacttagcctaagaccacaaactatgttcttgaacaaaaagattcataagaagaagtgcagaatatgaattaacttagaaatccaacaccttcaagaatctaattagctaatgagctatgaatgtttttgttttcaaagatcctctacacaaacgaaaattaaaagactaataataaatagcaaagacaaaatcttttggatgacttctaagaaatgcataaacattacggatgtcacaatggatattttaacaaacataagcatcacacagttaattcagatatcagtttaagattcttaaaaccttaaggagtgtgtcagagcatataatatggataaggaatgagtcaaattacctcacacagccattgttatcaatatctgcagcgaaaaactgagagacagacattgtttcacaaagcactttcttcgcccgttctctattcctcttatccactctcgcctcagccaagtacaaaaaagctcgagccacagctaatgtagacacaagcagccatatcgcagcgaaaagcctaccgggcaatgtcttaaaagcccgatctccatacccgacagtagtaaccgacataaccgagagataaaacgaatccaaccacccgatttcctcaatgaaatgcataatcccaacaccaacagcaatgcataaaaccacaacacctaatgccaaagccactttcaacctattct

SEQ ID NO: 62718 - DNA, 559 bp, Arabidopsis thaliana landsberg
taaagaccgaaacacgccattcgaattcttgattgctttatcgttcctccgagccttctgtatacgaatcactttccccacctaatcaaagttcagagataatgtaaaagattggtcaaacttaaacaaaccaaatccaatcctgtacatgacattttactatagaacattgtgttaattctttagacactaatcaatctgagaagataagaattataccaatactgattctgattctgattcttcatagaagaagagagccactaaaaaagaatctatatccaagtttctaactagagaatctaaaccaaacttttataaagctaaaaagtcaatgacggcgagaatctgaactactttttttcaaagttcatcagacttgctttaacttttacaggattcaaaaggaagagagatcgaagaagaagagactaacaaaaagtggagaagatccagcgtaagcaagaacgagattggcaccaccttcgcctctgtaaatccaatctgatgcatctttctcctccaaaatcatctccatgcgatacaaaattcttcgatt

SEQ ID NO: 62719 - DNA, 549 bp, Arabidopsis thaliana landsberg
aaatatgaccaattgagtaatgagagagatggtaagagatgattgtatataagagaagatcaatgaggctgcttaggtgtttggtttaggaaagatgatgtcaattggccgacaagagagaccacttttgattaaatagtttcttcatgtatagtgtatgttttaatttgacactaatactagtgtcttttggaagctgtaagagagctcaacaagattatcttaattccaacaatcatggtaacacgagtgttgttctttttatatacataaagttattttgagaattggacaaaaggtcttaaaaacagcaccattgacacttttgtatcctcttctgccaacaatggtgctatttttcaattgcttatattcggtattcgtgtaatgtgtaataagcttatgtgtgccgtataaagtacatagcgtaattattgacaacgaacatttcctttgttgaacaaaaaagtatcattttttataagaagtttaatgttaattaactaaaagtgcaatttaggcaactcctagggacgatcaaaagacttc

SEQ ID NO: 62720 - DNA, 1231 bp, Arabidopsis thaliana landsberg
tcagtgaaatattcaaatataaagccctatttagatgttcaatgttcaatgttctttttttctctcatatttagagaattagaggtattaatttcttgttcatttttagtttatatttgggttgtacggtattaatacctcattaagaaagttgcatttagagtttgattccattcaatgtagacggtacgtttcaaattcatctaagaatccacctaaaatttattgatttcaaattatataaatttacttggaggatgcatctttatatttctgcatgcttttggaaatagggctttatttacgtgtttatggttataaattaaatggtcaagtatttctcttcgtgtttacgttgagtaacagtcaaatcgaattgaacatgtcaaagaaacactgaagaagatatagactggccgggtcaccaagtagagctcgattattttttctaattcattcatttatttcctcaaaggccgataataacacaaaatcatggaccgaatcactttagatgaataatatattaatcttttttcataagactttggtacgtaaaacccattgccatgcattccattccatggtttaacgtcaagatcttatagcttctcatcaatgatgtccaccaccgaaaccacctccggcaccggctcccccaccgaaaccaccaccaataccgcttccgcctcctcctccaaacccaccaccgccaccagctccacctcctcctccgagtccacccccagcaccagctcctcctccaaaccctccacctgaaccaccaccagccccaccgccaaatcctccaccagcaccaccacccccaccaagaccaccaccgcccccagctcctccaccaaatcctcctccagctccaccaccagctcctcctcctaaaccgccaccgcctccagctcctccgccaagaccgcctcctccaccaaggccgcctcctccaccaaagccgcctcctccaccaagaccactgcctccaccaataccgcctcctccaccgagacctccgcctggatggtggaagaatgtcttttggtcctcgagaccactcttcagcttcctgttagcgacactggcaaatgaagtgaaagcaaaagagccgacaagtaaggcaacaagaaagagtgacttggaagccatgtcgatttttgtgttttgcgtatgtgatgatgtggaactctactggccattaaggtgtttatagggatcctcc

SEQ ID NO: 62721 - DNA, 605 bp, Arabidopsis thaliana landsberg
aggttcgatccattgcattacctaaataagagtcaacagagtaataaaagcattcgttaggtgtagtattagaaaaaagcttacttatcaagaaataaaaatgaagaaaattaaaagagaagtaagtttttgggagtgagtggtggactagttggaaaaagcaagccaccctaaaactcatcataacatgtgccaattgctactacatatatacatcatccttgtcttttcattctctattacaacatgcattttaagccaatagctacgcagataaaatataaaccgttaaaaaagattcatgaaaattgataacacaacatgattgaggttgaactaaatggatctcttgatttttaatagtactaatcgtgctgtcaataaccaattactgaattttgtagtgacgcactgattttctacattagctagattactctgttaggaggaatagtttttactttaatttgagtacaatttttaaatttattttttcatgaaataaattggttattataaaaatttatcctttgagaacattcaatatgttaagcaattttgcaagaacccccattttaaggttaattaattattttcaaaaaatt

SEQ ID NO: 62722 - DNA, 521 bp, Arabidopsis thaliana landsberg
aaagcaccggccagcaagccatgcacactgccgcctcggcctcgacggtgggcagcacgcaaggcgatgtcacgattgccgccggcaaccactacacccaatccggcagcgacgtcctcgccccgcggggcaacatcggcatcgacgccaaacacgtcgacatcaccgaggcccgcaacagcggcgacagcaccatcgagacgaaattcaagcaaagcgggctgacggtcgccctttccagtccggtgatcagtgctgtgcagaccgcccgacaaatgaaacaggccgccaaccagacatccagtggccggatgcaggcattggccgcagccagcacagccctgtcgggcatggaggcgtatgacgcgatccggtcaggccagggcacgaccatcaacggcaagcccgatcagatccggaccggcacggatgccaacggcagccccacttcacgggacgccaacgccgtcgaccgggcaggcggcatcaacgtcagcatcagccttggatcaagccatagc

SEQ ID NO: 62723 - DNA, 542 bp, Arabidopsis thaliana landsberg
aggaggcctatcatgctttactggaccatatctctccggacaggacgggcccgtccttcagcgcgcgctccgggccacacagcagcaagatcgatgataagacggcgatctgcctgctggagctgtacaccaaatgcttcaaaaactgccacaagaagttgactgccgtcaagttgaaaggctttgcctcctcaaaaaccgaccaggaggcctgcgatcgtttcatccaggggttgcgtggtgtgatcgagcggtgccagccgtatctcgagcagcgcgccgaattgaacgtggacgccgcggaggatctgaccgttttctttgatcgcctcctagcaaagctgctgctagtcgagtgctgagcaattccgggaacggggggggattttgtttctttactttctcgcttgggtggctttcttgagctaagggccgcattgcttttcataggttgtcttacttttcctggcctttcgagggaatgaggtctgccacatatgattatgcatgtgtagggaagaccagatatgccgacgagctga

SEQ ID NO: 62724 - DNA, 1774 bp, Arabidopsis thaliana landsberg
gatgtctcttccggagtttacgccgttaaacgagaagtctcttgtagactacattattttcaacacctgctctctcttccaagatcggagccgacaagtccgatgatgatttggttatcaaagaagttggagatggcaatctcaatttcgttttcatcgttgttggatcctctggttctcttgtcatcaaacaggttcgcttctttgttcatcacctaagcataacagattcatatctctttgttttagttggaaagtaaagtatttatagattaggaattagggtttatttgatgtgcgtttcagattctatctatctgatttgtcttcacaatactagattgtgctttactctgctattgctctgatcttgagtatgaaatgagcaaactttgatgtctctgacttcatgcaaaatagaaaagctttgatttttcaaggaatcagattgttgatgatttgattctctgtttataagtacaggctcttccatatattcgctgtatcggtgaatcatggccaatgacgaaagaaagagcttattttgaagcaacaactttgagaaagcatggaaatttatcacctgatcatgttcctgaagtctaccattttgacagaacaatggcgttgattggaatgagataccttgagcctcctcatatcattctccgcaaaggactcattgctgggattgagtatcctttcctcgcagaccacatgtctgattacatggcgaagactctcttcttcacttctctcctctatcacgataccacagagcacagaagagcaggttcaaaaccctcacatctattttatttactagtcaatgttatcgtgttgcttgtagtgagtgtcttttgtgtttgtgtagtaaccgaattttgtggtaatgtggagttatgccgattaacggagcaagttgtgttttcggacccatatagagtttccacatttaatcgttggacttcaccttatcttgatgatgatgctaaggctgtgcgcgaagacagtgccttgaagctcgaaatcgcagagctaaaatcgatgtatgtgttttctcatttcccggtaatttccgctaggatttgctagtatctctgaaccaccattgtgtattatgttgttaggttctgtgaaagagctcaagctttaatacatggtgatcttcatactggttctgtcatggttactcaagattcaacgcaagttatagatccagagttttcgttctatggaccgatgggtttcgatattggcgcttatcttggtaacttgatactagctttctttgcacaagatggacacgccactcaggaaaatgatcgaaaagtaagcaatttattcagaattctgatttgcagtttttctgtctaggcatcgtctacacggttgcaagtacatcagtttaaagcaacatgattctattttcaggaatacaagcagtggatcttgagaaccattgagcaaacttggaatttgtttaacaaaaggttcattgcgctatgggatcaaaacaaagatggaccaggcgaagcataccttgcagatatctataacaataccgaggttttgaagtttgttcaagaaaactacatgaggaatttgttgcatgactcactcggattcggcgctgcagagatgattaggtgagagaatcttagtccatgagattactttgtcgatcatataaactcagaaacgtacgggacagtgttggtatgatgatatggcaagacgaatgagggacgtcggctcatgttgaggactccaa

SEQ ID NO: 62725 - DNA, 133 bp, Arabidopsis thaliana landsberg
  unsure (1)..(133): unsure at all n locations
tgcattctatctanaattttgttttcttcctaaaacagaaaataaagttaatcagattgttggcaaatccatagattaagtaaatacaaagaacaagatggcgaccacagaacctgacagatttcaatttgct

SEQ ID NO: 62726 - DNA, 596 bp, Arabidopsis thaliana landsberg
tgttatatctctatttttgtgtgtatgaaatggataacacgatacataatctagaagaaacagatcagcttttgtgtctttcctttatgtaaaggtagcaaatttgagatcaatccacaaacaacttcaacagcggaaagagaatgaattcatccggactagatgattacttttgcttaagctccatattttggggctttccaaagtttgaaagcaacttcgtggatgaaccgatcagccggtataacaagatttccacagagctatgatgaaaagagagaaacaacaaaaaaattaaccttgagacaagaagccgtgacgtttattatagcagaatttgcattaaacagaaaccatacctttttgagagcttcaaatgataaggtatcaactaagtctttccgggtcaccccatgctgccactgagctaccaacataggacagtagtgcctgtaggttgcaagaatgaccaaacccgtcaagaacgaaatgatgatttcagaaaagttcaaatcaaattcttttggttttgacaaaaattcatcgaatctcttaccgaacatcatcccgtgtcttttcacctcgcatggtgtagc

SEQ ID NO: 62727 - DNA, 1282 bp, Arabidopsis thaliana landsberg
caaagaccttacctgtaatgtattagactattagtattaacaaagactggcgactgcaaagcttaattaataattatggtaaagattcagtagagctaattaacaactatcagtgggtttcttccacgatacttcgagcttaagacaaaataagaagaatttgtcaatgtcaactccaatggcagtataagtacgatgaatttttctgatgactctataatcatttgatcttggcaagatctcgagagcatttataaagaaattaaagcaacacatacacacatcaatttcgtaatcgttgcagagtaagaccgatcatcgatggctgatgtaatggaacagaatcttcttcaaaccgctgtgcttaaccggacgtccttccatttccaacctcagagaaattggctcaacggttctatttctttctttttcctcctatttatattcatatatatatatatatatcatgttggttgtgaacaaaaaagaaaagatcatgttggcaaagatctcttatattattagttcataaaaccaaaacaaaaaaatggttaatttctgtttattgcaatttatctattgaatcaggttattaatttctactatatgatactgaaaactaacgattgtcttaattttatgtcacttctggtcctctgatgcattttggaaatctcaagatccaaacggtaattaaatactctacaaattgctaacttgtgacacaaggaactccaaagttgttttatataatgaaatacgtatatttataatgttgtttcagcgccaatgtattacaaaggattctaccatttgttctaccagaataaccctttggctcccgaattcagtaggacaagaatcatatggggacactctgtttcacaagacatggtcaattggatccagctcgaaccagcccttgtcccttctgagtcctttgacatcaacagctgctggtcaggatccgccacgatcctccctgatggcagacctgtaattttgtacactggactcgacgtcaacaacaaacagcaagtcacagttgttgccgaaccaaaggacgtttctgaccctttgcttcgtgagtgggttaagccaaagtacaatcctgtgatggttccgccaagtaatgtcccttttaattgtttccgtgatcccacggaggcgtggaaagggcaagatgggaaatggagagtgctcataggagctaaggagaaagatactgagaaaggaatggcgattttgtaccgaagcgatgattttgtccagtggacaaaga

SEQ ID NO: 62728 - DNA, 1920 bp, Arabidopsis thaliana landsberg
  unsure (1)..(1920): unsure at all n locations
aagaaagtttttttttgatattatgtcaatgtggtatgattttacagttctctgatatgggactgctctttatttataatatggtgtccttgttgatatattaataagctgtatatgtaccttctttttgtcaggtttgtcgaactattgaaagagaactagggaattccatggatgttttgttcaccgattttgttgacgagcctttggcaactgcttcggtaacactctgaaatctgtttgagcctgggaagccaaatgtttcggtaaaattcatatgctttgttttatagtgagctcctctctgttttgtagatagctcaggttcatcgtgcaactctagctaacgggcaggatgtggttgttaaagttcagcatgatggcattagagcgattattttggaggtctggtcttttttcgttttgaagcatttgatatgaacagtaagagctattagctattgtatgactgttcacacttctttcaacttgtcttctcttttcatttcttaacaggacttaaaaaatgcaaagtccattgttgactggattgcgtgggcggaaccacagtacaattttaaccccatgatagatgaatggtgcaaggaagctccaagagaactagacttcaatattgaagctggtatgcttcacttgcattaaaaatgaatagccttaaatttcattctgtgataaactataatagcaccaaagcttgtgattgccttccatgatcaagttcaagggatgagctagtggttctgagatagactttgctggcttggtactcatctctgtcaatctttcttgcgttgacaattttcgagtttagattatgcatgctcttaagtcctaccattctaatcacatgctcattttaattctcaaaaatggctatgatcgagataacacggtaaaaataggcagaattctgtgtctttagttccttcactagactgagcatttttcaggttcatgctacagtcactgtgaactgtatttcctgagttttcccctttttgttttgtttcataatatgtagaaaatactagaacagtatccgggaatctcgggtgcaagaagacaaatgatgaagttagaagtgccaatcgggttgatgtcttgattccagatattattcaggttcttatctttaatactctcgtcctaatctgaagcatacatatatacagtttttaagtctaggatggaaacatcaaacatcaatgcccttagtgaaaataactagagacattcaaatgctaaagaaatttctatatagacggatcagtcatggttactgatggtattgttgtgtcattgtatctctgatgttgcacgttttctatatttggtattgcttagaaaatgcgttagaagtaggggacgagtgtacctactgtgtaacacagattgtctcagatattcagcgtagacttaaactcagcattagaaatttaatgactttagaagctgaaagatgtttattccttttttgttttcctgctacttacctcttacacctcctttgttactctaaatgacagtcgtctgagagtgtactcattctggagtacatggatggagtacgtttgaatgatgtggaatctctagatgcttttggtgtggataaacaaaagatcgttgaagagatcactcgtgcatatgcccatcagatatttgttgatgggttttttaatggcgaccctcatccaggtatggtctgaaacatgatcgttttttttggagttcgccaatttttatctgtcttgtaactaccatgcttgcttaggcatagaatttattctaatacaagtataccgtctactctgtctgcaggaaattctcttgttagtagggaccacancatcgtccaattttacttgatttcgggctacaaagaaatctacactcttgaac

SEQ ID NO: 62729 - DNA, 1442 bp, Arabidopsis thaliana landsberg
gttcattggaaagggatgctctacaaccccataagaacatgtgccttctataagaggagtactctgggtgataactgtctgttgttccatgaattcaattgtacgttcttctccatctgcggatatagagaagaaatagacttgtaaattataactgagaaataatcaaaagtcaacagattccaaatatatatatttttaactgaataaagtatggcttcaataatcaaccacttgcttatttgaagcccaaaagatcatagtcagtgactcagaagctatggatacagactttgacggttatataagcattacctaggcaagctatcaaatatctctcgaaacaatagagtgcaaaagcttcataacaatctctaatcacctcgcagttgaaagctgcttctgaattcaccaaagacaaaaactgctcggaaattataagaaaccccgaattagaaaaatatctgaacacaaatcttaatggaaatttcactacaaatacaggattaaagtatatagtaacttattaaacctaccgattccacggcataaacaggaaccatcagaataagtccaataagaaacttctgttcctgtaatttacaagagaaagcgttatgcttagttactgatgatggtgatattatcaatttaatggatcaattcgataatagcaatgtcagtgaagagtcataaagatgaatcagtatcatttattatgagtaagagaatacgacaaagtgggtgttaaagaagtaataacaaacctctggttgattataagaagctaagtgctcaaagataagatacatggggaggaggatggcaataaccacgaatacactagcacttaagattggccaagtcaagtattgtccagaatcaacaccaagattaggatgccacattatcccaaatctacttgacgactctcccacggaaacaataaaaagcaacgagcagaggattcccctccactccattaagaaacagcaaacaacaagaagcaatcttcacatcaagcaagaggacacgttcctccaaacaactactccaaatctcatagataccaatatcactgatattaaaaatagatcctttctcaagctatgacaatagcagtgatgaccctttcagaaaacctgcattacgagtaacaacacacaacaattagattatattctgatcaaaaattgaatctttaaaacccaaattgactcataacaagaaataagttccttgatctaattcgtctttctaaatcacccaagcttaatcacccagcaaacaaaacgattttgcaaaaccctaaatcaccaacacccataaaacagaagaaaaagagagaaattgcacttacacgagtatctaaatacgtaatccagaagaaaaccctcgagtctttaaacttgctcgaatcaaggactccaacaaaaatcgag

SEQ ID NO: 62730 - DNA, 547 bp, Arabidopsis thaliana landsberg
ttataatataaatgctatcataaatacagcaaaccccattctctcttcttcttcgacaaacaccaagacttatcgtaagcacaagcacgagtgagtgagagatgtttgccgtggagaatgggttgcagggagacccgagattaaaggccatctccgacgccattcgtgtcattcctcacttccccaagactggtccatttttctcttctttgcctttagtttttcttttagcttacaaactaactaagcttagagtgtgtttgtgttgcagggatcatgtttcaggacataacaacgttgttgctggatccagttgcctttaaacatgtcgtcgacatcttcgttgatcgttacaagcacatgaacatctctctcgtcgccggttcctttcactttcctttctttaaactttctcatgattattagatgccttcttttatagtttaagtcgctatttaattagtctttgccaaatacgacacacacgaacaaaacccgctaattattgatttagcttgaaaggcacacatttctttatttattcttg

SEQ ID NO: 62731 - DNA, 162 bp, Arabidopsis thaliana landsberg
gtcgtgcgagcgcgctgctgcgctggtatctcgcgtgcgtgcgcgggcgaaggaccagagcgtggtcgaatccttcatgcgccaatacgacctgtccagcgaggaaggcgtgctgctgatgtgcgtggccgaagcgctgctgagcattcctgaatccaccac

SEQ ID NO: 62732 - DNA, 2147 bp, Arabidopsis thaliana landsberg
ccagtagctccacgtcacttgatcgtccagctgagatagatgtggaggattttgcgatgaagcatcacaagatggcattgttaaggggtcgaatcgaaattgagcgatgggaagctcattctcaccggtgaggcaatttttccattgggattgtttttcaatgttccagagattttgtttactcttgccatgtttctaatgttctctatgtcagggtttctcagtgtcgaatgaagaaaggtttgcttcttactggtgtcggtgataaggttaggattttttttagtatacaattcgattaggtattgtatgtgttatctaagtagcactggctaagttaatctgactactttgatcaggttatgcgcctctggtcattaaaaagctacaaatgcatggaagaatactcccttcctgatgcttcttccttgattgacttcgattttgatgagagtaaggtaaaccttctctaaaggtcatggatattacttaaactgggaatgagctaaaaatggatttaatgatcaatgatgatacagaaacctcagtcaagtcactgacatgaatttctgaaaccaccagtatagcagtataatctgtttccatgtcacagtttgcctcacctgttgtagctgaatatttccttttggctaaatcttgctattttctatagaaattggaagttgtatctctagcatgggagtattttgattctgttgttgttgttgttgttgagattgttggcttggttggtacccgcattagcatatggaggagaaatggacaaagaagcatttttccatctcgtgcaggcacctttcctaaaggcctttgtatgcggtatgtcagaagatactctcctgatatcaagttcctgagaacctatctgtttctatagaaagatcaactgatattccatgttactgacaaaagtcggtgtgatacttcaacatggctacctagcccctctgcccctgtaaggttgttggcttctctatccacactgataagttgtatgttttctttttcaaccagttacattgacccagaagctgtagttggatgcgaggatggaacagctcgtgtatttgatatgtacagtaagacatgttcacagatcattaggtaagctatgtattatgtgtctgttgtgttatggaacaacacagtgaaactggaaaagaacggtttttcattatcaaaattgtttacaatttcttttgagaaagctaaatcacaattttcctatcagattggttaataactatgtatgtaattgcaggactcagggtgggccaataacatgcttatctctaagcgataatcaactatttcttagtgggtcgtcactcgggagagtaacagtatctgaccctttgatggatcaaccagtggccactcttaaatccacgataactgcaggaggtaaactcaaactcaatgtcagattgcatctccagtgacatttcttaaagcaacctccattctctacaggtatacagacaatctgttttaaccaaggcactaatctcgccttcattggaacaactggtggatatgtttcatgctgggacctcaggtatgttaaaatagtcgtctaaggtttttttcaaagatgcaagttttaattcactatcttaagacgttataaccaactattatctaacaggaaaatggatagattgtgggaaaaccgagtgagtcctaatgtcgtgtactcaatacaacagctaaggaatgacacatcggttatggtagctggtggaataaacggtgtgctgcgtatgattgatcagaagagtggaagggttttatctagagttataatggacgataaattctccacaacatcaacaaggaacaaccaagtggtgatagagaaaagaagaggaaaaagagtttctcaagacatggagattgataaaatcgaaaggaaagttcggcctcaaatcagttgcatagcaatggggatgaagaagatggtaacggctcacaatggtaaatgcataagtgtatggaagttcaatctctcgtaaagtaacaataaacttgtttgtaagtgacgaaattggtaacaatagcattataaatgattgatttaaagacaaaaccgattggattgtgtaagagctacaaaagttgaaact

SEQ ID NO: 62733 - DNA, 486 bp, Arabidopsis thaliana landsberg
  unsure (1)..(486): unsure at all n locations
nnnnnnnnnnnnnnnnnnnnnnnnnnnnnnnnnnnnnnnnnnnnnnnnnaattccgatttttaatttttaaattttggcaactcctccccaatgttatcagagactcgtgagttatgccataagagtagcttatatcaagttctctaagatttggacagttcatagctatcttctccattgacgcatctgtaacatttgggcagttctttatccaaagcacctctagattagggcacctgcaaatggaaaccacatgacattttattcattctatcaaaactctgcgactaacctctatggactcaagctaaaactgagaattatcacgaaaagtgatacgtacctctcggcggcgtaagatagagagcgttctgtacaatgcctgatccgaatctctgtgagacctccttcactccgatcaacaacagatcggagaaatgaatcgactttattctcaaactcgggagcccaccagttgatcgact

SEQ ID NO: 62734 - DNA, 1649 bp, Arabidopsis thaliana landsberg
tcaattgagaataggaatcaatcataacttgttaatagctttcatttattcaaaacttttttaagacaaattgggggtggaagttgaaggagtagtgatgatattgccaaacactcatcatactctgaaatacaaccatcaacctcagcagaattgatctcaacaggcaccactgcatgtttgattatctatagtatttcttagtattctaaagtataatgctgctacaaaaatactattcaatacttaacaataaatcttttcgattggcattagcatagatggttacacataccttgccacaaccagggggaccctccagaagaactccatggggaggtttaattcccattttatcaaacaggtcgggattcttcaagtactttacaagctatcaagaaaatgagataatcgtaatgagactaagaggttagtaagcttcagatcccggtttctctcgagcttccaagattcaacgaaataatgtcatgcaactttatacttgatggggtagcagtgaagccctaatggtaagggttttagaggctaagctaaccaagaatgcacataataaaacaagagatccatactcagggaagaactggcgcaagcatactaaagtaattgcacgagaaatttggtcaagcgatacctcttgaagttcatcaactgcttcatcaatccctgcaacatcagcgaatttaacaccggttgaaccctgaaatataatcattgaagtcataaaaaactcaaccaaaaaagtattagaactgaagaaacatgcatataggagtaatggttagaaacttacatcaacacgagcttctgctttagactgagaaaaagcaatcccttgccataaatcctgcaaaaacatttgaagtgattgagggcgcaagcgatatcaatagattctgcaaaaaagtgttgagtgattaaagtattatacccatttcctaaagttctttggtctccgtgacagtgtgaaacgaacaagaagaaccatagtcatgacaacaagtaggattggtttgagcatctccagacttgatgctacaccaccaaatgtatagaaatcagaaatccttgagaagatgcccccatcggcgagaacatcaacaatgtaatcccatgatttttcaagaacaccaaggaagacgccaacaaaaagtttgaggaatggctttgctataggccaaacaacatatactgtagtgacaaaggcgaaactagtgactgcaaaaacagctgaggctaagaatcctccaacaacaactgcggctgcagcaataactgctgtcaccattcccagctcaaccatcactctacttgaaatagaagacgcaacagggtttgggaagtccgccacttttccaacccaagactgcaaacatataaactcagtcaataacagaacaaaatagatctgtttgtcaacctagtgaataggtgatgaaaaattcctaaccaacacaatacaaaaatattgaggacattagattatataatctagtagataagatctaaatgaacaaaagcgtgatcaccgtcatgtgcctttcaatttcgtactgcggacccgtgtattctttcagaatagcttgagcttttccaacttcaagcttcattgacctatcaggaaacagatc

SEQ ID NO: 62735 - DNA, 1339 bp, Arabidopsis thaliana landsberg
ctgggggcaatataacactgtagcggacagttacatttagagtttgtctccatctgatacgcaacgcatcaccgtcaattgtctgagaggatactaaactactatgtaatgatgtcgacaaaagagtgaaaggtgggtcccgcatttgcccatggtggttatgggccaagcgtggtcaatagtacctagacggcttgtggttgtaaatgccgactcttccatctattaatccatggccccggagaataagctcactatgcttccacttggctggtgtcaacttagagaccaataatatatacacttatcttttacagtctaaatttaattatgcggcttaccattatataagactctggtagactactctcattatatacattataaagatactgatgagtggttcttgtttaatggagttttaaatttaaaaatatttggtaaccgagtggatcatcatgttattgagaagcacatctgctccgatactgaactcgtggcttccacaacactgctcgagagaatcgtctccggaaccggagtcacagctctggcgccggtcaacatcattgtctcttttctcatcaaagtccatagatggacacactggggagcagctgcaccaagctctctctgacaacaaggagaatattattcttaaatcaaaaagcaacgagcacagctacaaaactccaacatcaagcaggcaacgcaggtcatctttagatgaaacacgctacacaaaaaagactttggatcggtcgtcacctttcttagtggagaggctcttctcgagctctggacagggagataaggccagtagtaatgatcgtctggagactcttgtgagtggtggtggtggcgggatgggaggcagcggcggcaatatttgtaacggcggcggtggtgtcggtggaagtggtgtggacggcggtaggagtgaggacgctaccgacacgtattaccgggagatgatcgactcgaatccaggaaactcgcttttgaccggaaactacgccaagttcttgaaagaggtacaaaaaggaaaatatctttttactgtcttttatgtaggatatttaataagttgaagatccatccacgtgtaaagattgtattgcgtgacaaatgaaaataaataataaaattaaaaatcagaagttttcatgtttagttttagggaaatgcgtagaagagaggaaagaaacgttctcatcgggaaaaaaactatatgtatatgaacaggtgaaaggagacatgaaaaaagcagaagagtattgtgaaagagcaattttggggaacaccaacgatggaaacgttctatctctctatgctgatc

SEQ ID NO: 62736 - DNA, 1878 bp, Arabidopsis thaliana landsberg
ctgccgacgctcctcttgtatgccacacccagctggatttcgttcagatccgaaagtacatcaagcttagtgagattaagtgatgcaaatccattgatttggcaagaaaatttcagggcaacaatgtcaagccagccacaccgacgaggacgaccagttgtagtgccaaactcctgtccagctaacctaagaaggtcaccacctgtgcccaaattttctgtcgggaatggacctgaaccaactcttgtagtgtatgcttttacctgaaataacaggatcatcacaatgctttcatatctctgtcattgcttgcagattatgttatcaaagagtaaatggcaaatgtatggggaacatcaatactactaactcagaacaacataggttaaataatggccaatgcagaaagtcaagtctatgactgaaaatgatgcttaccactccaattagatcaccaacaacacttggtgcaataccaagacctgtgcagatcccaccggctgaggggctggatgaagttacaaaaggataagtcccaaagtcaatgtccaacattgtagcttgaccaccttcgaccaaaacctttttcttctgcgaaatcgagtcattgatgaaatggacagtgtcagtaatgtagggctccaatctgtcagcgtatctcttgtatgcttcaacttcttcccgaagcatttcaggagtatacttgaacccttgaaaccttgccgctgcatctgatagtaaaaggtcaagcttttgaggtaaagtatccatgtgcctgagatcacctactctaataccattccttatcactttactagagtaggcaggaccaattcccctcttggtggtgccaatgaacgacttggcaagctcagattccctgagcccatcaacctcttgatggaaatcgaataacaagtgagcgcgatcagagaccaaaatccttcctttacaggagacaccattggactccaaaccatcaatctctttgaagagacctggcaaatgcaccacaactccgtttccaatgacacaagtagtatcctcattcaggatacctgaaggcacaaggtgaagtgcaaatttctttccctctgaattgtatatagtgtgtccagcattagctccaccctacggtaaccaaaccacaatattcaaacaaaaagacttaaactttgccggaacaatcaaatcaggaacagaaacttagtaaaagaatcaacaaattcaattcaaaatgttcacaaatctccaattgcaaacacagattaaatccttaatctttacgaaaagttcataaggaatatgaaaaaggtaaaaatgtaaactttacctgacaacgagcaacgatgtcaaagtgttgggctaagatgtcaacgagtttgcctttaccttcatctccccattggcaaccgagtacaccagatacttgactcagtgatccaatccgtccaagagactcagtggcggctgaatcagcggcgacgctcagtgaagcggagacagctggacgtttagcagagcaagagacgaagcttcgagggtggtgaagaggaggataacggcggtgataaggtccaccaacagcgaatcttggattggagtcgagagtgagggaagagagagacatcttcgaagagagagaagagaagaggtatcaaaagtcttagggttcgccggcacttgagtatggggaaacctgaggaagaccttttttcaaactgagctcaggtgaactaaaatgaccattttgacctttacatgaaatatgtaatgaaattaatttggttaaaccgagactaaaaccggtcttaacacaaagcaagaactaaactgaatttaaaaagtcagcgtaatgttaacatgccataattgaat

SEQ ID NO: 62737 - DNA, 617 bp, Arabidopsis thaliana landsberg
  unsure (1)..(617): unsure at all n locations
atggnnnnnnnnnnnnnnnnnnnnnnnnnnnnnnnnnnnnnnnnnnnnnnnnnnnnnnnnnnnnnnnnnnnnnnnnnnnnnnnnnnnnnnnnnnnnnnnnnnnnnnnnnnnnnnnnnnnnnnnnnnnnnnnnnnnnnnnnnnnnnnnnnnnnnnnnnnnnnnnnnnnnnnnnnnnnnnnnnnnnnnnnnnnnnnnnnnnnnnnnnnnnnnnnnnnnnnnnnnnnnnnnnnnnnnnnnnnnnnnnnnnnnnnnnnnnnnnnnnnnnnnnnnnnnnnnnnnnnnnnnnnnnnnnnnnnnnnnnnnnnnnnnnnnnnnnnnnnnnnnnnnnnnnnnnnnnnnnnnnnnnnnnnnnnnnnnnnnnnnnnnnnnnnnnnnnnnnnnnnnnnnnnnnnnnnnnnnnnnnnnnnnnnnnnnnnnnnnnnnnnnnnnnnnnnnnnnnnnnnnnnnnnnnnnnnnnnnnnnnnnnnnnnnnnnnnnnnnnnnnnnnnnnnnnnnnnnnnnnnnnnnnnnnnnnnnnnnnnnnnnnnnnnccaaatttgaccttaagtactttttgggctttttcggattttgggttattacgacccaaatacttgttcagcattgttttaattttt

SEQ ID NO: 62738 - DNA, 465 bp, Arabidopsis thaliana landsberg
acgtgctcggccgcccggaactggcgcaatgacacggcgccgcgcgccagcggatggccgcgccttaactggcagacatagggctggcggaacagccggcgctggaagaatccgcccttgagcgccggcaggaagcccatggccaggtcgatgcggccgcgctccatcttgtctttcacatccagcgaagtagtgcgcgccgtgcggatggtgacgccgggcgcgagctcggccagatggcgcatcaggcggggcaggaagtaggtttcgcccacgtcgctgacgccgatgacaaagccgcgccggctgctggccggatcgaaggcggcacgcgcgttgagggtatcgcggatggcgtctagcgcgcctgccagggggtcggccagcgcattcgcatagggcgtgggcaccatgccgcgcgatgtgcgcaggaacagctcgtcgcccagcaagcggcgcagccgg

SEQ ID NO: 62739 - DNA, 547 bp, Arabidopsis thaliana landsberg
  unsure (1)..(547): unsure at all n locations
ggaacaagccaccaaatcaacaaaaagaaagaaaaaaaagccgcacattccttatccttcttctttaccacccttatctgacattacaaggtaagctagaggcagccctccgcgatacacaaacacacacagccttccgactatatacagctttcattgacaaaccgaacagtcgntgtatctgctttcttcttccttgttcccacgctgcttttcctggttgctctgcactttttattttttttacggtttcaatattgggggtctttactgcagcgttactacaaaaccttatattgcgccatcacgcatttagactcaatacccccgtttttgctcatggtgatacgactgaaatagctactgtattcaatagtccagtgattctaactagctaactagccatgctagtacctggattactcaatatactaccaagtcatcacaataccaagtggatcccccggccgngatccgtattgttatttaatcgtttgttaagaaaatatggctggtggttaaactagtctagctagactgagcatac

SEQ ID NO: 62740 - DNA, 316 bp, Arabidopsis thaliana landsberg
tctatactccgtccgtcggggcaagagccaggcctcgatgagtaggtaggcgcggcggtcgctgctttacctatttcgcgagcccgggcggtgcggccgactgtgcagatcttggtggttgtttttttatttttttggaacatgtttatgtctagaatgacaattgttactattcaaccttcgtgtgtgttaacccctagcttttcttttgtgtttctttttgtaaatcaagttttgtattctttgtattattatttttttttaaatatgttattttttttttttgttgtttgtatttactttttttatttttttt

SEQ ID NO: 62741 - DNA, 344 bp, Arabidopsis thaliana landsberg
ccaaacccacatggttacaaactactggatgcaacgaactcaaaaacagtgcaatgcttgatcattgaaccctgcgagactccctgagcatgtaggctgcacagagagcactcactcataaggttatcatggataggacagcctctgcgagcagctaattccagcgctggagaccttagtcaccgagccatacaccatgacatgtatggatccactcttaaagcgcagaacccaaagatatctagacggtcattaatatccgtaagaagaaaagaatgaggatatgagactaaaaagggaatataaaaaaatattgtacacataccctgtacgtacatcactgg

SEQ ID NO: 62742 - DNA, 871 bp, Arabidopsis thaliana landsberg
cttggactcgactggttgttggcagatcattgtttggagggcagttggccttgatggtgacaatgtcgaccatcggcattattctgcttcccatatgcttagacttactggacatgagggttcaatatttcgcattgtctggtctttggatggatcaaaaatagtctccgtctctgatgatcgtaggtgaacatttgttttgtgtttaagaatttaaatacttcacatttccctgcttccttttgtcaatgtatctaattgcataatcttttgcttttgtagtgctaggatatgggaaattgattcgcaggaggtcgttggccctgtgctgtttggtcacagtgttagggtttgggactgctgcatctcagattctgtatgtacctcgaatgtctttgacttatcatataattttttaatattttgtcttcatttgaggtttatgctaaggtataatcttattaaaaaatgtgaatatcagcagttctgaggtgagaaaacttatcagccagattctagtgaatagggatactgtcactgttctaatttctaagcataagctttttaacgtatacatttgttcttacctatgatcatatacgattcatgtgcacattgcaattcaacttatagagttggtttttctgtttcagttgattgtcactgctggtgaggactgtacatgccgtgtctggggcgtggatggtacccagctggaagtgataaaggaacatatgtaagttgtgacatggtgtattgtcgttcacactattcgcatcatgcttttatgttattacggatgataagctattgtttactatacagtggaagaggcatatggagatgtttgtatgatccgaactcatccctt

SEQ ID NO: 62743 - DNA, 598 bp, Arabidopsis thaliana landsberg
tgctaaatggtataaacagttattttaattaagtaaatggaattgtcaaaaaattatcattattctaaaatttatatatgattgactctttttttttgtgtgcaaacaaatacatgattgacaaaaaaaaatacatgattgataaagatatttctttcaacatctatggatgagaggatcaggaaatgtagcattattttactttttaaaactacatatattattgttgtgagcctgtgaattctgtaatcttccaacatattcgtctactaaaaaactgacaactcaattcaaaacatatttttctactaaaaggtcaagttaaaaactcaatttaaaaaagatttcgtacttaatagtcaaagttaaatttggtccgaaatctttttgaagtatcaaagactgcaaaggtataactgtctttttggaataactttataaaatttaacaaaaacagtgaaacaaaatttaagaaaatcgaagaaaaaatgataaaatagcaaaagtttgtgactttcgtggaaactcctttcccgtcctctctggtcctctgataaaggcttcactttcataattcaaactcttcttcttctttctt

SEQ ID NO: 62744 - DNA, 165 bp, Arabidopsis thaliana landsberg
tgcggcatctagttcagtatcagaggcgctgcgctgtccttggctaagaaggattaactcatatgttactttttttacaatgaaactcgaaacatacacactgagggagatggttaccaaaatgaggcacacaacatcatttagctacaacaccctacggcatgg

SEQ ID NO: 62745 - DNA, 1391 bp, Arabidopsis thaliana landsberg
atacactctaatgatcaacacaaattgtatactcttacatcatacactaagctacaatagcagaggctgtaaagcaaacgacgtctgtttccgttgttgttggtctgttgatctcattgttgtagtagtagctgtggcggttgttatgtggtcatggaggattaagagtttcagtgtggctgattcacgcagccaagttgctaccaccgaaccgcttgatgtgaaccgtcccatgttgcattttgacaggtggaatggtgcatccattcccctcaaaagaacttcaaccgctcgtcttagtgctccgtctccaaccactttgctgtgtttcccccagccagtcaatatactgccacaataagaaaaagttattaacaagttttgaactaacccagatagtgataaaaattgaggggatcacaaaagatttgcgaaacatgaccacatcacataagcaaagtatctacagagacactataatcatagtgtatgaccaaaaacttcaacctatcacaagaaaacatagcatcatcaaggacatgctgcatatcagatttcggaaaagaagagattggacttaattctcgggcctgatggagttttaggaagcaaccataaaaggaaaagagccgggtattataggccggtttaagttgatagttaaaccgaagagctctttgtagcttacctcaagactttaggtaactcatgaccttcatagactatggagcgtatgtgtagtagccacgcatggaccattgcacgtgcagctccagaagacatgaggtgtaagtccaagcaagaatcagaccacacgttttcccaaacttgcctagatcttccctcaagtgccaccagttctgcacctcgtttctatagcagaaggttcccaaaagtaagcctttgtactaatagtaacgcattaaaaaacggttacaaaatttggcctctacaatatcagtgttattttacctggccaaagtgccaaagcatgtcagttagggcattgtagaaggcagaagcagtcgaaccatccatttcatttactttgtcaaataagctctgagcttggagccatacattctctctctggcccatgagaagtccatgaacaacaccatataccttattatcaaacagcctgagctcctctagtagcattgatgcatcttcaaatgagttacaccgactacatagatacatacatgtaagcaaaataagtatcccacagaaaatggagtcaaacagcaaaaccacatagagctaatctaggaaaacccaaactattgggtcatatctttcactcgctaacttcaaaaagaggatccaaaggagaaacaaacctgcaagcattcagaatcgctgaaaaggttacaacatttggtttaatt

SEQ ID NO: 62746 - DNA, 603 bp, Arabidopsis thaliana landsberg
cggtacattatcattcttttatagtacataaacttttaagatcaaaataacaataagttaatttccgatgccttcatttcttcataacacctgcacttgcgacaatccctagtcaagcttcagccattcctagtgcagaacctagtgtcaatcctcatgatcattcaagtgaaaatgtagatgataatgtaaatgagtctcatgagaacatgtcaaatccatctaatatgtaaaacgtgaatgttgatgatgaacttccaccttttgatatctatgaccctagaaattggaataatcttttttttttttaatttggaataatcttgacaataaaacaagggatttgttgattgaaaaaggacctaaaagaaaactgaatgttgtgtatcctattgatgatgtaactaaaaggcattttgcatataagtattattttagaaagttgtgtaatttacttacagcatctggataaagtgtattgtttttgctgtaagttatttcaatctcatggtcaattaagtttactagcaagagaaggtttaagagatcggaaacatattagtgatagactaaaaaaatcatgagaaaagtgtggagcctatg

SEQ ID NO: 62747 - DNA, 585 bp, Arabidopsis thaliana landsberg
  unsure (1)..(585): unsure at all n locations
cgtggattatgaaactgtaggatattgtatattatgaaactttaatagattcacattataagtcataaataacactagaacaacaaaaaaaagaaacagaaacacagaacaacttaggttgattaagccttattgttttcaatatttgtgtctcaaacctctagacaacatttatatatttgactccaaaaatcatatgtaacgttgtattccgatcatccgatgagtactaatcgagtcagtaattgaggcgatgattattgaatttagctgcacccaacctaaccttaccccaccttcttaacgagttagccaccgacgcataaattaggaccgcccatttattgatttctgatcaggacacttctgtattatgaaatattatgctatggtttattgattaatagttcatacacaactgcgtaacaattgtttttttaaaaatagaatcttaataacaactgtaagaaaaaaacaaaaaataatcatctgaaatggattttttccctgagatttccatgatccaaaacaaccatnacaaagttctgtctcaatacaataaatcagaatgatggctgaagatga

SEQ ID NO: 62748 - DNA, 551 bp, Arabidopsis thaliana landsberg
  unsure (1)..(551): unsure at all n locations
ccgaagcctcaggggtggcgaaagccagcgcatcattttggcttcttagattggttctcagttgcaaggcggtacctgtggtactggatgagccttccattggactgcatcaaagagataatcacaggttgatcactgccctccagcatttacgcgatattggcaacagtgtactggtggttgaacacgacaaggatatcatgctggcctctgattatttagtagatattggccccagagctggatcacatggcggagaaatcgtcttttcaggaacgccgagcgaggcattacgcgcgcatacagaaacggcgcgttttctaaacggggaaacggccattgaacttccgccggtcagaagaccgggcaatggaaagttcattgaacttaaaggagccacgggcaataatctaaaaaatgttcagctcaccctgccactgggaaaactaatcgntgtaacaggagtgagtgggagnnnnnnnnnnnnnnnnnnnnnngaaaccctgtatccgatattatccaggcattgttatcattcaaaaatgacaccc

SEQ ID NO: 62749 - DNA, 707 bp, Arabidopsis thaliana landsberg
ggactttcccaaaaatggttgacccattgcttcagggacaatacccagttagaggactgtaccaagcactagcaatatcagcaatgtgcgttcaagagcagcctagcatgagaccagtggtatctgatgtagtattggctctcaacttcttagcctcttctaaatatgatccgaatagccctagcagcagcagcaggaagaacccttcttttcacagagacagagatgatgaagagaaaagaccacacctcgtcaaggaaactgaatgtgaagggtcctcataggatatccaataagagagtggtaaaaaatcaaatctaattttggcttcaccaagaaattggggaaaaatataaaaccaactcaggtacatttttaacatctattgtggatgtaaatcttgactcggcttctttgtatgtagaatgtttctgttctgtagaaaaggaaaaaaaaaaaaaaaccattttgttttgggacatatatacatatattgaacaaaaacaaatatcgttggtcatatatatattttcccgatcaaaaagtctggtaaattaggattaagtaatgtataaaaattcataatgatgaatggcaaaagtcgtaaatatgtaatagaaataggactatgatcacgtgatgcaacttatcccgcgtgaacccgttaagatttttgccgttaaataaccaaaacctaatccaagaag

SEQ ID NO: 62750 - DNA, 1220 bp, Arabidopsis thaliana landsberg
aatcactgacgtttaagctttaactgtgacattaaatcccaagtcccacttcatacgtactgccctgtcttgacttggtaatacttaatattattcttgggtaaacttgataagtaaattaaaataaaaaaatttagttagtaaactaaaaatggattggagtattggacggtgaaaaccgacaatgtaaagaaagggtaaaacagtttctaattttctgcaattatagtcgattttactagttaacttttaacttttaatttagtgggtatattatttattaaatggaaattagagttataaattataagtttttgagtttgattttgttagacgttcatttgatagttcagaaaacaaaatagcacgttacaaatataagttcattttaatatttctagtaaaaactaaatgagaataaaaacaaaattaaggaatatactatgtaatgaaaatttcttatttgttgccctttttgtgtatattatgaaaatttcaccgtggccgtgagaagggttcgtgtaaaaacaacaactatgtaatgaacccaaatcacattattgatattttcttaatttcatcaataaatattgcgatctaccaaattcaccttctttttcggttaacaaccacatcaatatataatttttaatacaagaacggaaatgacaataaaaaaaatgattacttacttcaagttacttcacaacatgataacaaaacaaaaccaatatgacatcgtaaaatattctggatactattgaacatttgaacaaacataattatacgtacattttcttaagcttatatatatagataaaaataatgaacttatatagttttcaaaattgctgaaaaaaaaatggagggttctaagtctaaggtttttattgtgcttgattaattaaaaaaaaaaacaagaaactaaagctagaaattaggatttaaatcatatccaaatggccaaattaaatgatgagaacattttagagagaaatcccaaccacgtctgattttatcatccgagcaagtcaggatccttttttctcgactaagctcagatcatctttgttgtatttgtttgatggctggtttccagtttcttcgtcgaaaccatgtctagtgaatatcatttttttgttctctagctttcttctcttttgttttgtataagtttccgtttttcttttacaatctcattggttttctctagtggttgc

SEQ ID NO: 62751 - DNA, 229 bp, Arabidopsis thaliana landsberg
gtattcaagtcttaatattttctggttctaaactattaatttttcccacaaccttgtcaataccacacaataatatgtctctgtaaaataatagtgtggatgtattcttagtatcatacggtaatggtttaaaaagaagtaagtttttttcccaaaatctaattgaaccttgaaattcttgtgtaggcatatactcaatctgcctcatatgtaaaactgacgacttttt

SEQ ID NO: 62752 - DNA, 555 bp, Arabidopsis thaliana landsberg
aaacccatcctcgagtcgacgctctctatttctgtatcgtcactatgtgtactattggttacggtgacatcgctccgttgactccatggacaaagatcttcgctgttgttttcgtcttgttcggattcgggttcttggatattttactcagtggtgttgttaactacgttttggatcttcaagagagtatgattctcaccggaatccaaacgaggcagcatcatcaacaccatcatcatagattctctgctaaagattatattattgattttgagaaagggaggatgaggataaggatgaaagtttgtttagcgttatgcgtcgtcgttttgtgtatcggtgttggtgctttggttttgcatttcgttgaggaattgggttttgttgattcggtttatttgtcggttatgtcggtgactactgttggttatggtgatcgtgctttcaaaacgcttcaagggaggctttttgcggcggcttggttacttgtttcgactcttgcggtggcgcgtgcgtttttgtattttggcggaagcgagattgatcgccggcatc

SEQ ID NO: 62753 - DNA, 299 bp, Arabidopsis thaliana landsberg
gactcgtggcttgccgtttagatgaacagtcctaatacgcacaaactgcccgtgttctagctcctgttgcaaccaaaatcgaaaagaaacaatctaagatcaaaatttggatcagagtaaaagcaatcctaatggttgctgcataactcttcttcacgtccaaactaattgaaagtgtgacttctgtaaagaaagagacaaaaccttggtagcatctgcgaatgcgtttaggtcaggagtcttcttcccattaacttccacgatccattgaagcgcgtagaggccatatcggtgagcgg

SEQ ID NO: 62754 - DNA, 1429 bp, Arabidopsis thaliana landsberg
ctattttatttacatcttctctaattctctcatatgataaaatcggaacaatgcaaataaaattaggatgaccctacctttgggtttgagctagcttggtttctcactgcatccacacgtgcaattctcttgatcttttttcaaattctgcgtttgtatatgaaaatgtgtttatgtatcaatatggatcatgaactagagagaactctggaaatggattcagctgacctaaacagaaaaagtaagataagggaacctgaagttgatgctgaaggcctttgatgtgttgtacagctaaatccagcatgtctgaatagcttgtttgctaagaaaatcagcaacaagtgtgtgaggtaatgaacactttttcaaaatgatgttaccatatatactatatatatttgatataaagtaaccttatccatgttggggacaagatcttgtagcttctttagcttcccacttattctcgttctcctctcctataatataaacatattgtataggttaagataggaggatggcaaaaagaatagggtctacatgattagggacgatcaaatttgttgctaaatttagtgaattaattatccatcgctaaataaattaaaaagtgtttataactgacccgctcagcgatgcttctaggatgggtggcgcagccgcgtttggcacggattttgcagggtacagaatcttctggaagctgcatgaagttatccatgtagttcattgaagtgtctgaaggaagactatactgcaaaaccagtgataaaaatattcggtaagaattggccaccaacaaaaatgtatggccactaaagagttttgctgcatttacctttactagttaatttttttttttatgtctatcctaaaacaaatattttacatttttttgtccttttctagaaattttgaaatttcatataatttgactaaagtagcatgtttatagtaataacacatgaagaaaaaaaaaaaggaatcccacatggaaacaaataaattgtacctgcgaaaagagaccagagtccatgtccttggatcgtttactgggcctagtcacggtaaaccctatcgaaccggaaccgtcatcccaagaatcagtagtggctgcaccaaagctagccgcagaaaacgaatggcctgaaccgtcgtggactggggtctcattgacctcgttgatccgagccagagagtcgtgattcgtgaagcttagctgagacttcaatctggaatgtcctcgtcccccattagaccctccttgcggactataatcactggttggttggttcaacgagaaatctgatttcaaagtaaactatattataatgacattacgtgaaaattaattttaaaaataattcacattcacatccgaaatattaggaaccatataatgtaagtaaataaagagggatttttg

SEQ ID NO: 62755 - DNA, 1530 bp, Arabidopsis thaliana landsberg
acgagatcatcgaagaggatcaagaagagaaaaaacagagaagctaccaccaccatggaggataagtcttcttccaatcttgacgcgtctcgtaagatcagaacaaaaacgaaaaaacccaaatttctcagtctcaagctcgagctcaacacttctcacgagatcaacgagaatcccagaagcaagaagagcaagaagaagaacaacaacaaaaaacagagcaagaagaaagaaccggatacgacgccgtttaaggagaagaagagagcagagactactactacactggggggaggagagaaagaagaagagcaatacgacaccgttgcagcttacctcttcaattccgccaccgacagtacaatttcttcgatccacgatctcctcccttcctccgcggccaccgatgtagattgcggcggagaaaggaataatctttctccgtatgatcgtcaagaccacggatcgtcgtcgtcttcccttctaaggacggcgatgaggaaaggagcgagcgaggaggaggagacgacggaggagcggtgggtgagttattcagaggttgtggaggaagtgatgagtcggagcgggactccacgttgttgcggcggaggcgatggaaacgatggacggccttcgttggctctgaagcttgattatgagcagatcatggaggcttggtcggataaaggtacgctttatgtcgacggagaaccgccgcagacagtgccggacttgcatgcttccgctgatgtaagcaaaccatctctctatttgtctttttctttggtattatataatcataatcaatgcttaaattgactaattaatttgacatatgtaaaaccggtgaaatatcgaatgagtcacgagttcttttgccactgtaatgatgataatcttattaatgtattgtttttcacttctgagatacttgtaatatttaagctttgactagaaagttgtaacggcagactgaaatacttaaattgcgaaaacgcttaaattatacacattgttgctagtaattaagcaagatttgatagtagagttgtgttggtggtcttaggggtttaatgacggcggagaggcggggaatttatgggcagtgccggagatggaaacgacggagaggttatggagagggcatagagaagccagcttgctccggtataaagagaaacggcaaaaccgtcttttctctaagcggattcgatatcaagttcgtaaactcaatgccgagaaacgtcctcgtgttaaagtaagcttttcttctagtagtttgtttttttaaacaattttcacacacatttgagtccaatacatgacgtagaattatattaaaatgattgaactcgctgagagaactagaattggttgatacgtggagttgctgataattaataataagtcattggtttttttttcagggccggtttgtaaaaagagaggattcataaaccacctaagtgacggatgtttagtatttcatgatattgctattttgtgacttgttgagaagttaaggctcaa

SEQ ID NO: 62756 - DNA, 390 bp, Arabidopsis thaliana landsberg
gtatacactcactccccttttatttatattatactttctattttcacctctatttttcttttttcaaaattttgaaagtctcttttcttttatgtcacggattttgaattttgaaatggagaagatctgtcagttttttttaaacaacatgaaaaatacaattgtcatgaatgtttttgtattatctctttggtttctcaacagtttttaaatgtttttaataatatatttcgtttaacacttttttattgtgatacatattttcattgttgttttgagttaaaattgtctcttaaatttggactaaatcattgacatgagccctaaagaaattttagtaaggtaatattttgaactatcatttatttttctgaacaatgcaagtttcaa

SEQ ID NO: 62757 - DNA, 406 bp, Arabidopsis thaliana landsberg
tcctagcaccatctatagctaaggatgctctacccaagataatttttctttgggtaacgagctacccaaggtgagagtttctatggaattattgatcttaacaagaatcgaatgaaccggaacatagcttgtacgttctcagttagcacattaccaaaagataagagggtctttgggtaacgagctaattgagaacataccagctatgttccggtactttcgattcctaccttttaaaattcataattccatatgcaataaacactccataagttactactattgccactcatatattacatttatttatggatatactaattacttcgaaaagaaatttgggacccaaaaaatatattgatttatcgagattttaatttatagagtattaatttataaaaggtta

SEQ ID NO: 62758 - DNA, 1841 bp, Arabidopsis thaliana landsberg
attgatatttcttgctaagggtgtcattatctcaatatcatataccgtatgccacttgtttggtccaagttgtataagatataatgttctctcacaattagacagcccaccttagcccgatttaaggcccatgtatatatctcttcaaggctggacagctggggcttgaattctaaaaaatttattagtcataaatctgctgcatttagagattcttctataaaagaaacataaggtaagatatataatcattaatgacagaaactcttttttactcatccacaatgtagcaacttgcctttacctattaacggcggtacacagtcgtcaattgttcattggtcaagcatagcaaaaccattgagccacgtcagttttttttttttggttcctttgcaattaaaaaatgtatgtagttaatgaaattaatactccacgaacatcataattgataagagcataggaagattttctacctaacaagggaaaaaaaaagcaaaacgaagaagaggaaccctaaagtaattttgcctatttttaaaaatttattctttttaatttcagcattatgccaattttataattttgggagagaattttaatttggggaatctttacatatttttcacataccctttccccacacaactcagtttttgggtcccacctttcctttcttattttttttgtcatcacaaacaaaccattgagataaaaaaattaaatccaaatctgcaatccatccagccacagacccgatcttgcattttcgtttcgcatcgacattaaaatggcaataaaataaatcattttttttttcttttcgaaaagaacaaagaaaaatgagaaaaggaagaaaaaagagatagaggaataatttagagggagcctcgtatataacaccattcccatctctctctctctctttctcctctatttcgatatttcttcttcttctccttctctctcccttcgtcattatctctcttctgtaacttctctttctttccctctctctctttcgctgcttctcttctgtatctgattcccttttttacgggagctgtagatttgattagtgtaagcgtcgatgaagaaggttacatcgtctaagattccggccaaggatgattgggtggctgtagcgataactgacgacgatttggtcgttgagcttcttttacggctgaagcatgccggaacggtagtgtcggataatccggcggtgattctccctccgttgcggtggggaatccgtcaacgacggtctcgttcctcaagatttggtggcggcggcggcgttctcgtttccttgaagaaagatgtcgattccgttagagccagtccgaagactcctctctcgtggagcggcggatctggaagtggtggcggctctgcttctccttccgccgatggattcgaggataccagtcgccaagctagctgctctacatctacaggatctggatctaaggtaactttctcttttccctatcgtgattttcaacttttgcctctcgatttagtcttctctctctatcttctttctctcaattacgaatccggtagctccggagagatggcaaatccgtcatctcgctggataatccgattccgatctggccgataaatctggatttagccgttcgtaattgagaagatccttggccgtctctctgtttttcttcattttttttcctaaaatccataaagtttagcctgacgtcatctctcgcacgcttcaattctcactagaacgtatttagtctgttttcttcaacttctaacaaattcaccggaaaaaattcctccgccgtgattcgccgatgacaccggcggcc

SEQ ID NO: 62759 - DNA, 1776 bp, Arabidopsis thaliana landsberg
gtactattgaactatattagataactttttgcgtttaggaccagaaaaaaaacaccatgctttggtggcttggtgcaaagcctttgcgtatcaaaggaagctaaggcttacagagctataaaagttgtcaaaaaccagctatgtgatattcaacaaaacggaatgcaaatggatcatgtatagtacaatgcgtggattatgcaaattaatgattgatacgtacgtatcaatctggaccgaaataaaacttctttttttttttacgaccgaacataacttacgtatctaatatgtttgatatgcaaagcagcccaaacaagaccgtatataaaatatacacagttatttctagcaaaacttgtggccttagcttggcagccccggaaaaatatgtaagtattatcggaaaagaattgttacgttactcgaagccgaccgtatgtatttcttatgaaaatctgtcggaaaacataaacgttgacttgtgatttaaatacggtctacatgattctgtacacaaaaaatgatctagatgataacataagaaaaaacaaaaacaaggacgaataagaagaaatgtaaatatatataaatgataaattttgataagaacgttaacctattctttgtatttaatatctgtcaatccagttacaatgaattaaaaccttaacctgataagactggaattacaattctccatttttatcacacaagaacagagcacacaaggcctaattctcctcacaacaacaatgatcacgcatgataaatctctatccttcatttctatctctatttaaactcgatctttattcttctctttagctcttcactcgtgcctaattccctctcacatgtgctcttatcacatttattacaggacgactatggtcaatttattttacaaacttttattatggattccaaatttcattaaaagtcacagtataccaatatgtttttacatttttattgtattcctatgcataagtcaaataaggatgatattctcgtagacacttatagtagaggctagagcaaataatgaaaatgatagtggggattttgcattgaatgtggctaccaaatccaaagtagttgagaagctctaaatgtagaacaaagtacgatatatattcttaaatgtaattacacatcctcaccgatcccactgtgtttcctcatagttttatcgaactagtaattgtttgtattttctctgcacgttcttattatacaaaagtccttagttcatcaattcaattggttagaaaacacattagagtatatattatatatgagagagtgtcgctataacttatacgctgtattgtcagtacgtaaactaggtgaacatggaattaaatcaaggatgacaggttatgataggaataggagattaatattaaaagagacaattggtatcactcattaattgcttcgtagaaaatttgagcatgagagattgacatgagaacatgcggagaaacgcggtgtgaaaaagagcttgaagctctctcaaccatatctcataaatgttcgttgtacttgctatatatagtgttattggcttagtcaattgagctataacaattgtatagtgaataacacgatactccaacacttactaaaagatatggggaaagtatcgtttgggtttttgggtttgatgcttgtagtggtggtgattgggaaaatgaagtgtaggagatttgagaagaagacgttagaaggtggtggtggtggtggacttggcggtggctttggtggtgg

SEQ ID NO: 62760 - DNA, 1349 bp, Arabidopsis thaliana landsberg
  unsure (1)..(1349): unsure at all n locations
ctaacgcttgggtctacgttgaagaatttgcctccacaacttctttcaagtgactgcaatgtaataagtagtgaaaaaagaataattgtaaccaaatgtcacaacaatcatatgatatgattgatgaagataaagattacctcaaagagctcatctgaaataagtcccatcccatgagcaaatggaactctatagttagtttcaatgtttttatctgtcacagggtttccaagaacataaccctgctcaattatataggaatgtgttactacaaaacgttttcttttctcaacagtattcatattattgcaggaatagacccttttaacacctgaatatttatgagtggtgtgaggcccttctcatttcctgttttcatatagtagaatgtgattgaaacctttgagctaaaaagtaccaaaactgtgaaaagtggtgattgaaaaggctaccaagtaaaatttgttgcannnnnnnnnnnnnnnnnttcccggaatatgaatcttcaccaacgtaaaaaggattcgatataaactccgggtgtttcacaaaccactgcaagtaatcagaatcaaaactaactcttaagataaacataaatatcactagaaaaactcatcaaaaactgtaacaaagcaaaaacaacacttaacactcctaagaaattgatcaatttggtgcatttgtttggtgtcgctcgactcaaaagcacgccgagttttcgcataagagtatccagagccagcaggagcttccaaatataaaatgttagccacctgaaaaacaatcgagtatacatgaattcaaaatgttgttacatattagagagaaatagaatcataaaaattggtgaaattatctctcaaacctttgtccatgaaaaagatgtcaactctagaggaggtactgtcccattatactcatcccctttaaaagctaaaggacctaagaaagaaagaaaaaacaataaaacttcaacttgaaagacttgtcttaaggagcaatcaagaaacatgacattttaaaacattcattataaacttatgcatgcatctatattaagactcattacaggatacaaaatggaatatttgttaccgtttgcgaagagcaatccacagatggagctgcagccaggtccaccagtgagccaaatcatgagaggatcattttctggattcctctctgatttcacaaagtagtaaaagagctcaacatctccagattcaccaatactcacatatctttagtaaaatcccacatgcaaaagaagaaaaccacgttttagatcactcaaacgacatgtttgacaaattagagagaaagagatggactttttggttccccag

SEQ ID NO: 62761 - DNA, 365 bp, Arabidopsis thaliana landsberg
tgctgttggagaattatgagactgtgtttgcctttaggaaatgtaatatgtggttcatatatatatatatttttttctgggaagctctgattcccaattataactttacatatgcctataggtggctggacttagaactgaaactggtcgcagacgtaggtattgtgggtgctccaaatgcaggaaaaagcacattgttgagcgtgataagtgccgcacagccaaccatagcaaattacccattcaccacattacttcccaatctaggtgtggtttcatttgattacgattcaacaatggtggtcgcagatctttctggtttgctcgaaggagcgcacagaggcttcggttaaagccatgagctt

SEQ ID NO: 62762 - DNA, 325 bp, Arabidopsis thaliana landsberg
gaggatgtgtggaagcatatgttacgcgcatataccgggatccagacaagatgcaagctagacgctaaagcaaagtgtgacattcgcatcggtgatagcagacaaaccaaaggctgtcagacttttcttactggaagatgacgaaggtggaagccacacgggacctagtacatccatatatacacgctggtgtctgaagaatacacagggacagctcgtcgaattgttggatcagcgacagggatggaccacaaccaatagttaattgtctcatggtctgtccctccccgttgcacccatccgagaggtgctaacggcatgctga

SEQ ID NO: 62763 - DNA, 531 bp, Arabidopsis thaliana landsberg
gctttggataacaaaccagtattcattagacttaaaggattggtaagatgatacatccttagctttagttttacaattcatttatgtacttggtcagcttatttctattcactcatctgtcatgttgcttatttgctatattcttaaggattgtatgagaggaccattagacaagactcgtgttctctatgctcctgttgaagaaattggtgatgaaggccggcttttacgtgcttgtcgtatcctagattttagtacgaatgttatttatagtagtggcatggttagaccgttaaattaagagtttagtgtaaatgctttcgattttcttaataccaagttcagaagttattactgatgcatttgtgaaagctgggcttgttctcgagaaagatgcaaagcaaagcttgaaggtaaaagctttctgagtatgacgagattgttgcagtcacttaacgttagccaaaagctcaaaactaatggaattggaagtagtgaatcgtgcttctggttcatactttttcctttctt

SEQ ID NO: 62764 - DNA, 211 bp, Arabidopsis thaliana landsberg
tatgtagatgggtcgtctgaagaagtagataattgttgcatagtgtctttgcaaaatgaaaaaatttgttgcatattaccaactaaagcttaaatataataaaatataagttagacttattattgttttcatctgacgatggaaaacattgtgtctactatataaatttgtggtgaaacctgtatctaacagatctattgattggagccgt

SEQ ID NO: 62765 - DNA, 1858 bp, Arabidopsis thaliana landsberg
catggcacaaagaccgatgattttgcaccatttccagttaaagttcagctttccggagtcgaattttgtgtctcgagctctgcaaattggcgtatgcttttttcttttcatttagattttgttatatagttgtgttctattagcagtaaaattatgtttagtctttaggataatgaatttatgtttcaccgatagtgatgaactatacgatttagtttaaattagggttgtatttcttattaatctacaaaacttgtttttaaagcgtttgtgattatataacaaaaatttcagttgaagcatttccattattcatatgagttatttagtcgatcgtcaccaaattctctttgatttgtcaacaatatatgtttgagaaaatgatatggttttatatgattaatggtgcagcggaaggaatagttcttgggtttcaacattacattgtaatgcttggaactactgtaatcatacttccatactcgtccctctaatgggtggtggcgacgtaagcattagccctaatctcatctaatagctcaaattcacgagaagaaaactctttctaaattaaataaattaatgtgaaatgacgtcatttttcttcaggtgtagaaagcggaagtcataaacacagtattgttcgtgtcaggaataaacacgttgttgcagagtttgttcggaagtcgacttcctgtggtcatgggagctttttatgcttacctcatccctgctctttacatcactttctcttatcgattcacttactatctccatcctcatctcgttagtcacacaatccattgtcttcttctttgaaaacatttaaagtttcaaattagtcgaaaacagtaaattaatgaatgtgttaaatgcagagatttgaagagactatgagagctattcaaggagctcttatcattgcttcaataagtcatatgataatgggtttcttcggtttgtggagaatcttggtcaggtccggagaaaaaaagataaaaagctcatgtgttgtattatatattattacttgtggaagaagtaactaagacgttaaggttttgcttttgctttattaaaactacttcaggtttctttctcctctttcggctgctcctcttgtgattctcaccggcgttggcctcctcgcctttgcgtttcctcaggtagacgattcaagatttaactgccataaagatcgaattggttttagggtttttgtttgtttgttgagggagcttaaatagtctttgtgttgcagcttgcgagatgtatagaaattggactcccagcattgatcatactgataattttatctcaggtttcggttaatttcgtgagattttatataaaaccttatcatctctgaatttctgacaatggttgtaatgttttcagtatcttcctcacttgtttaagtgtaagagatcaatatgcgagcaattcgctgttctgttcacaatagcgatcgtctgggcttacgcagagattctgacagcagctggagcttatgacaaaagaccggacaatacacagctcagttgtcgaacagaccgggctggtctcattagtgcttctctatggtctggtcatcttccatctttcattggatctcctctgtttcagtaagaacacagagcattctctgacaattccttcattcttagggtgagaattccatatccattgcaatggggacgtccaagtttccatggaagtgatgcattcgcaatgatggcagctacttacgtggcgattgtcgaggtttactactgtttcagttcacatttttggtttgcatgaaggattttagttttttgatacaatcacctttttcttggttggaattttttcccaa

SEQ ID NO: 62766 - DNA, 264 bp, Arabidopsis thaliana landsberg
gtcgcgttccttcgcgcgggggggaaagaggatcacatttttccagagcggcggcgagtagcgatccgggcgccggcgtcggcgagcggcgcgagttgaggcttcgtcgctggcgaactggtttggcgttcttggatgctggatgctcgttgctggatgctggcggggacgcgctccgctggcgcgtcgctgctaacttttgttttgagttttgcttttgcgtgcacgccgggggggccccattaatgtgccgcaaaattcttt

SEQ ID NO: 62767 - DNA, 350 bp, Arabidopsis thaliana landsberg
gggctagccatttagaaaactacgtttcagttcaaagagcatgaccgacctcaagggtgctgtagtttacgttttgtagttacgagtccaaccagatgaggcttgttgagtgatcatcatgcataaagcctttccgatcctttagtattcccacttaacagtattttattaatgtggctcacacaatgaatccagacagcgtatatcggtggggatcagtcagggatcatcgagctaattaatgtagaccgaattgcatcattagtatatagtgaccaaatctgtccgcagtctcaggcacaaggatgagccatcataatctctattctagaacaggagtgttgagtcta

SEQ ID NO: 62768 - DNA, 1853 bp, Arabidopsis thaliana landsberg
cgaaacaagtgcatgagattagttattgtcataccaaaacgttagatatatttcaattacatgcatgcagtttaaagaagagggcgacttgtgtttttctttttgatacattgacccattcatattgcaaaaagataaacaaaaaaaagtgaacaaaaaaaacaatttaagattcccaaaccagataatattgaaacgagaaaggtctacgtggcaattactcgttttggggaaacgtatgaggaactccatgctaatttcccacaacgaaattgtttcttttaatatcaatcaattttaattttcatgattaatcaattgaaaaaaaaagtaaagagaacacaacaaacgaaggtaaaaccgtaaaaggaaacttcttctccaaactaacaagtcatctcgaccccaagagtacaacacgtgtcaacacacaacgtgtcgttccctctaacttgcgccaaaagccatcattcactaagcaaaatctatcgagcggtgctaacgtccaccatctctctagctgtcgcttctcaatcttctcttccttcttcttttgtttcttctctctctctatctttgtctaaccaatcaacaaaaagacttatgtatataaagaaacaagaagcctgtctattattcacctaaatcgcctctctctttgagttccatcgaagatgttgaaagtgaagaattttcttggttctagattaaagtctttccctacaagaaaaggttcgttttcttcttctgtgctctacttttactcaagaaaatatcaaaaaaaaaaattgaatgatttgtttctcttcttctcttaacttcttcaatcttgaatatttttctacaaagaacgtttaaatgttttaacttctgaaatttatacatttgttctctaattaaccagagatagtttttcttcattgttagaaaaacagaaaaagattgtaaaatatctgctaaattgttgttttgtcaatggagcaggaaagtccgacaaggaatgttgtcgtagcttgacgtcgaagctaagtgttaatgaagagtacaaggaagcatttagaacaaactcctacttagagactcggacaaaagcagaagatcaattaggcataacatcatgtagcaaactctcttcttcttctccttctccttcttcatcttcagatcttagcttccattcacacttcaccgattacttgcttgaccctccacaagaaacacttgatgccctgatgcaagactcgagtttagacaatcttatagttacgtttttcgacttgagctccgaagcttgtgacgtgtgtgagactcttcttcagtgcctccaacaaatcaagattaatcacaacaaaatcaaaagggttatgaagattgggaaaagggtttgtaacggtgctaaaaccttggaatgtagccccgagatgctctgtgctttgatatttcaagaactttcgagatttgccgcgctgaaaaaccctttgtgtcgtatcgtcaatgaagcacagtttcgtatagttcacgatgcaaactcggatttgctcaccaaactgacatcgaaaaagagaagaataagaagaaaaatcaggttctttaaattctgcaagaagctaggaggttatagcctagtgattactcatagcgcgattgtcattacattgctgatcatagctcttcacagcatactcggcgttttcgcagctcctgcgttgctcggtctatgttcgttctgtcttttgaggaagaagaaagcgaaaggaagaatgcataagagcaataaagatacaactctagagaagctcgggacacaaatcgacattgcagctaaaggaatgttcatattgataaacgatttg

SEQ ID NO: 62769 - DNA, 432 bp, Arabidopsis thaliana landsberg
  unsure (1)..(432): unsure at all n locations
ttaggaagttactgtgtcgtgtntaatgtcttgctcgaatcttntcgtagcttggttttatcaacgtttccaagtctatcttatgtctagtcanttgatatgttattaacaatgacccatcattatccttttaaaaatctatattataattctcgcagatggtaactacaatataattntcgtaaaagaatataaagatagatgaattttactctcaacaacattnttctacaagacgacgcatgtattaaaagttaaaacacaacactatgtactagcttagcttcgtagttnttaactnttaaaaacttcatatctcagaaatatgatttagctntagcatagttacatcgttntgaaaagaagatagtgtaacanaacgatgtataaaactagtaatgtagtatcaataagcgctaagaaaatataaac

SEQ ID NO: 62770 - DNA, 107 bp, Arabidopsis thaliana landsberg
ggtttctcggtcatgatacagggggtagctaaagatgtttttctcctaaagggaaactcataattttacaactagttaaaggatcatgatttatatgaacgcttaca

SEQ ID NO: 62771 - DNA, 443 bp, Arabidopsis thaliana landsberg
  unsure (1)..(443): unsure at all n locations
cgtggattgtctgtccaacaatttagggaggctcaagaacataaggggatatcggataagagaattcaatgtacatacatatgaacacagcatactannnnnnnnnnnnnnnnnnnnnnnnnnnntcacaggcagggatttttctacagaaattttaaaaataatctcatatgttatggagaaacactcagcctggtataacaaagatatttttggacaaggttctaaggccatccgcgataccgtgggatgagctttcagacataattggaggattaggaagactgaacaataaaaaacagctcaacgtgtatgcagtgatgaatatgatctgtgcaagatgtagaaaaggaaaaaacaactcagcgtttatatatcgtgcggtgaaatgatgcaagttaaaatatttaataatagtccgtctgtataacaaacactagtgt

SEQ ID NO: 62772 - DNA, 113 bp, Arabidopsis thaliana landsberg
tctacgcctgagagaattgcccctaccaaaacttgggttcggccaccgccatacaaagcaatcaaaatggttcacttttgcagatttgacattcaggtaggctcgagtgatca

SEQ ID NO: 62773 - DNA, 706 bp, Arabidopsis thaliana landsberg
gcaatgcactcaccatatgtaaaatccggcttaccagagcgaacctaattaataacctccaaaatggtatccaggaatgacactgatccaatataccctgtattttgaaaacataaagatttaaagaactaatacaaagcactgctgcttttaaaaatgactctacaccaaaagtattgtcacattcagatttgaagcataagagagttactataaaacatagctattgatacaaggttccagagaaatgctcaatttttccagaggtttcaacacactataatcacataaaccagggatataagttccatagtctcagccacttcaactaagtaggaaagggatagagaagccccatcctttccaatatttttccttaaggaaatatcatttgaccaataaaagaagcatccagtgtttaaagtgagaacctgttaatacatgagtgtagaacaacaaatcgtttgcttcaagaccttcaatcaaatcacacaattgctgaccattcaaaacctgtcctttaaatgtaggataccctggaaaaaagttttagtacagccaaatcagtagattcagatacaccaataacgaagatacgacaacagtaatttcaggaacattaggctctacattactgtgaccaaatattacctgtatgattcgagaattgtacagagttgattggatccacatcataccccaacaa

SEQ ID NO: 62774 - DNA, 335 bp, Arabidopsis thaliana landsberg
ggtggcatgacttattgaacaggaaaggggtcgaaccaaaatccaatccttaacagataaacggagccttcacaaaactgtcactgctatatagtgctggtcgctgagaaacgccttggtgattaagaagctttcttgccttcgaaacaagttctttgtatggaatcataccctgtgagtgctcaagtatgatctgcacagcattggtgagtgctccatacggcatttgaggatgaccttgtggactcccgtgtgccgaagttcgatctgtttggcgaccactaatcaaaagaccgttattcgcaagagaaccattgctcgcgcctggatagacc

SEQ ID NO: 62775 - DNA, 496 bp, Arabidopsis thaliana landsberg
cgattcgcgaacttcctcgttgtggcggaattgcgccggatggtaccacgaaacacccgggtgtgttagctgttggagcggctgggacacagcgttcccgccggggatttttcttgaaacgttaaccagttagcgtgcgcttcggtgttgcaggcacggcgctattgctactccgcggaagcagggcgatggcgagttgcgtgaaggcagtggaaacaaaaaaggccgggtcgccccggcctttgggtagagcgtcggatccttagatcgtcaggtgtccggtgctgtcgccgaacgattcctgttcgacgccgagcttgccgagcatggacaccagcaggttggacatcgtcgtgccgctcgggaacacgaggtggcggttgccttcgagcgcgccgtcggccttgcctgcgagcacgatcggcagcggatcgtggttgtgcgagttgccgtcgctcatgccgctgccgtacatgacgagcgagttgtctagcag

SEQ ID NO: 62776 - DNA, 410 bp, Arabidopsis thaliana landsberg
agattttattcaagaaactacagtaaacctgagttagtatcagtatgattctgattcagtgacttttatgttttttatatttaaaagttgaaggatgctcctataatagaattgctgttgtatcttgaaacacggttatcttatgtgaatgagactttggtcctctattaaatcacttttaaactcttacactccaaagactcattacaaaccacattaaaactatgacatatatgaacaagtaaactcttacggttagtagtcgcatctccttaatattctcagatgcaaagattaccaaaacggagagcagtctaggtctatctcccactactaaccggactacggacaaagaactgataacgtgtacttgttcaaggaatcatggatggtcacaggagctggtaatg

SEQ ID NO: 62777 - DNA, 379 bp, Arabidopsis thaliana landsberg
aggctcacaatggagctcaacagtcatatttttttcattcctaccgagtttttatactttagagtctcccgcactgagttgagtttctagactagcagcaatgtcagactcatcatgaagctcaacaactatactttcgccttcatttctagcttcgggctgtctggagcctcccaatttcttggtggtattgaaaacatcagattcatccggaaagttggtagctgtatgttcttcttcctttccggccttatgtgtcccagctttgtgtagaagctgtgaaaacaacagcgcgagactctactgctataacactgggggggatgacggcaacaaactgaatcagcgtttgatggtgactgagaggggcccccaaagg

SEQ ID NO: 62778 - DNA, 1600 bp, Arabidopsis thaliana landsberg
tttgaagacaaagatctaaaagattttgagattgttgtcttgcaattttttatggtctatgtttatgattgttatcgtctatttatctctagtttagtcatcgtttggttgtcttaattacttcgtataattgtttttatgttggttgtaatttcttctagtttggatgtaatccttcctcttttgatagaatttgagttaatgagattatcggtttgataaaaaaaaaaacacaaacaagctaatactgtgaatagctacttccaggctccagcaactggccggccaaaggaatgtgactaccattcgaagcaattaagttaggtcgataagatagaagtatagaaacgccatgtaaatggattcaagaaataacagtagtttggtctacgtacgtcattctttctttattttattttaagtagctttctcacgaacggtcagatctagtcaggtcaaatctagtagtgatcttaagtgattttaataatgtgattgggataaggttatagaaaaaatgttttcttggtgtgtagtgccaaaattggcaagaaattctttaattatcaatgacgtgtaaaacatgatactgttgccattgttattcttcaatggctaacaatattatcaagaataacgtgattctgttgccattgttttcctataatggccaacaaaatttatttcaaaacaaaatgaactactctttattcttctttgggtatgttgaaataatcgaatagaaaatgacaaaatgtaatctttcccatttagtcgaacaatattgtagatttgtagtaacagtcagagcatgatcctcaaattgcatcgacgacctcacaaaaatgttcggttcaaattaatttgagataatttccggtccgctaaccggaaaaaccagaagacgccacgtgtcgattacacctcacccaaaacggcgatacacacacactccatataagctttcctccaacctttacgacttcaacaacgtgtttgtgactttgtgattggattctccactcactgctccagatttgaataaacacaacctaaacaaatcgagagagtcagatatggcggcaacgaagtggcgtgacatcgatgatcttcccaagattccggccaactacacggcgttgactccgctttggttccttgatagggctgccgtggttcatccgaccagaaaatctgtgattcacggatcgcgagagtacacgtggcgccagacttatgaccggtgtcgccgactcgcctccgctctcgccgatcgatcaatcggtcccggttcaacggtattcgctttttctcttcctaatctttcatttatcttccaaattatcatttcgactctagctaaaatgttcatttccaaaattttgaacaatcacttaccagagattttggaattgcttatagatttttcgtaatcaaccacttaccagagattataatcgatttcataaagaatctgttttagggaatcatcatgattatgtattaatcacatattaaccataatgtttctgaaactaattgctctcgcatgattcttgttgatcgatgcactggtgatgttgatgtttgttgacttttt

SEQ ID NO: 62779 - DNA, 619 bp, Arabidopsis thaliana landsberg
atttcgttttatatcttcttcatttttaatcaaatatttttattttttaattattatgtgattttccgtttcagttttataaattcttatattgaaagaaattttttaacaaaggaagatttgggtatatatatatgtaaagaatttgcagctagtgttttatacacatcgacatataaatgatgtatacaaaatacttatggttgatacaagaaattctagataaacattaccaaacccaaaagatacttttaattcagtactgccctttagagttctttcatggcacgccattgactaatgactagggaatcctataacaatttaaagtattagttggtcctatttactaatgaatattattaaaaggtatagggtaaactaattctctgtaaaattcaagaaatcacaaacacatatgtgttgataattaataatgctatcttggataagaaattcccacattaatattcatatttcgatgagagatatcctacaacatttgagagtttggctctctagctatggggtatctaatttataatcgttttatttacaaattatagatgttggaagtaattgaataactaatattatacctgggtaccaaattccaact

SEQ ID NO: 62780 - DNA, 1224 bp, Arabidopsis thaliana landsberg
cagccttgtcgacggcaaacactatgaggcttcttacagtggcgacaataagtttcagactgatcatcagcagatcgtccaagaagctcctctaaggcggcgaacggagacgaaagatgcggatttcggtttcatcggcaaagttttgcagatcgttaaggagccggaggttgtgtatgaagagaaggagaggcctgcgacggtagaggaggaggagaagaagtgtatagttgtggtgagcaaatcggaaaatcaacctccggtggagaaacctcttgttacggctaggatcggccaaaagaaaccggtggttaagactacaccagcaggtaatttaatttaattatttaatcattaaggtgacgtcatacgaatttagatattttataacaaatctaaaaacactatttgttaaaaggttaatttcgtaatttttcagaaaggaattctatgagagcgttgagagttgcgaaaccgaaacgtaacgagacgttagagaatacgtggaagatgattatggaaggcaacaagtcaacgcttccgttgaccagttattacaagagacccgacacgttcggacttggcgaagagacaaaacaatctggtgttttgaagaaatcggagacgtttagtgacagaactaactgttaccagtctctgccgccgccacctccgccgctagtgaaggtgaaaaaggtgaaagtgtcacggagtagggatgagcttaaccggaaagtagaagcgtttataaaaaaatgcaacgacgagaggttcgcgtcgatgaaactggacaacgaagtggctcgtcatggtctttcttattaaaatcattttcttcataaattttttggttgtctttcaatacacgacaataacaagttaacaaaagtagaaagtcacggataaacaaaatctctgctttgtattattgattggataagggtggaattggttggtgccctagtgatatttcttcttcgttaacaatgtaattaaaagtcattgaatagatattttctcctctgcgtaaagccaaagatattagttaatgggaacactataattcaatctactttataatgctctttctttcctaaaataggaaaacaaataaacaaaggtacattatcaatcactatggtagtggtaacatacaacattaacattcacattaaccaaaaaaagaagaagataagatctcccctggtctaaatttggaaagag

SEQ ID NO: 62781 - DNA, 1539 bp, Arabidopsis thaliana landsberg
atacgaaaaatatataaaattgtactctttttctctctttttgacagtatcatgaacgcagttcaatccattgaataaaaagagatagagaaaaaaaaggatttcaaatcatactttaatacaagagaagaatcattaatctaaaaagcacacattaattaatgatacaagcataagggaacgatagaggaaagaatcaaagggataggatttgatatgatatatttggtaaaccaagacaggaaagattggagctctgccattctcttctcacttttttctccaaagcatctgcgtaacccaaaattaaaataattgtttgttatagaactaaattgtatactataattaaaataattattttatgcacattgctaatatctacttatagtagtactaggacacttgcatgcatattaatcgaatatgtatctaaaaagctcaacttttggtatgaataacaaaattctctcaactttaagttatataccatgtgtccattttccaaacgtttcgttgaactagaaaacaaaattatgttattgccaaagaaattacattaaacctaaaaccatatttggttaatatctacatttcttatagaagattgaaattctaagtaatatgagagggagaatagcataccctttataagtggagtgagtttatcatatggaacaagtgtagcccggaggtggatttttgccacaggtaaggagaagctgaagagcaacagggacgtaaagattgaggtcaagagctttgagcttgagggtagtgcagagacaagctgcggcttcgacttcaacgaggcctttaagtaacggacaacatttgttaactgctggatccccaagccctatctttactaaacctcccaacaagtcgacgcaagcacctaacttcagcgtgtctattggacatgtcgccttcccgccccctgatggtggctttacgctccctggcggtggaggacagtccttccctcctgtggctggtggggttgttcccggtggaagaataggacctacaattggcaaaggtggcaatggcagattgggacctaccactggaggtatgggtagccctgaaatcggaggaaggggtagcttagggacggttactggaggaacgggtagcttagggacggttaccggaggaacgggtagcttagggacagttaccgggggaacgggtagctttgggactgtcactggaggaacgggtagcttggggacggtcactggaggaacgggtagcttgggtacagtcactggaggaacgggtagcttagggatggtcacaggaggaacgggtagcttagggacggtcaccggagggactggtagcttagggacggtcaccggaggaactggtagcttaggggctttagggggagtgctttccgccctttcgtgggttgcaagagccgcatgcgagagaatgttgggggagatagataatgcaaatgacgaagaggcaaaaagagagagatgagagtttggaggagtccatgttgagtagagtggatggtgtaac

SEQ ID NO: 62782 - DNA, 598 bp, Arabidopsis thaliana landsberg
ataaccactgtttgttcacatactgaagcaatgcttgaagagattgacaaaatggtaataataataacatgttttatttaagccactattttttgttggttactcggatgaagaaacctgttgtcttaattctgcaggaagggattgaaatgcaagattcaaatgatattgatgctgaagtagaagagtctgtgatggatatagacagctgtgacaagaacaatcctttatctgtagttgaatacattaatgacatatattgcttctacaagaaaaatgaggtaacttttagtgttctgtttctgtatcattatgatcattctagcttcaagattgaaactttttcaattattttgcagtgtcgtagctgtgtcccgcctaactacatggagaatcaacatgacattaacgagaggatgagaggaatccttattgattggttgattgaggtatatatatatacacacacaaaaacatgaacataaaattgctctgttgttggtagttgtctcactgtaaagcttactgtgaatctttgttgcaggtacattacaagtttgagctgatggaggagacgctttacctgacaatcaatctc

SEQ ID NO: 62783 - DNA, 375 bp, Arabidopsis thaliana landsberg
gctattactttttttggtcaagcaagaactcaagagtttgatgttgttgcacgtagaaaggatcttgaagacggatgtcggatggtgataaaagcagcaactttaaactccgaacgcaagtggggccataggaattttcactgtgaaccaataagtgagtaacacgtctgagagacaattagcaataccatcattgcattacaaggggacaaaacagaagcctcaggtcaacagcatcaggctctccaaaccgaattatttatttgagtgtcgcaggctcgctgcataaagagaagacaacactggagttctcattgaccaaataatgaagtagcccaaaactaagccatgctgttgcttggtaaaacaaaacta

SEQ ID NO: 62784 - DNA, 545 bp, Arabidopsis thaliana landsberg
aggccggcatcgaccttcccgaggacgtcatcgaggacagtgaggctcgcacagtcgtgacccgatacacacttctcggtgtcgtcgccgccataataccctggaacttccccctcatgcttgccacagccaagatcgctcccgctctgctgactggcaacgtcatcatcgtgaaaccctcgtaagttgcacagcatttggtgtcactatgctacgtgtcgctaaccgagacgacaagtccctttacaccttactgcggtctcaagcttgttgagctcgcacagcagttcttccctcctggtgttgtgcagtcgctcagtggcgatgataaccttggtccttggatcactagccaccctggcattgataagatttccttcactggatctactcacactggaaagttggtccttcagagtgcgagcaagactctgaagcgagtaacccttgagctgtgagactgtcctctgatcattgtgtggattatgctggtcagtttagaggtgggaatgaccctgcagtcggggtccctgatgttgatgttg

SEQ ID NO: 62785 - DNA, 1410 bp, Arabidopsis thaliana landsberg
aagtgtaagagtaaaaggaatttagcaaacaaattacataattagtggtttatattaagctataattaattgaacaaaagataacaaaaccacatgctataaattactaattaaatatttgtttttttctaataacaaaaaagagagtttaaaaactccaagactcaaaataatgagaagtagtcttgtttacatatcttgatttttgttctccatatcctttgtatctttgttctctttgtcttcttcttcttcttcttcatcatcatcttcatcgtcctcttcctcttcgtctttatcttctttcttcttcttctcatcttgttttccttctttcttctcacacttgacttgcactgccaatgtcttcactatctccggacaccctttgtccccaaaagtctccctcgctactactatggaacaataattcctacccaaacactcctgttccataaattaacacaaagctatcaactatatatataaaaatgactcaataactaagatgcttcaatcatcacacattaccttctcgaccacctcctttgacttagatgcagagcacttccccattgtgaagttaccacaagttcctgtcggatctccgaagcttgcaaattgtacttccaccatttgtttctccggtggacacctcatcactgcctttagcctcatatctttgcttctcgaaactatctttggcccttctctcttccacgatttcaccgatactgggtaatcctccccgacattactacagattgtgtctctattcaccaacacgaaatcaatagactctaacttcacccctggttcttcctcgagaatcaccagcatgttcttcttcttctcccccttcatgaaagatctcggtatatggtacctgtccaccatatatataggggtttagtctctaatcagtttcttgtcccgcaagtcatatctatagaaacctactccgtttgagttggctctcccagtggagaaaggaaagacatccaatatctccctacgccaattccattaacccaaatcaatcccttccccattcctttcatcctaatcgcgaccgcgttcactccctctggtgtctcaaagtaggtctgtgaatccattgattaagacaaatgcgtaaacatcttatatattaagaaacgttttattgagttatgtgtttaccttgtaccacgtaagatgcttacgttcaccatctttctcccatttcaccttcttagatccttcctctgtgtacacctctttcttttcaccttccaaaccggcctgcattaaccggattaaacttcattatatcccaaaccaagatagaaaaatggtctattatattggtcgcatgcatatatataccaaatgtccccattcattggggatcctctagagtcgacctgc

SEQ ID NO: 62786 - DNA, 459 bp, Arabidopsis thaliana landsberg
aggtagcctacacagaatagcataaggactttcactgacagaactagtcctaggaaaatcatacggtggtccagacgtgtacgataagtagacgagcccatgacattattgacggggtggattgcgttaatagacaagcgaatccctagattcgctccagcagccattgtgatagggctagctggacttcaatacccattatgtccggctttatttaaatcttttgtgtgcgtgatatgggagctttcatctaagatattggtttactctgctgaagaagttatattatagctgggtagaagtagagttcaagcgatgctatgcgctctaaaattctcacgacggatgcttgacgccatttatggccgaatgatgtaccacacactccaatctgatgctaaactttatttttcccgaactctactatgatggtgcggtaatgctaactgtagcggctct

SEQ ID NO: 62787 - DNA, 569 bp, Arabidopsis thaliana landsberg
tcgcaatgtgaataccaagagtacgagctgccataccaaggtgaagctccataacctgaccgatattcatacgtgatggcaccccaagtgggttcaacatgatgtcgactggagttccgtctggaaggtaaggcatgtcttctacaggaacgatacgagagacaacccctttgtttccgtgacgtccggccattttatctccgaccttaatcttacgtttttgagcgatgtaaacacgaaccaacatgttaacacctgattgcaactcatctccatttacacgtgtaaagatcttaacatcacgaacgacaccatcggcaccgtgtggtacacgaagagaagtatcacgcacttcacgagacttgtctccaaagatagcgtgcaagagacgttcttcagctgaaagatctttctcacccttaggtgttactttacctacaagaatatcaccttctttaacctcagcaccaatacggataatcccatttcgtcaaggtctttgagggcatcttcacacgtttggaattcgcgagtgattcttaggccaagtttgtatgcgcgttctgatc

SEQ ID NO: 62788 - DNA, 434 bp, Arabidopsis thaliana landsberg
  unsure (1)..(434): unsure at all n locations
cgtatttttgattctaacctccccacaagctcactcatgtacctgtatcataatgtcccatttataagcttttgacaatatgaaaaacaaactagcagaaggaagtacaatgctttgtgtgtggaaagtcacccatgagactcgatacaccttgtggtaaactcactggtagaagaattcggcatcgtcccttcaacatgtgaaatctagttgcacnnnnnnnnnnnnnnnnnnnnnnnnnnnnntcttcagcaatggcagaatatatgtctatcaccgcaatgttgataatatcagccccagatccctgcataaaaccacacaaccctttaaaatattatggtctggaagtaaatgatagggacttcttcaacaatattctacctcaagggaacgagacctgttataaccattaccaccaaccagagaacgaa

SEQ ID NO: 62789 - DNA, 1225 bp, Arabidopsis thaliana landsberg
caatcaggaatctataccatggggagtataaatgtcatggaccaggagctgagaggcaaaagagatctgactgggccaaagatcttaccaaacaagaagttgagtctttcttgtccattgattttattgatggcacttcttggctccctgtttggcttcaggaaaagttttagagttccctatgctgtcgcgtttggcttttgacatttcgcgttttggtgtggcttggaaaaaaaacatatgaagaaagaagagtacttcatcctttcttcgacggtatactatacgaaatagttttctctcttttttttttgtgtacttctactctaaaatgttcttagagtgattggaaactcttatgttgtttgcaaacattatataagattgtttccatcttaataatatatgtaacctaaatttaaatcctataaatttaaaatattttcccgaataagtttagcaagacgaaagtgaaatattgggaactgattaaaaaaattatggggtttcagacatactaatgcaaaattaaggatatataaatttgatatacttttcttttcatatgacttggtacataagtaacttgcactagcttagttcaagccaagaatagattttgtatgaacaattactagaatttaaaatccaccgccaaatccaccacctgcaccaccaccaccaccaaatcctccaccagcacctccgccggctcctccaccagcacctccaccaaatcctcctccagaacctccaccaaatccaccaccaacacctccaccgtgacctccgcctgcaccaccaccaaatcctccgccagctcctccaccagcacctcctcctgcaccaccgccgaatcctcccccggcacctccaccagcaccaccgccgaatcctcccccggcacccccaccagcaccaccgccagcacccccaccaaatcctcctccggtacctccgccagcaccgccagcaccgccacctaatccaccaccggcaccacccccaaaaccgccaccatgtcctcctccaagaccaccgcccccaccagcacctccacctagacataaccacatttacggttattacgatttttgtttattaacaacctattatagttataattttctttaattataactttaaaaactatatatacagttaatatggttacagttatttgatagttatgataaaattaatatatgaagtagaaaatattata

SEQ ID NO: 62790 - DNA, 500 bp, Arabidopsis thaliana landsberg
acccaagttgcagatctatggggcgcaaaaggggacaaccgggtccggcgccgccgctcctggtgcgccaaggcaatcgccttgtatccaccttcgacatactgtttgtacaagcgtcgaaaatgccgaggttggggtcgattgaagctcccgacgcgtcttccggatcgcggcttttccgaaggttccttgaggtgagcatcaatttccggaagaacacgctctagagatggcgttgataagctgacgcgtttcggatccgcgtgccgcatccggatgaattcgtcgatgaatgcagcatagaacatcgcaagctccgccttttcgggcggcaggtcgctaagcgtgagatcttgccatacgtttcggacggttgcgcttccctcgctgtagtattgtttttcaaccgtaatcccgtcggtacgaagcagggtttggaatcttccatgagtgaaaccctgttcgattgccggacgcccttcggtcacgagtttgtggcc

SEQ ID NO: 62791 - DNA, 2038 bp, Arabidopsis thaliana landsberg
tgttgacacttgactttattgacagagaatattgacattagcaaaagaggagggttcatggatgtttcctaccaccaaatataattatttaatgatattttcatggaaaatttgtggtatactacatcactgaccctgtaacgtaggctatcatataatcttaagaatttttccaacatataagatgacgacagaattatataatgagtacaatcaatttataccttgattgttgtttggaatgaactgattatagaaaaagaacttgtagaagttacggcattgctctatgaactgacttataaattgactggcaaaatggatcaccgttttcggtaatgtgtgagacgaactacttttgcaaagtctgtccataggttcgtacaccaccctccaatgcactggtctgcaaggtaacacttcttacaacagtttcttctgcaatcaccaccgtgcatctgtaatgccaaaagtagaaaacagattcttactactgaccaatgacatactaaacctgactgcttaatttggagaaactaaccgagttttgataattagtccatggtccacaaccccatcaatcttatcaaggcttgtagccaagtcagctgcaggattttgcatccatcaacaatagagaccattgcacaagtttcaatggttacagtataagcttttaccgaggcttcgaatcggagttgtaaatataacatcaagaatgttgtgaccatcactggtaactataggaaagtctcctccaagagggccttcattttcaacagaagctcttctccacaccttttccaccaagtaaaatacaatgactcaaacaaggcttgacacaatcgatagaaccaaaagcccgagaaagcatttatgaaagaagcagattcacacctctgcatcgcctagatacaagtcatctatctcctcagctatggccaaccaattaagctgcaatcaaagttcaaggaataaaagtcttgaatcatattaccaagggattaaaacgaagttcatcagtagaaatttacttacagattgaactaaaacagggatagaaccttcaagaccggctttgtattgttcttcctttatcatgaagactgcctcatcagctacttttacaatagactgtattgtaaaatctctcttttgtcagcccaaagctaagcaatgtgtattcaaagactgcaaaaattacacgaaactgcatacaccttttgtttcagaatatagtcatcttcctgtgaacttctccgccgtccaataactgcaataagcgtattctcttctacagcatcagcatcatgaaatgcaaaatcaatctacaaaagtgtcacactgcaaacattacccctagatgcagaagtaaatcaaaccgctttagaaaacacagagaagcagctacctgaacaccatcccggtaatattccaaggggattccatactttgctgcttcactcgcacttcgagcagacctgaaaaagggtcaggacaaatcatcatgaagcctatcaaaactcaactcgtaacataaaagattgaatatagagagatcaacaactgaacaaacaaaaagattgatactttatttggagtcatagaagataaccagcagcagaatcagaatcaaaagactcacattggtacaccaacaacaaaatcattatcgaagaactaatgaatagggaaattcaacaactgaacaaacaaaagattgattttttattggattcatagtagataaacatcagagagagaagcaaaagacttacattggtacaccaacaacattatgtaaagaaccagaaccaagttgttgacccaaataacgtatagcaaaatctgaagcttctccagatcctaaaccaataatcatcccactctttacataattatccacctgaaaacattaccagacaaaagttttgtaatcaagtatcaatcgttcttcaattttatgaataacaagcaatttcaaacaataccatttgaaattgtgataaggattcaattttccgattcacccttcagt

SEQ ID NO: 62792 - DNA, 1766 bp, Arabidopsis thaliana landsberg
atgatgaaatgtgtaatttgttagggcttagtattgttttttttttttcaatggggtaagggccaagctaatattttgtagtcttgtttaacgcgtgtgtagaaatatttctgtgttgtgaatgcaagaaggtagactgtatatggcaaactgatttggttttgtggttatctcaatggtcaaagagtatcatcgtctagacttaattgtaaaactaaagaaattcaagtgtaggaacagttgagctttggtttgtcattgtcgctaagatatttttctgctttaatgatgtgataagtgaacataagtgtagatatataagctaacgagtttatctgtaaccataacaaattaaatatctctttgaaataaaaattattagaagatattttctcttacatctcttcttatgttgtatcattttcagaaaggacaagacatggtttcccataaatatcacatgaagatatttctagtctacacatgtagacagaaagatctgacaatcacaataattcaatacagtactgcgcaaggggcagatattttgtgaccagagccatcaagagaggtttcaagattctgcaatggggaaagctgagccgatacggttgttgccaagtcggtaacatttgacattgacattgtatggacccaactgaatgtggttatcttctgtgcccatgaagaaacacatggtgtatagagccaactcgaactctggacttactccaactagagtacttgagactgattttagaacaccgttccactcgaattggattgttagcagctgagtctctgaatcaggctgcatacgaagcaaaagtgtggtttctcggtcagtcaccggttttgaagtacttatatttggaggacatatttagcattgaacgaagctatggtacttacaatttcaccgcgacgtcggggaaatatatagccttgataatctacagttcctttggcttcctccaagtaaaactacaagaaaagagagccaatttaatcggttgtaagttttactgttttgaatcggactttctagagatttgaattcatggtaggtggaggacaaaaagtgttttacctgaagccagttatggaatccagagacttgttccccaccagattgtttgatctcacctacaaagacatgctcaaacgcagaagatgagccagatgtacctccgcggccatacagatcgaaccagagacttgtcagcattctcttgaactctaagtagcttccaggagcgacgtccttgagcacaaggtacctgtgaaggtacttgatcacagaggttctgctaatttcttcaatgaaagccgcttgctcttgcctctcttcttctgtgaccacttctttgtaaccttcgttggggttgtagttgtcaagcaatgaacagaatctggcgaaagtcggttttctagagacttcctcgctcacccaagagaacagtagtccttcagccatatcagctctctcatggacccttttcccatctccgcagtcgatttgataatcccttccaggaacaaggcggtttaaatcgagctcccacagtttgttgcaagcttctgagagacctgagagctctagttgtgagggttctaggtttccataagtttcaacttcgtctgagtagtgttgttcacctgctgggcgtttgtaatcttgccattgctcctaatggacctgcggagaaagagagtgatcacacatcaaatcagtggaaaaaatgacgggtaaaatcaacaggtag

SEQ ID NO: 62793 - DNA, 1207 bp, Arabidopsis thaliana landsberg
  unsure (1)..(1207): unsure at all n locations
atagaataaaaaaagtatgttcaaagcttgtcactagtcagaagaactaggcgtgcgcttttcctttgactttactgtcatgaattgcagagaatcattctatcaggatttgcatagttcttgtaacatattcccctttccaactattatcataaagcccctctattttgatatttcttctgggattttgctatccttaagactttaacaatcaatatgcaaacaaaaatgaaaccttcatggaacacagatattaggtatggatgagggtctcagaaagatagcgacttacttgaggtttttccccttgctttttttccaaaattgtgcttgcaaaaccaggaggtacaagcggtctgggtgcattactttgagaaggcaaagaggtgttactagaaccaggaattgttggagcgtgattgacttcatcacttctacttggacgccctttatcatctttggactccccaagaagttcagtaaaatcaaagtcgtttttgcgtaagtctgggtttgatttttgtctctcctggaatgctttttgatgttccttcctcaacaactcaaaagaagctgacagagagttgagaatgtcaattaaagattgacacaaaaagaaacgcatggattaactgaaagaagtgcacaaattggcagagagctaagtttagtacagatcaaagtcaatagatcctctgtacctcttctttttctttcttcttctgctctatcttcactagtagaaacagaagaacgcaatgcgacatcattgaatgaatctgtagcgacacgtctagagaaaggtggcgcctacaaatgtacatgagagatacatgaatctatgccgtgaaatcattcaaatacacctgacaaaccagctgatgaaacccagcaacgtgatggagcaggatgcaagaatcaatggtaccagagactatgcaagatgactacagcggatgtttgggtactcaaccttggatgggcgaggaggatggtaaggttcattggttctactgcgctgatgtgagtcattagatggaggtctatgggcagatggtgccgcaccaaatccagaatgcttacggaaagaacctttcccaagaaggccatgatgctcaggtgctagccaagacctccgagacggcataccagaacgccatgcatgctctactaacataatacacagctncaaatcaactataataca

SEQ ID NO: 62794 - DNA, 141 bp, Arabidopsis thaliana landsberg
aggggacgggacccggaaggaaaacacaagtccaccgcagcaacgtcctaccacacaaaggaggaaacccgcgggggggacttttaaggggcacttccccaaaggacgcaacatgaagacaagcggcaagcaaacacgtat

SEQ ID NO: 62795 - DNA, 430 bp, Arabidopsis thaliana landsberg
aattaattgaattgctcatgtatatgtattgatttaccttaacttgtacttgtttacttctaaaatatcccaattttatgtgggtgattgttgtaacaatccgcctcgtgggatccagcaggcgctacgcataacccaaacttcttttatgtgggtctttatggcagattaattggtcacagcttgatctgcggaaagattgttaatgggtgaggtcttggattcgaggaactttacgcgaactgatgacctatctgtgatgacaaaccaattctctaccaaacaggtttgggctgacgagtagcttaaccgaatgtgatagatattacgggttcattcgactgagagcctgattgcagacacctatcccatgtgagtaattcatatcaatgcaatcgcaatacgctctcgcagcataaacataatcctc

SEQ ID NO: 62796 - DNA, 1231 bp, Arabidopsis thaliana landsberg
tcttagccttgtaataagggacattcttcactatgacggggtcttcccgagcacggacaggatcaatggagaccaaggcctgtaaaaccatgacaactatatggtgattgctaaacttcttcagctaacatattccaatgtagttcccccagatttgcctaaactttaaaaccacaaataggcgatcttacatcctgcaaatattcccagccaggattgcgtttagccaccaagtcccgaagttgatcatatcgcatagattcctgatcacagaagacataaatagttaaactctcattgatgcttaaagctgaagtattcaacaacaatagttcctattgaacagaaaattctatgcaatacagatccctgagtacatcagtatcccacaaatgtctccaattccatagcacaaacctatccagatatggaatcgaaactatgttggtgtagcaaaaccatcccaaatgaggattaagaagattcaactatcaggtaattgtagactaaaccttttacggtatgcatgctttaagcctctagaagaccataacctcaaaagtgaagcctggcaaataactcatgctgaaggagatctacatatgtagaaagagatactaacctcatattgccaccatattttcttcttgacatcttcatcataatcaaacccacccacaatctgaggcaaagtgatcaaccagaaatttgcaatgctgggatctttcatgctgtgaacaatgtgctgaaatagaaaatatgactcataagacggtaaagatgtagtaaacatagcaagctgttgggttgataaatagactttgtggtgctcacctcgtacggataatccatcttcttcagcacattataggctttccatggaggttccatgatctgcaaaatgaatcgtcagtaaaggtatttagcaagtgatagttttgttcaaaaccaaactacctctccatgtgcatttaatatctaataactagtatatatacatcccacaggggatttatgtagatgttaagctgagaagacgtaatagcagactcaaaacatacatcatcagctgagattctgacttgcagcttgttcttgcactcagtacagctcatcgcacccttcaatatcaatagatgttccatcaaatttctaagcatacactgatgaaaaacagcctatcgcgatcactcttaacacaaacaagcacctttttacgtggatatgactc

SEQ ID NO: 62797 - DNA, 543 bp, Arabidopsis thaliana landsberg
ggcaatttgttgtaatggtcaaagataaaattccgtttcaagaaaacaaaaatatttaacctaagcatatttccctttatctttatccgatgctaaagctggagcaacataccattatcgaaaacttagagctgatagcccggcaggtggtagaggggtttattattggtttgcataagagcccattccatgggttttccgttgagtctgcggagcaccgactatacaattccggcgataacctacagcatgtggactggaaagtgtctggccgcagcgataagatgttcataaaagaaggcaaggaagagaccaacctgcgctgctgcgtggccatagatacctcttcttccatgttgatcccagagcaaggcagagataaaaaacagctgtcctgtgaggctgtatcctcactgtacaagtatgacagaatacagatggactccttataattggccgctttcgactaacaggcttgatgagctgacagatgcccatccacagatataaacatctaccggatgcttatgcaccgactggagc

SEQ ID NO: 62798 - DNA, 257 bp, Arabidopsis thaliana landsberg
ccgacgcgtgccggtgggtatcctgtactccggccgcggtggaagacgtaggaaatcacccctttgctgaccgtgatagtccgggtctgaagtttgatgagaagagagaaaaaaatgccctgacgggttgagcggtctattaaaagctaatacaaattagccagaaaaatcagggacagcgatacaaaggttacgacttttgtaagacacagagtgaacctcttgcctgatcgatcgaacagtgtccagaagatgca

SEQ ID NO: 62799 - DNA, 1508 bp, Arabidopsis thaliana landsberg
ttattgttatgctttagctctaaataagaaaagaagcagcgaatggaatcactaacctcaacatattccccagagcagcacaagcctgtcctctccgcttccaggcctcacttgttgctgggttagattggatagcctgaccatcatcatcatagaagcagaattggtgaacttaccccactgtggtaacaactcttgtcaaatatatgaataccttagtaaaatcagctatagcactttcaagctctcgttggaatgcataagctgtccctcttcctataagtgcctcagggtaagttggttcttctttcagcacctgcacatagataaactaaatagtaaaaaaattgacccaataatgttttccctaaacaaccaccgaaaagaagataatcagagaaaaaaataagcaagagacactcgccagagataaagatcaccaaatcaccttatcaaaaatagaaatagctttcgtatagtttccttcattcacctgttgacaaaacagaagctcagtcatcaaaaatttggaagctataccttatagctcttttcttttcctttttttctgtgtattgctatacctgtgcaatgcctctagaaagtcgaaaatccacacttatggaatgggttcccgatattcttgctatggtgtacttcttatttttcctggattcatcactaattccgcaacgtgcctcagctttatggctcattttgctagacttaatacttatcttgtttccattaatcgatagctccccgaaccgatcggaactttcagctaaattatcatgcaaatcagaaccattacaaggtttacatgattcataataaccattgatttggctgccacactttccattctctttttccttgtacactgatccgttacataagtcggaattaccatcagattgcttgctagccttggatgcaacttttgaaaagcttactatctttgattgctcgcccaattcgctagatgactcatgtgagttcccattgctacttgctcctgattcatggttgtccagcttgtcacttttttcatcagacttctcactatgataggcaggggtctcttgcggagactcggtggcatgactttttaaaatcccatcaatttctcgtcttgcatcttttaagagttcttctaattcaagtaactgcttcacatctgctgtctgctgcaacgcacttttatacccttgctccaaaacaagaacagcttcctgttttctccccaaagccaaaagagcgcgtcctagatggaaaagctgatacacttgagttcacatgcagtataccaatcaaagtaaaccatgatccggtaaccataaaaaattccatccccgataagatatataacttaacagatattcttaagcaaccattatatcgtcataactagcaggcactatagcattatctaaacccctgattctagttctgaagctatcccgagaatcaaactcaattccgagagaaactatgaagcactcaag

SEQ ID NO: 62800 - DNA, 672 bp, Arabidopsis thaliana landsberg
gacctttcctcacagattctaacgaagctggtttctttgctgcctttttatgtaagcattttgacacttgaatcactgcataactctcaccaaaacataaaagcatcccaaatgaaaacatttgcattcaatacaatggctttagttacatacaagattcaatgaagcagattcgttagtgaatcctattgttcaacaagcacacttgatcttctttacacagcctcaaaatctaaacccttaatgcacatctgattttacatcaccaacaccaatgttcgttctatcacatgatagataccttatatggatcgtaaaaataggcatgtgtatacatgtatttatgtatctatatacagagagagatccacttcaccaatctttgttaagtccttgtcctaccggaggcagctccacctccactgtcgctaccgccacctgtggctccatacatatggttctgctggtgaagaaactgatgatgttggtgatactgcatcccaccaccaccaccgtagaacccaccgccatctccgacagcatctctctgatgctctccgacctcaccaccagtctgtggcctccctagtccagtcctctccccttcgatctccctaaacctctgcaagtaaactttcaatggctcaacataatcctcaaaacctagagtag

SEQ ID NO: 62801 - DNA, 534 bp, Arabidopsis thaliana landsberg
  unsure (1)..(534): unsure at all n locations
acagcacttgtcgacgtcgatcggaaacatgccactggcatccccgatacccagtaccttctttccgctcagcctccagtggacgtagcccgccaaggtggtcaaatagtcgatcttgtccacgtgcggctctgcatgctgcaccgcgtggagcaaatgggccgcactccatcttgccgagatgacctggccatgcaactgcgtcaggcgatcggcggcttcagccgtataaacattgcgccaagtacggaaaggcaccagcaannnnnnnnnnnnnnnnnnnnnnnnnnnnnnnnnnnnnnnnnnnnnnnnnnnnnnnnnnnnnnnnnnnnnnnnnnnnnnnnnnnnnnnnnnnnnngtggcatccctgacaaggtccgcatagcagctctgaataccggtccacacctgctccagtccatacgtccagttgtgatccaagtactcactcgcccaccggaaggtgccggatgccagaacccggccgctgtcgtcggtgagaatgccctttatctgtgttgatccaagttcaat

SEQ ID NO: 62802 - DNA, 503 bp, Arabidopsis thaliana landsberg
agtccggctttcgtgatgtaagcgatgggcgtagcgcggccagtcggacatgagcaagcacttcggcgtttggcatcctctcggctctaagccgcgccggtcttcgagggcggatctaatgcgctgctcataatcggcctgcgctgcggccttggcttcttcgaggctatccttatctgcgataaaatgatgggcatgaaggcgcaccacgtaggcagggctgtcgctggccgacacttcttcaatgttgtaaaagccgaagggcgtttgagcgctccaagctggctctggaaatgagtcgggccggtggtcacgccatactagtggcttgattgctgggccgagttctgcggtgtccatttgtcttgctccgataactgatatgacttatataactcgtatcacttatccgggcaatacctcatatgagaaatttgacagaaatttcgaatccggctaaacgcaatggcgggggcaagaagaaacgatggtcggaggatatg

SEQ ID NO: 62803 - DNA, 1275 bp, Arabidopsis thaliana landsberg
tagctattactttacaagaatggcatccactctactcagaaatttgatggaatatcctgaagggttgatcaaaagagactgccgattaagccaattgtgtaactctcttcacaaaccaatcaatacaatgttggagtatcaaatcaccaaaacggacttacagggttcatcagaagctcctctttgaattgcttgtactgagaccttttcttagctaactcagaagaccacagagagcgatccggtgacaaataatccaacaaaagctgtcaaattcaagaaaacagcatgaagcataaactgacagaattagtaatcggagaagaaactgtatcttcttcatcttgcttaaattgcattcttttttttttttttttttgaacaccaattagtaatcggagaagaaactctatcttcttcatcttgcttaaattgcattcttaaaaacaataaaacactagaaacatgtaccatttccatacactcttaaggatttcatgaaaaccacaagcaagttcaaagaaaattcaacaactcaaaatagatttgcattactaaaagcacagtaacaataatgatccataagctagactgaaactatgcgaatggcgttaccttccaaacaatggatcgaattccagcatcatcaggtagaccttgtgaagctatcttcctcaattccttcaagtctatcaccttcttcgataactgaaaaaatcaagatgtaagtatatcacaaagagaaatcaatcaaaatgcatagagcatgaggttgattttaagcaactaacctcagccacgacctgcgcttttcgagaaacatcttcaacagaagaaactgcgggagtttcaattccagcaccatcgttaccactcccattctgcaaatcgttaatctcagatttggaaggaggacgaacaggaagaggaggagctggtgcggtggaaatcgcggagggagaggaagaaaaaggaggacgctcgacgatcggaggagatggaggggtgatggaagtggcgggaggattgcggaggtggcgatcgtcgatgggaggagaggaggaccagagagaactgttgagccactctgggatacctttcttggccatggattttgattttggaaatgtttttgatgagtctctctctctttctttatttctctactcggagacggagaggttaaagttgaaccaaatgtgcaatcttgtcccggtacagctgggtcttctttggtcagggcgttgtttttcatttgtatgattaaaataaaaa

SEQ ID NO: 62804 - DNA, 1687 bp, Arabidopsis thaliana landsberg
ggcgtgggaatagtagccgtcgattcaaactttttttttttatctacaaaatcctttttttatttattttttttatttattgagagtcttgatagtttttcttaagactattgaagggcttaactgatttccattggtttgtttattcttcactgacctttgtcacaacaaacataaaactggtgacaatgaaacaaaagaaaaatcatagaagcctagcacaagttgttgctgcagatttcgtatgagaaacacattgtgctattgagagttcagcgcaaaaatggactatcatattgtgtagtttacaaaaagaaaggacgagaaaacaaaagcaaacagaggattgtattcaatgtacttccttcttgccaatgtttttgtattgagctacacaaattccccgcgcattttcggaaacaaatcttccatctttgacactgaagaaatgagattctggaaaacaaattgttaaacaaaggtcaaaatcttcacactgcccattcaactctatcccttaaccgttacattttcaatctccggctgcccaatacggaagaggagctcgaataacaatagaatcacccgtaaccggatgatctaacgataaacactcagcgtgaagctcatgcccctcaaatgttcttccattccactcatacactccatgatacttaacatctcctctaataggaatcccaagatactgacaatgtaacctaatctgatgcgtcctcccacttcgcggaaacgccctaaccacaacaacaacatcatcatcatctccaccacaactcaattccctctccccctcagcaacaatcacatgattcacatcttccagttcacaagattcgtttttcacactgtttacagatacaacttcaaacgttgtctccatatctctaacaaaagatccaccaggtaaaactctaccaacgtctaacgcagcgtaaacccgccaagctccgtgtttcgaccgtccatgacctgaactaaccgtgaccctcctccaatttggagatgaaccaatacaaagagcaatgtatgatttacgaatcttatgttctgtgaatgccttaacaagcttagcagcgactttatgtgacttagtaataatcattacaccactagtatcacgatctaatctattcgctaaatgatactcactcgaagaatctgaaaatcgaattagattttagattcagtaacattgagaattgacgaaggaaattagttattttagattcactcaccaagaacaatttgaggagcagagcgaagaacagcttcacaataaacaccttttggtttattcacagccattaggtattcgtcttcgtatagtatatcgtctcttgtaagattgaagagacttgattttgatgaagcttccattgctcttctgagttcaatgtctttggagattggaggtggaggagctgatatgggttttgggtaattgagattgagttcagaggtagcttccatggctttgattgggattgcaaaatagggttttgtgattattgaatttgcagagaaggtgaaggagaagaagtttcgaagcagggacatttgtatgtacgtcttctttctctaacctttttaagttatacgtttataaacactaaccgaaccgatccgaaccaaaatagtacttaattaaaaacaccgtaccatatat

SEQ ID NO: 62805 - DNA, 429 bp, Arabidopsis thaliana landsberg
aatactacattatataagatatatacggaaaaaagaaacatttccctttgtgcttagtttttaactttggatatcaccactaaaattgttaataataaaatgaaaaattgtaatgtatgatcataaaaaaaaaaattaataattaagaatgtcaacataaactcctacatcaggctaagcagatgaccagttcgtctagggaaatgatattcctacacctttaatcagaaaaatacgtgaaggttggaattttagaaaattaaaacagattttgacttaaaaggtttcgtatgttcattataaaccaatctacctcaatatttcgtatgttcatgagtgataccaagcaaaaacgtaactcacggtccattactctatttaaactcggtttgaatttgagcgtggagttataatatgagtcaaattcaa

SEQ ID NO: 62806 - DNA, 609 bp, Arabidopsis thaliana landsberg
gagggctcgatttttaacaaagctggaaaagatttcaagatgaaattgtttaaaggcaatacctttggtttgaaagaagtcgataagcttgtatacaacaaatggatgacaaagtcagtagtccctttgcaccactaggacttgggggagaggataaaattgatacaaacccttaatgagtatagccaagaagaaaccatagaatgttgagaaatcttgagatatcaatacgagtcacaactttgaacgaggtgtgctttctcttaagtcctacaatttattataaacactaatgagtataagccacacacgacattgatatcaagacataaagaagcctatatgattttgaaaaatcatgagatatatagttcatgactaccatctatgaatcacatgtcttcatgactttctctaaagaaaatattagaaaacactacaaagacaatcatttggtctctgactcaaaccttagcaaacccatgcagccattacaaaaaattagatggagccaacagctaaattttatttaaattcaagaagcaatagaaagtagaaggaaggtgtaccggagaaacgagagctgtcttctacagagtactacgcaga

SEQ ID NO: 62807 - DNA, 375 bp, Arabidopsis thaliana landsberg
  unsure (1)..(375): unsure at all n locations
tctttggtgacnnnnnnnnnnnnnnnnnnnnnnnnnnnnnnnnnnnnnnnnnnattgagatatagtttttcttcaattgagaaggtaaatttgaaaacacaaaatccaaacttaaacagaaaatcaatgagcataatacataatggtttaaccaaagagaatgttacaactataatttatttgtttagaaatgatcacaaacggtttttggattaacaccggtgagaataacgataagaggctcatcttgtagttgatcgagatcattacaaaatttacatgcaagttttgtcccatacagatatgtaagttgtcttaccactaacggaacaacaaatatatcaccatctagactaactaaagcagtcagaaaat

SEQ ID NO: 62808 - DNA, 1093 bp, Arabidopsis thaliana landsberg
ctttatagcgcccatgtcaatggaagactcaaagcttttctctttacccccgaatcgtggaattttttatgttttataaacagaggaaggtatgattgtaaaatcaaaagtatgggggtcaaaagttggaataaaatataaatgtagggttgcgatgtttaacttaagaaagtgcaaaagtgacagatgttcaaagaaatcacgtgttttgccgacggtattaacgtccgtccgttggttgtgggccgtttgctagctgtccacgtggactctaatgatgactcactctcacgtctttaaattattttgtactagtgtaaactaaaccgacaaaatgtaccaatataaaatgttctaaacgttctcattttattacgataattccaaattcactcttttatcaataaatatatctaatgtaagaaatgataaactataatttaaaaacatgaaaaatctattcagaccaataaatcttcatttttgtagtgttgtaaacgtcatacatccgacatcaaacagtaactaaataacagaattggaattttcaaattgtttaatatttatttaaaaaaatctgtttgaattacggataaaataattgaaatattgaatatttcttaataagttttataatcttaattggctattttaaaatatttggtttgggttttacattttgggccaaatgttattagcccattaaaataaaaagggtccaacgccgtttgttttgttctgacggcgcgtgactgtcgtcccattccacgtgcgggcacgtcatcttatatactaccaagtacaactgtacaaggaccaaacaaccagcatcttttgtctcccgtcggaatctaaatcaactcctacttctttctctctttctttttgcaactcccccttaacttttagatttttacaaatttcaaccctataaaaaaattatgacacacccttacccatatgaatcacacttactcataggcacatgatattctctttgtcatactctccactaaatctcaaaattttgagatatgatgttatagacaattcatgtattctattgtttaacttatttcagttcaaccaaaat

SEQ ID NO: 62809 - DNA, 505 bp, Arabidopsis thaliana landsberg
aatggcgatggttagatcaggtacacgcttctattatatcatctctcgctcttttttacatttagaaaaaaaaaacgaagattcttttttttttttttaatcgtatattcgaagattcttcacgttattgccagtgattgccgttgtgaacaaggtagatatttctggaattacggtgaacataacaaccgtaacacggattcttcgtaaccgtcgttattctcggtggagacggaggtagcggtggttttgatagagacggagatctaggacttgatgaagtagaggaagttgtggaagatgatgacgtggtggtggatgatggtaacgctaacggaggaggagattttttagatccggcggcggattttggtggatttaagaagactctgattttcatcggagatgaagaggaaacgagatcgtactcttcgattagattcgctagatcttcatcggaagtaattgagacgagcgcgttgagatcttccgtcggaagctgaca

SEQ ID NO: 62810 - DNA, 264 bp, Arabidopsis thaliana landsberg
agacagtatgactgatgaaaaaatgagagataaaaaagaccgtttttttattgcctattgtgcaaatcaagtggcaatttctttactcgggagagctaaacctaaaacatggataaaaagagagcccgtcaggaacaagaaaaacctccctttaactgaatctgtgaaaaaaaattcaatgaataatcttttttagaggatttaaatctaataaagcgccaactcaaaattttttactttgggcaagccctcctataagtgaaa

SEQ ID NO: 62811 - DNA, 598 bp, Arabidopsis thaliana landsberg
ggccttcgcgccactcggtaactccaccaggaagctgctgtagaccagcagcgccaccggatagagcactttataaggccatgaccaacaggacggcggtgcacagcgccgtgctgagacgcaggcgcttggggaacgcgaacaacagagggcgtgccgcgccgctaaaatccgcagacttcagttgggccatagcgtcagcgcttccttgggaaaggccaaaggaacgcgctggccttccgagagcttttcgctgctcgggacataagcgagaatcgcctgcccgccgatctggacgaggcattcgtagcgatcgccgaggaacagcattgtctcgatcgtgccttccagctcattgccgcccaagccgcgggcggcgctggcgacggcgatgcgttcgggccggatgcaggccacgacctgctcgccgttctgacgccggacgatattggaagccgtgccgatcagcggaaacttgctgtcggcgatttcgatacgcgccgcgccgtcgatcgcgacgtcgacgatttgcgccggaaatttcgtgggctgaccgatgaaatcgcgcacgattggcgtggcgggctcgtccaaagct

SEQ ID NO: 62812 - DNA, 613 bp, Arabidopsis thaliana landsberg
  unsure (1)..(613): unsure at all n locations
tctaagncacatggccgtgacgctcgcgccgccattcgctgatctgctcgcgcgacgcgcgccaggtgtcgatctggaattcgctcgccagcggcagcagcgcgatgtcgtcgccgcgcgtcacgcgcagcaccagcggttccccgcgctcgctgcgcgtcgagacgtattgccgttcgagttgcggatcgagcgcggcgctgcccggcaactgcgcgaggccgctggcgtcggtgcggccgctggccttgaccgcgccgtgccagccgtcgagcaccgcgacatcggcctcggcgaccgacgcgccgtcggccatcgccgtgacccagaccagcagattggcgttgccgtatttggcatgcacctgccacggcgtcacttcggcgaaaaacggcagcggcttcttcgacgtcgccggcgtgctgcgcagttcgccgagcagcgcgccgctgccggcatcgagcaatgcgcgcatgccgagcggcgtcgcaaacgcgagattgcgcacggccggcagcctgacgtcgcggctcgcgctgccgccgccgttcgcggtgatccgttcggccgacagatgcagcgcatcgagattggtgacgatcgccggcacgtc

SEQ ID NO: 62813 - DNA, 534 bp, Arabidopsis thaliana landsberg
  unsure (1)..(534): unsure at all n locations
ggcgtgaacttacggatgcccagcccgctctcaccactgttcacccaggtacttaccgggcggataccttcggtatgaatggtgagatgaccatcctcggaagtggttaccgttgcgcccagtttccggatcacgtctatggnnnnnnnnnnnnnnnnnnttttgccggggttgatcaatactgtatcacctcctgccagcagggccgctgcacatgcgcgctgcatgctgctctttcctgccgctgccgtaaccgtgcccgaaagccgtgaaggctgtatccttgcgatcatccttgtttaaatagtttcttttgctaaaaggttctccagccggtcaaagggcagcaactgcattacgccctttcctattttttccagcaggatataatggatgctgtctttgttctttttcttatcctgccgcagcactgcaaacgcttctttcctgtcaaaatcatattgcacgggcaggccgtaacgttgcagcaacgcttttacctgctgcgcctggcggaagccggtgagttctttt

SEQ ID NO: 62814 - DNA, 1795 bp, Arabidopsis thaliana landsberg
caagatgaatgtttgtccaacataattgaacacttgttaggtgcattatttattatttaaaaattttcataaataattcaacaatgtgtaggttaaaactggaaatccgctcatcaatcggtgttcacatctgtctgtacacctagatattctatagaacattattgatcatgtaactgtatttacacgtggttaattactgaatttgctggtgacatcattctcgtattgtttgtagcttaagatacaaggaatcagacgtcagggttttcttcgaaaccactttcataatttaatcgtttttgaaacagaaatgagttatttacagtaagtaaattttactatttgattagaaaaatgaataaaaaataaccattcgaatataatttgaaaaagaaaattgaatatgccgcataaaagaatctcatacctgaccagaattttcaatacgaaaatctaggttatagatctcgttctcggtaatgcttgcttcttcgtctcaccacctaggtttttttctatctggcctctaacaccacggggcaaccacaccgttagccaacaaagaaacttatcatagtcttgtttggaccttgactgatagatcatagatccaaattctctcataatatgcatacgacgagtcgacgacatataattcaatcacattagaggggtgaatttatcccaaccatgttatattcttccactattttacactagttttactatgcaagattttttaattaataattgtaaatttcttagaaatatacatttgtttctttttggtcgggaagtatacatttgttttgaatactgttaaagtttatattttttggtcaaccctctaaaaatatctaaagcattccaatagtaaggatatttaaatggctgatcacttattaaaatttaatataattcatttgtcgtttttaaagacatatttctaacaatccaattgtttccaaaaatgaaattaataattatctataactaagaatgtttattataattgtttctttgagaaaaatcatagagatgacatcatggatatacgtaagtatgtctagatacatacgtatatatgtccatttacatacacattcacactacggattccttctaagttctagcttagtccacccacccacttaatatgggctgtctttatgaatatatatcttatcttatttttttgaagaactatctatattctatactagctagctaccataaatgtaatagtcaaaatcttttcagtttttttctacttcttgtatctttcaaaaataagaaaaatggaaaatcatccattcttaggttgaatttattcacatatttctttttttgtcacttttttctttcaatgtaggaacaattcaacataataaggtaatactattatataatataggatgaaggatagcttccaatgccaaccttcctctccttatcactctccaagtcaatgtcaacggtcttcgccctctaactcctctctcttctctcacacacacttcgtggctaatatattccaccaagaacacaaccaaagagcatccctctcgatacacacacttctctcctaaaacccaaaaatggtggctgcaagtcccggtggctcaatgaagagcttaaccatccaaatcctaaccggaagatggttcatgttctttggaagtctcttaatcatgtcgacagctggagccacttacatgttcggtatctactcaggcgatatcaaggaaaccttaggctacgaccaaaccactcttaatctcctaagtttctt

SEQ ID NO: 62815 - DNA, 835 bp, Arabidopsis thaliana landsberg
ggctctgttaaacattgatgtgtatatgcatatatatactgttaaaaaaatataatagtcactctttcgtcggcaaaaggttaagaaaacatcggagcacccaagtaattcaagaagtcagagtttttgttcaatcagcggattttggtgaagagatgggagattttgtgaatagatgtcctattggtttgttcttatggtccttgtagatcaagggttcagcttcctttgaggtgatcgggatcacagcggttgctgctgccgctttcttttctttgtaagatgcccaggtgacactataaagacctgctatgattgcacatccgcctaaaatgctaagagaggatgagaaaaaagcctagttagttaggaaacttcagacacatcccgttgatggctgagaatagctaagagaaaaggagagagattttaaacctccccaagtagatagggcttccaaggaagattctggacaagaaagctgaggctgcgggttgaagaggattatagagagcaaccaaggaaggacccaaaattttatttgaccatgtcaagagaccatagttgagagcagacgcgattactccctgcaccgaggaagcagcagagttactcagttggagaaatttaatggatcaacaaacatatggtgtgtgaagaacgtactgcgtagacaactgcaaagaactcggatcttgtgagactccagttcgtcgactcattagtcatgaaaaaagcagatgtcaccataaacatggtcccaaagaaatatgagtatgctgtgaaaaaaaaattcgccggatacttctttaagaccggagcctgatcatatatg

SEQ ID NO: 62816 - DNA, 709 bp, Arabidopsis thaliana landsberg
cttggttatcacaaaatggttggtgttgtttgctgttttgcaatttactattgagctgtgacttgaaatttgatatggtttaattcgaagttgttttggtttctattcgtaccaaagacaaatacgattatttttcccaattaaccttatcattaaaatgatcttgagattgcattgccaaatctatataaaaatttttgatgcataacaaagcaatggatttccattattagtcatccatgattcacagattttgtcttgaaaacattgttggatgagatttcgttttgtgtttttccttgtgaaaacgtatttgttttccgtcattatatttcttctatcaaatatatggttcctgataattgcttccattggttacctacttgtcgtccgtaccctaccacattaattgtttttctttttattatgtaaatgattaacataaaaaaaactccggaagcataggattggttaataaaccgggtatctggctggcttcaccgcgtacaatttattgagcaaacaaaaaatagaaggagaatgcatataccaagatacaatacgtggaaaatgatgtggaattagttgttcaaagaattcaataattctcaacttgatgggtaccttaagtccttagggagagatacaatccacaaaccaaagatcacggtaaatagtagtactagtatgtttttcatatcttttggtg

SEQ ID NO: 62817 - DNA, 627 bp, Arabidopsis thaliana landsberg
ctaaagggagcagctccagttccagagcctcctcccataccagcagtgatgaagaccatatcggcaccactaatagcttccgtcagtgtttcttcgctttcttcagcggctttacgaccaacctcaggttgacctcctgcacccaaaccacgagtcaatttaggtcccaactgaataacagtctcagcttttgtactactcaatgcttgtacatctgtgtttgctgcgataaattctacgcctgtaacaccttcgtcgaccatacggttgatggcattgccaccacctccaccgacaccaattactttaatcactgccccttgagcagcagctgtatcaaatgaaaatgtcataatttatttttcctctttattcgtcaaacatgcttccgatcaagccacggaaacgatctgctaatttcggtttattttgtgaagcttgttggaaatccgccattggttctgtaggcgccaccggctctacttctggagcaggagctggttgaacaggcgttgattgtacaaactgagctgttttttgcagcatccaccaaaactaattggctgatgacttaagtcattctcaccttttatcgctcctgagcaaaagattaacttctgtaattga

SEQ ID NO: 62818 - DNA, 749 bp, Arabidopsis thaliana landsberg
tgaatttcttcaagcttttggtttcatgaattaatttccgtagagaaggagcgtatggcttagttctgaaagttctagagaacttgttcttgtctttgatgcctaaagcaaaaaaaaaaattagcccattaacaagtaatagaaaaaaaaaatacacaaaaactgtagactatatcgaactcgtctaattgaaaggcaacataaccactgtgccagaaaaactttttggaaattgatgccctctaaatcattaataccgtttggcgcctaaagcccatgcttcaccagctttagctcagggccggccctggacatcatagtgctcctggtaactcgtttctgttttggagtaccccggtaaaattaagttatgagtccgccactacacaactgccataataaaaaagtcaaaacatctaaaccacatttaattacttatataaacaatattcctcagaattagattgtttaaattaatctaataaagttattgacaaaaaaacaattgttgctaaaatgctaaatgttgaaaaagtaagtatcttagaacaaagtacatgtcatcaaattaattatttctaaaacttataaataaaaaaatctcactatattatactatatgttaatatttacattgagttgataagagataccaaaaattaaattttgcttttaggtgaaaaactatcaaaaatggttaatatttttaaaatattaaattacaatattagtataaattatataaaatc

SEQ ID NO: 62819 - DNA, 279 bp, Arabidopsis thaliana landsberg
tacgagcttgtaagaaaacgttccacggaagaagctgccggataagagagattgtcgaagattcggtaactacttctccttggagatgcagtcaaaatgccgttattcttcaaactttgaaaggtttgcaaattgatcaagagcttgtcgagcctaaagagttgctcaccttaagaactactaaagattgctttataatcctagaaaaaccaccaatcgcagatgttgtgtaatgtcatatacatgagcttagaattcagaggaaatggatttaaagga

SEQ ID NO: 62820 - DNA, 431 bp, Arabidopsis thaliana landsberg
tggacactttatttatcatctaattatgggaaccattgtgaaaagaagaagaagaggtgaatgaataatggtttactttatggaacttgcaataacttatgctttatggatcaaaactaataaagaagagaacattcaaacttgaagaagaaaacaaaaagatatattctctataaataaattacaaaagaccccaccaaattaagataaaagcaaacctaaagtaccatagaaccaaaatcaaatacttctctctttttttatactacaagtcacactctttttaccatattacctctaataaaagctatttttgttttttttttaagtaaaaaatacttgcttgatatatacgtctttaactttcttttcttgtaggggaactcattagtaaactccaaacttctcttaatttttactattgatgcttg

SEQ ID NO: 62821 - DNA, 708 bp, Arabidopsis thaliana landsberg
ttaatggatatcaattaattgattgaaacatcattggcaagttaattagttacttttttcgaaaagtaaaaaactgaaagaattatttcataatcatgcatatatatgagaagtggagagtatgaattattgcttcaattaaattgtaagtactttctcattagatgtacaaatagattgggggtttatggcaaaagcttttctaaaccaatcagaagagaaaagaatagggaaatgtcaatgtcacgcctatgatctcagaacacacatacatgcatgtatataaacatttaaatttccaatacatgtgtgtactatctctgcattcccatcgcccaaattgcgacaaaagtgtgggctaaccctaacattatatacgtttctagtaaagtatgatcagaccaacattttcaacgtttccttccttataaccaaaaattatgcacgccttaatactcaaaacttccgccttttatatttgcatctttggtcgaccttttaccgatataaccacctttttttctttgtcaaacacttatatgaccacttaaatgttattaattgtgaggcattaaatagtaactgattggaatatttcggagcttgattcttcatacgttaagatatgctgaaattacacaataatgcgtttttttttgtaacccaatgttagggattgcacaaacatatgaataattgctttgtgag

SEQ ID NO: 62822 - DNA, 236 bp, Arabidopsis thaliana landsberg
aacgaagtttgcactcatacgaccctacgcgagacggggggtagcatgtcaaacatgaccataggccgactattgggcccaagcagtccaatcaaaagatggctgccaagagcagtttggacgagggaaggtaattcatgggagaacctgaacaaaactgggggaaggacgaaaaaatccacagaaggaggaagaccttcccgttgaaattggcggccatcttactgcaggtccta

SEQ ID NO: 62823 - DNA, 595 bp, Arabidopsis thaliana landsberg
tttcctttcttaattactgagaaaatatggattctctatccctgtctcttccatcgggttctttctgattgtttctttgttattttcagctttcctgagctgtgttggagaattcaatttttttctcagataaataaaatggcaaatccgaaaagaaaacacttatcaataataaagctgttttatttccacacaataatgggatgtatataacccatattatgttgaccagagttgtatgtactataccatgctcacaaaaacaagacgtatcgtattcgtactatcgtgtcaagaaaaatcatattttttttcataaccggaaaaatcccattattggttaagatctttttttttttttccagtactagctataaagtttaattaagaatttaagatcgctcgatcatgcaccaaaatcatatgatatcaccctgaatcggtcgacatgcatgtcgaagaatcatacaatgtaattttcttggttagaaaataatctgagtatattttatctgtcataaacggaaaaagaatcccgccccattactttatttaacatgctgaaaggcctatttccaaattttccaaaaaaaaa

SEQ ID NO: 62824 - DNA, 676 bp, Arabidopsis thaliana landsberg
  unsure (1)..(676): unsure at all n locations
nnnnnnnnnnnnnnnnnnnnnnnnnnnnnnnnnnnnnnnnnnnnnnnnnnnnnnnnnnnnnnnnnnnnnnnnnnnnnnnnnnnnnntgagtnnnnnnnnnnnnnnnnnnnnnnnnnnnnnnnnnnnnnnnnnnnnnnnnnnnnnnnnnnnnnnnnnnnnnnnnnnnnnnnnnnnnnaattgcttcttngggtattttaaaggtttganccacagcttcnnacacccaaaaagaanngggagcttacgtctnnngagttaaanncttggnnaggtggnnaagccttnnctttccgtnnnnnnnnnnnnnnnnnnnnnnnnnnnnnnnnnnnnnatganngcttattanntcctaggctcggaaccccaagtttgataggaatccccttttttacgccctccattgtcccttctcnngtgtggcggcagggaggggcgtaaaaaggggnnnnnnnnnnnnnnnnnnnnnnnnnnnnnnnnnnnnnnnnnnnnnnnnnnnnnnnnnnnnnnnnnnnnnnnnnnnnnnnnnnnnnnnnnnnnnnnnnnnnnnnnnnnnnnnnnnnnnnnnnnnnnnnnnnnnnnnnnnnnnnnnnnnnnnnnnnnnnnnnnnnnnnnnnnnnnnnnnnnnnnnnnnnnnnnnnnnnnnnnnnnnnnnnnnnnnnnnnnnnnnnnnnnnnn

SEQ ID NO: 62825 - DNA, 560 bp, Arabidopsis thaliana landsberg
  unsure (1)..(560): unsure at all n locations
nnnnnnnnnnnnnnnnnnnnnnnnnnnnnnnnnnnnnnnnnnnnnnnnnnnnnnnnnnnnnnnnnnnnnnnnnnnnnnnnnnnnnnnnnnnnnnnnnnnnnnnnnnnnnnnnnnnnnnnnnnnnnnnnnnnnnnnnnnnnnnnnnnnnnnnnnnnnnnnnnnnnnnnnnnnnnnnnnnnnnnnnnnnnnnnnnnnnnnnnnnnnnnnnnnnnnnnnnnnnnnnnnnnnnnnnnnnnnnnnnnnnnnnnnnnnnnnnnnnnnnnnnnnnnnnnnnnnnnnnnnnnnnnnnnnnnnnnnnnnnnnnnnnnnnnnnnnnnnnnnnnnnnnnnnnnnnnnnnnnnnnnnnnnnnnnnnnnnnnnnnccccacattcttttgcgcgggtttttttttttaaaaaaaaaaagggggggggaaaaaaaaaaaaaaaaatgttgtgctccggcccccccccttccccccaaaaaaaaaaaattagaattttttttttttttttttttcccccgtttttttttttttttattgtaaaaaaaaagaaaaagggtttttttaaaaaataaa

SEQ ID NO: 62826 - DNA, 1426 bp, Arabidopsis thaliana landsberg
  unsure (1)..(1426): unsure at all n locations
taataattaatagtttttgggatctatatataattccctgttttcttttgttctttttcttgggaaaataaaaacttagttggatatatgtcatcctgactagacccataaaataagacaaaataaaataaaataatgtacaatataaatctatataatatacaaacaaaaacaaaatgaaagtttagcaaagtacaaaaacaatgaatggagagcaaaacctctgctgaggaaacaaaataagaaactctaacagaggtacacgtgtgaggatacacatccactgatccccacaatacacacgtgtactcgcatctgactacgacannnnnnnnnnnnnnnnnagtcgcaacataccacgtattgaataaaactgacgtcgtacgttgcccacatatcttaacggcaaagttaacggttaataaccgccgggaaaatattccgtcaacttctccgtttgttcaccgaccacaaaatttcactaattttcataattccttctcttcacatataacaacacatcataaaaccctagatttcattttttcacatttattttttctaagccatttttatttctccgtctgacgttattgccagataagcttggagtctctgtttggaacacggcagttacagcaacgagagtattctccagttctcatacggaatctactgagaagattctccgtcggcggagccacacaataccgaggcggagatggagaagccacgacggagaacggcgatttcggcgatagatctccaccgccgccgctagatcgtggtgacatctgcttaggaggcgacaaaatcgcacggatcttgcctccgtaaacacgatcatattcttcaacgatattcaccagatcttcgtccgatttgacggagattagtgtctcgagatctccatttggtaattgacacttcaattcaacggagtatccacaaaattcctccaacttcatcgtcaattctgaaggagaagtagaaaaatcaatttcgatgaattggaaaagttagatgaaattggaatggggggaaaaagattgaaacggacctgtgaaagagatagagtgatgaacggagagtactctggtgaaaccgccgacgtaacggagctttccatcgatagaacgagggaggattcttccgccgtaactgcagaggaacttgagactgttcttcgttttctgattctcagctacggccaccattgttagacggttctaggtttcaaaattttctctgtgttttttgccttttggtttctttttctcttaaaccgagaattatgggggacgaatggaacttatttataggtaggaaatgacgtcattgttggacagggaaatgaaaatattcgttcctatgttggacgatcgcaagggtgttttgtacaatttcgttattaataaccgaatac

SEQ ID NO: 62827 - DNA, 537 bp, Arabidopsis thaliana landsberg
acccctgcgcgtggccggcgcgcgcgaatggctgctggcgcgcggcgcgcggcacatcacgcccgacgccggggagctgcaatggctggatgccgatatccacctcgatccgtacgcgcggcccagcacgcaccttgccgccaacgccaccatcaaaccgacgcatcgcccgcttgatcgccccgtgcaagacaagaacgccatctacggcagcgatctcggccatcaagtcaaacgttttgccgactacgcactgaccgtctccgaccgcgcccgtgccgatctcgtccacgcgcacgactggatgaccttcccggccgccgtcgccgttgccgagcgccatcacctgccgctgtttttgcacgtgcattcgaccgaattcgaccgcagcggcgacggcgccaatccggccatcggcgccatcgagcgccacgcctgccagcgcgccacgcacgttttcggcgtcagcgactacacgcgccacgtgctgatcacgcattacgacgttcctgccgacaggtcagcgtggtctacaac

SEQ ID NO: 62828 - DNA, 1963 bp, Arabidopsis thaliana landsberg
taacgttggcaaggtaaaaccaattcacttctcagctctcctctctggtttgttctattacctctgatgtttgtatgtgaaaagattgtgttaaactgttgcgtataatatgatttaggcgataaacatgtacaacgtcaagaaggagaagaagaagtcaggaaggtcagacaagttgaaacctaagaaggacatcaccaagaagcctgccaacaaagccaagtgaagagactctcccatgtctaatttactcttctatctgtctccatcttctatcacaaaacaaattttgggttgctctgttaaagtaatactttatgagtacgtttattttaatcttattgacttcatattttgcaccataaaacaatttaaagctcgcaaggtctagaaatccagtttgattttctctctaaagctctcaatccacactaatattcaaacacattgactacactctatcttgtctctttacattcaagtagagaagaacaaagatcaactctggtttttcaaacctttaaccactcaagacagggactcaaaccccaacagaatcttggtgggtaataatctttcaagtatatctccttaccaaaaccgattatgtaaaagctgaacgctctcccacgatcttccatggtgacacgagtcacaggcacaacagatatggtgtgtctctcacatactacattcgctgtcggtggaacttcagctcttaacgagataacttctgaggagaatctgttgaggaaatatgagtctgcaaagtaagctggcgtgcactggtaagcttgtgtgttgcaaagctgaactccttctgctctgtcaaatacttcttctggtactgacccagctcctcttgttgcactcacctttcgcttcgacagagtcttcctgtcaaaaccgaaaacaacaatcaaatatttcaattgccacttcaagccacatgttcttaagaatttctaaaacctaccattttacaactgcgatactacttgtcagaagagaaccagtactgtcacaagtctgacatttgattaacccgcgagattggcaagttgggcaaggaagctttcccttaccgttacagttggtgcatctgcggagaaaagagagttttctgtaattaaaaccacacttttcattttgcaaccatcaaagtataagtagagttcttgatctgaactcacattgtgtcggacccatctttatgagcaaccaagcctcttccatagcaagtggaacacttcatcatctgattctccttgtaaaatcctggctctccatcagcattgcatgttggacatactacatctcctcttccggtgcaacctgtggatcagttaaaccaagtctcatcagtatttacaacattctgattgtcctaatggtaatatgtacattacatttgatacctgtgcacttctcaacagtctcagaattaggaaccaggacttgagtttctttatacgggacaaacagagtaggaaactgcggtctcaggtccagttcccataaccccggttcagatccatgtttctttccattgaattcaccaccagtgaaaggcacagtctgtgtcaaagcttccctctcctcaatgaaagtatcaagagttccgacataaacattgcagtcttcaacagcatgaatcttccatgtacgagcaggacggcttccccaacagcaacgatgaccaatatgatcaataagcagctctcttatttcaatctcatcaagaaactgcctgtaagaaattacataacgttcaacataagttaagaaagtgagggctaacaacagcaataagggaaaaattaggaaccattatcactagaattacctttgttgcaattcatgacctgctccagatgcacttggataaccaatagcttgagctgttaaatgccaagaagaaatcagaaatttgtataaaaccattaagaagcaaagagaggag

SEQ ID NO: 62829 - DNA, 1200 bp, Arabidopsis thaliana landsberg
  unsure (1)..(1200): unsure at all n locations
attgtgtccggccccgaccagagcaggggacgaaatggtcatggagcccgagttatggccaaaggatgagagcaaagtccgtgaaagtcttaaccaagtacagagacactgcgtcaagcagctgcaccaagacatacaccgtgcaagaatgcttggagaaaaacaacactaaggtggagaaaccgacgattgcgacaaagtatcctacatgggacaaaaagctcgacaagtgttctttaaatgacctctatgcggttttcatggcagtagaaaacaagatccaagaggctacgaataggaatcagacatttcctgacactagttgttgggctaatgaccaacttggtttatgcggttacaatcagcaatgtttnnnnnnnnnnnnnnnnnntcctctgcctactatggattacaacgggctctctttcttcccttttaataaccagatgacctcaaatactgcggaagtgtcttccttctcgaatgtgacagagccgatgatagcgaacgggcaaagcttgttttacgggagttgttcggatggtccatatggtccgatggtacagaggacagcttatatggagccaatacattggggtttaggaaacagtatgttcaacaatgtgaagcagttccaagattatcccttcaggtttgcacaagttaattatttggaggattcaagtaaactttctatgtgagaaatgtcatttgtttcttccgtttgaatgttgctttataaacttctttttatcaagtttctattaagtttgttgatttttttcatagctatatcatggaataagaaaatggtgtttttacgaaaacatattgtactaacaaatataatctaccaacattaatatactataaagtaatcaatacaaaacaagtaagtatcttgttcattagaattacaagatatactgaagagtcttcttatagtctgacaaaaagctagttagctggaagaaccaaagtggctactaagatcaaaaatatgcataggagatcatgttgaacgaatttagaagccgacttggctccggcgggaacctcagcagtctctggagccagattcgccgtcgctggtgcagaactactcaccggacctcgtccgtaaggaaatatgtccggcgtattcgctggagttgatggaatatcaggggttgttactggcgacccccgctgttatatatg

SEQ ID NO: 62830 - DNA, 600 bp, Arabidopsis thaliana landsberg
taccgccagatattggttgctgaatttgaccgcatccgatccatacaaaccgtcttcatatgcgatgtcaactgtcttgggcttcgggttcatgctggttaagaacgatgccaccgccttttgacggtgataatcgacaatataaacgtggtagtaccaaggtttgctaccaaacgctttttctatctttaccgaggaagagcctacatgaataaataaaggactcaaccgcttgacactttgcagcatggcgaaatccggcgtgctgccatacccgccaacaaaggcatataccccatcctgactcaccatacgcgcggtaatctgagcggaggtattcggatcccccttggtgtctgcgatgagcagcttgattttcctgcccaaaacaccacccgcctgattcgtttgctcagcggcggattttatgccgtccagtatcatgcgcccacctcctgccagcggaccggtaagaggcaaaggcacaccaatcttcaagggccctgtatcagacttagccgacgctgttgatatgcaaaaaataatgccaaagcaaaaatactcacaaccttgagagcggaaataattgcatgactcgac

SEQ ID NO: 62831 - DNA, 1293 bp, Arabidopsis thaliana landsberg
taatttaagtttaaaagggtataaccaacaaaatgattacaaatgcgtcgatgggataaataatagatatgagaaaaccatacaaatatgatagtgaacaaaataaaatctagtataattatgggtcaaaaaaacataaaaagaggggaaaagaaaagataaagggaaaatcaaaagggatgaggcaaaatagagagtttcaataaagataaatttgggtgatggtgacggaataattcttcgatgttttcgttttgaccatcttttcctttatttctcactttaattttcctttatttctctcgctgtttattcccataaaaattttaaaattaactagaacaaagcacaaaaatgggcaatcttcgaaatatactaaaattttctattataattaacaaaataaaaaagagagggaaactgctaatatctggagtccattctcttggagaagagtaaagtgggcaaacaaaaaaaaaggaactgagctgattcgattctctttgggactcccatccatgcatcacctctttcatagtttcattttacttttatgtttattattttacaagattaagtaattagcttttttaactgcaagcataacaaataacaaaacctttattacggtctcaaacgctcaaaaatgtttttaaacatagtaaaaggtttcgttcaatacaatttgaaaaaggaaaaaacaaaaacaattttcttacaaatatatggccaccaacgattaattattaccgtcaaacttataattgggatgactcggtggttttgcgatggcgtttgttccaaaagagtgccatattgttcatttgttcttatatatgttttaatccataacacgttttggatcaatgttttcaagtaatcaaagtgaaagtagagaatatatcaattggtgaaaattttgaaatatcaatgtaattctttttaagtggatccattgatcaaggaggccactaaaatttgctcgaggcttggtagtgggttcatttgtgtttgataaatacactttttagtactcatcccctttttttgtctgacatcgtatatgtatattggttacatctaaatttgtcacacttgtgtagcagtgatagttgtctcagtgtgtctatagactatagttaaatgttaattagtagtatttatacaattctaattacatcatctaaatatttgcatatgattcacaccacccaaatttccttggctaattgtcacacaataaatgtgaaggtgagtagttaaagctaataacctcgaagttggtggttttta

SEQ ID NO: 62832 - DNA, 194 bp, Arabidopsis thaliana landsberg
gacaatgaatagctataaggattataaacaaattcagaagaatgcaaaatcgaaggaagagatgagatctgtatcaattttccacgagaaacaaaattggtagattcgtcatcatcagaaatcctaacgaaagattgtgaaacaagcttacctcataaaccaagacgttgaaagattaaatcggagacgaaact

SEQ ID NO: 62833 - DNA, 454 bp, Arabidopsis thaliana landsberg
tgacgcggtgtgaaacttcgcacaatgatgcttcgcgcgcatccgtcaataaagccaaactaatttttctactcgataggtttcgcggtgggtgcgggtcgttgttgatcgtgaaggtttttttaagcggtgcggccccaaggccgccgccttgacgggcacatctccgacagcggctggccgtgatcgatcggtgtgtctggccacgataaccagacgccgcgggcacgagcacccggcccacccgagccgagtcctcgaaaatcatggcccttcttccgttcacaccagcgcgacggcgacgctcgggccagcacagccaccgcctgaatccgcacctttgacttttaaagagaagggagaattaccaagaaaggagaactaccatggccaccgtaatcttccagccgttgttcgtatctggcgaaggcacaggaatccaggacgcgagcgg

SEQ ID NO: 62834 - DNA, 1615 bp, Arabidopsis thaliana landsberg
aggatcaagcccgggaaatggcttcaacaagagccacactcacatcacaagccaaatcgcctaaaacccaattactcgctggaactcttgctgagactatagctgcaagttctcggtgggcaccaaatgcaagcagcgttgacattgaggagttaaagagagaatcagcttccatcaaaagagctgcattgattagagatctcgagctaaggcttctttatgtgagtatcaccctttttttctattggtatctgattgcacaattttctgtgccttaaatttgatgatgtctcttttgtttcagggaaagcaaaagttgagaagagctgagagagatttagctaaagtgcagaaggatcttgacccatcggaactcccaactgattcagaaataatcacagaagaagagagacttctttaccgcaaaattggtttgagtatggatccgtttcttctcttaggtaagcacaaagactgttctcactcatgtgtcacgcttaaagccaaaacgatgtgtaataagaatttgttttcctgttcttaaaacgttatacaggaagacgagaggtgtatgatggtaccatagagaacatgcatttacactggaaacatcgggagcttgtaaaagtgatagttagaggcaaatctcttccacaagtcaaacatatcgccatctctttggaggctgagagtggaggagtattggtatccgttgataaaaccatgaaaggctatgcgattatactctatcgcggaaagaattatcagatgccatttcggcttaggccttcaaacttattgacgagaaaaaaggcttttgctcgatccattgagcttcaaagaagagaagtaatgatgataataattttacatgtaacttgtgttgataattttctgttctgatcaatattggtctctttgtctctgacaggcactgaagtatcatgttgcagacctagaggaacggattgagctgttgaagaccggacaggtttgataaaacttgaatgctattataacatatcaatctactttaaaatcccttatgagtaaacaaactatcattgacaattgatccaggacgacgatatggaaccccgcaacaaaagtgatgaagaggaagagaacttgtatttgagagtcgatgaatctgatttttcttctgacgaggtaaaatgaaatcctcctgaatgttcttcatcagcatttgaaaatttactcgaaccatggcatatctgagatatttttttttgaatcaggatgaatctctggaatgggagtcagaaaagaatgaaactttcttatcatcagagggaaaagaagaagaagaagcatgaacgggtaaacgatttagcaaacatttttttggctaaatcgttttacacaggaatggatcatgatttgtaattagataaacaataaggtgatgtatgaaatatatgtattcaacaatctatatgttagtttttatctgtattaacttgtgaagtctctgattagagtcgaaatttcattgcaagatattaaggatccaacaaattttctgaaagttcccagtcttcttaatccaagtattcaaatctgttgaaaaatatttctaatacaaaaataattc

SEQ ID NO: 62835 - DNA, 1354 bp, Arabidopsis thaliana landsberg
tactttgtgttagaatttttttcttcaaaaattacactcaaatttttccattggttactagtctgtgttttggtttgctggtttggactttaagagctcatgttatctttggattgaggaattgaaattcagcaaatcgtagaatagtagtaattgtgctaatctccaaatagaacccgagatttggcaactgaagcaccatccatccaaagacggtttgtttagaaacaaggtggttgaaggttcaatcaaaaccctttagtagaaatttacatatatatacactagattaagatcaacagtaattaaaaatttcatgattagcagaattcatcaaaaaaaaatttactaatcaatttatgaacataaaaaaaaatcatcaattaaactgacttttttgttttaacacaaacactttagcattttgtttacaagaaacgaaaattgaatgcaaactataaacagagacaaccaagtagtatttattaactgtcccggttcaggtaacccgaattgattttgattttgtacccggtttagaaggagggatacgacaacaaaagcggtgaccaaaatcaaaacgtagggttttaaaaagggtttctcttctcttctccgtcgtcgagcatctgcaaattatacggcggcgataaaaaatgcctcgagtcatccctccggagaatctcggttgcccaccattccgtgctttaacttttgactctctcggcttaataaaaggtgcccacttcgctctctctgtttttaatatagaagtttcgttttttctaatagattatttcaattttgatgtgcagtgactgaagctcgtggtcaagagagagggattccgactgtagtgaacacatggggagagatgaatgcatctagaagtgttcttgctgcttccattgatgaccggttaaggaatccggtaaaaagtttcattcttttcatgtttatgttaagctatgaggattgaatctaggcgtggcttagttatcaggttcagattgatatctactgctgaaatgagctcattttttgaatttagcttataagatttgaatttgtgattcttggacttgaagatcattgtattaatcttgagccaaatttgaggttttcgttagattcctcgctctaatcagactgttggtagtcttagtttattgttttgctttggcattctgaaccacgagttttggctttgttttggttgcaattgagaacttatcggtaatatgttatcatttcgtttgcaactatgctacagtttcataatctctgactccactgttactacaagatagctcttcagattttttcctcctttctaagcatacatgataacatc

SEQ ID NO: 62836 - DNA, 1368 bp, Arabidopsis thaliana landsberg
  unsure (1)..(1368): unsure at all n locations
taaacttcacaatgtatttttttggttttctaacatattaattcgttcaaatttatgtccaaagcgaatgtgtcatcttattgttcttggaaagaaccctggttagaggctaataatatgtatatacggatagtcactaaccaagtcgaattctttatcttgcatatccgtctaattaaaggtatatttatttccgaataagcattttggtgaaatgtagcttcggtgcaatgatctcttttacaaaatcgtttcaacttttttgcgtcttggttagattaagttagccctaattaacggatcggacgcagttcgccattcttcaccgtattatataagatatcacgccagttatacataaagaactagtttttccttgaagattaacctaaaaaggaaatcaacaaagttgcattagtcaaaatttcaaagaaaagtcggtggttaaattccaacataaagaaagagagacatggaggggattttaactttaagagatatagattcaatataagagaccaattcaatttaacaaatataaagaaagggatagcgttgacaaaacgaaaacaaaataaaggatggcgagagatttaagaagaaaaatagatatttgggattagtggtgtaaagtgttcctatttggttgtacatctttatgtgttaatacttaataccacagcaacttttaatagttttataaacacaacaacatgttttgtaagaaaattacatcacatgtcataacatatatagccaactaagtattgtngggaagtattaacaaaagtattgaaataagtttggcatatttgggcaattatgaaaaactatcaatctttcaaaatgatatctacataattttataaattacggaaaggttgtgaaaagatgctttatgtattagttgcctatttttgattatgagaatttataaacagtttaatctttttataagcagtataataatatttttattacttttgtggatgagatttgagttatgcactcacaaatgttnnnnnnnnnnnnnnnnnnnnnngaatcatgttttatcaacacaaacacaataatcaacaaaatacgtagccaccaaaattgtatattatcttaattcatttttcaaccttttgagttttgagtcgaatcttataaaatctaatgatcttaagtatagaatttactaatatcattcatgtaatgtcttaaacataaagatttgaatgttaaactttaaacacaagagactttcaactaagagaggaaaatagagtgagtatgtttccaatctcactagagaaaaaagattacaatttaaacatcaaaacatgatgatgtcacctactctaatctaataaaaagtgggga

SEQ ID NO: 62837 - DNA, 637 bp, Arabidopsis thaliana landsberg
ccttggttttaagctttcttcttcatctatacttctctatataactttgagtagtctcaccaaagtccatttttatttaatcaactataccatttttagctattctttggtcttcgtttcgcgtaagcattcaatgcttttttcttttatctctttgggaaacgggagtgtggtcttcgtgtgtgtgtccctgtttcattaaccagttacgtttcattctcttcttttcttacgtttactacagatttcagaaagaaaaaaaagtgtttgaagcaaaagagattaatggcagattcttgagtcattaacttttttctaattcttttaattagatctctgaacataagagataacttgcgtcattattctatggttataaagattatgcacttgattaaaataacctctagttttcctttttctcatttgctaagcaactgttcctttttcttcttcttcttcttcttcagataattatgcttgggagtggaaagcaagaaaaattctaaactttatataaaattcccagaatcaattgatccacaaagaggtaccacttttttcctctcgtcattttccataaaaagtaagccttttgattgatatttaattattaaaagaatctgccttttgggtt

SEQ ID NO: 62838 - DNA, 261 bp, Arabidopsis thaliana landsberg
  unsure (1)..(261): unsure at all n locations
gccgaaanatagcacaaaacacgaaaagacgcgaaaaagcacccaaaggacaaaacaaggagatgtcaaaatgacaacggaaaagacccacagacgggcaacaaacggcggaggggccggaaagggcccaccgaaaagggaacacacgccaagacaggccccacggacacgaagggaacgagacaccaagcacgaacccagaaaaaaaaaaagaaaaggagggacgcaacacgaggagcacacgggaggggacccacccaa

SEQ ID NO: 62839 - DNA, 1152 bp, Arabidopsis thaliana landsberg
tcgttctctttggccccttgcttctgtgttcgattctttcctgtgttcccaggtctcactctatctctctctctctgctataagcttataagtattttgtggttacatgtccattaatcattctcatgatccttaatcttagcttctagggtttctgtgaattacaattttatgcctttgaggatatatctcaatgtgaaagtttcaaacttgtaactcaaaaaccatttgttagttagtaatcatcatcattctgaattgagctttgtggaatttgactagggcaacgaaagattcacattagttgcggtaagagtgaaataatgaaacctcatgaagcagaaatgcttgtgaacaagagaaccctttatgctcccattgagccatatagcagtggaaatttaaaggtttcagatgttcacactctctactgggagcaatcaggcaaacccgatggacacgtatgtaaaaccatcattgttattgaatcaaccatcatgtgttcaagtttctaacttttccattgtatgatgggaattaacattttgcagccggttgtttttcttcacggcgggccgggaggagggacggctcctggtaataggagattctttgatccggagttttaccggattgttctgtttgatcaggtcagtctctgaatttcagggacactttgattacattgatccatcttgtatattcatctttaagtttttgttgtcttgttttcttctagagaggtgcggggaagagtacaccgcatgcttgtttagaggaaaacaccacatgggaccttgtgaatgatattgaaaaactaagagaacatttgaaaatacctgaatggctggtgagagttttcttccagatatatggttcttgatgttgttgagatggttaagagccagaacctctgtctttttcaggtttttggaggatcatggggaagcactctagctcttgcatacagtcagtctcactctgacaaggtgcaaatcttgatgtttacattcttacatctgacaataataatggtggttcagggattgatagattggaatagaatcataataacatacgttatgttacctataatctcacatctttgaactttgttggcgcaaggttactggtttggtccttagagggatc

SEQ ID NO: 62840 - DNA, 1299 bp, Arabidopsis thaliana landsberg
catacagcttccatcttctgcaactttttatcaaccctgacacaacagtgttaagagatacccagtaagtacgtttaaagaaattagcataggattctacacatcaaagcttctcttgagagagaacaaacaacatccatggcgtcctcctatcatctagtacattagtttactaaattatacattggtttaagatattgagaccgataaggcttcaaaatagtgatatttctggatgtgctgcccactggataggtgaagagagaatgttatgataaatattttctataccataaaccatctgaaagcaagtaaaccactagaaaacaggatgtccagacaaactgaaggcaaactaggagagattcatgtgactagaatccaacaaaatcttttccagtaaggaactaactttcagtacaaaaatgattaaacccaaactggtagagaacttactgtggtggaaggtcagcatcttgagaactttcactaagaatacgctcaaactcttggatattctgtttcatatcccgagtcaacttgctttgagaaggcattttagcaatactgggatagtatgctctagccacaaacagctggtccttcatttgcttcaccttggcatctttcattggttccttattttcctccctccagaggcagtagctcccatatttcacttcacaagttctccaagtttcatcaccacttactattttcctctgaacacctgtatatgaggcttccgattttgttttctgttcacagaagaaagcagagtaaggttaacgttaaatgattggtgagagatataaagatgtctactaaggaaaccacttaatatatttgtacatttgcagggcttggattggcaacaacagttggggacactggtaatcctgcagattaatggagagaccagacgtaaagtatcagaccagaatcaatataaaataatggaagaggaatttcaagaaagtgaagcttgtaaagcagacctctttttttagaatcagggccgcttgttgcattcacatctctggaacccacgtttatgtcgcttttctagcatgtgatacaataaaacaaaacataagtatagaaattgttacaaacagtttaaccatctcacccaaggaactaattcttgaccttgcccaagacaatttgagatacattaagccacataattcatgaaagtatttcaactttctagtctcatgagatagtcaaatataaaaaaaataaagaaatcattcatctaatttctctaccctttaagcaacattacacaaaata

SEQ ID NO: 62841 - DNA, 380 bp, Arabidopsis thaliana landsberg
acccaacataacacacgaaaaaaaaaaacccaaaaggttacacgtatcacaccaaacgaataccagaacaaaacagataaacgagcctagcacgatacgaaaagacagatcgaccatcccacaaaactagggaaaccaaccccaccactgcaagaagcacttttaccatttcttctatgggcccaaagatactgaaaccctcgaaatagaccaaacccgaaacacaaagaccggaactcaaagcagtaagtccagcagatgctgcatactcgcaacaatataagggaacgtcatacacacatccgcctggagaaaaaattacaaaggagcaacctgggaaacaacaatagaactaaattccaaaaactccaccaaatcca

SEQ ID NO: 62842 - DNA, 2132 bp, Arabidopsis thaliana landsberg
ttattggtgttggaccactcctttctttgttttggtgcattatttttattgccaaattaaatacaaaaattattgttacgattacataaacacatccccttttaaagtgccaatatgcttcatttgtttagttttttattttgttttctttttttctgcaacagtgcaaatattaaatgctgtcgtcgagaggaatgagagagagacagcgatgttaccaaagatcttaatattactaaacacatgtcactgtttatcattaactgtccattaccatgcaatgcaaaacacaaaattccagtctatcctataacttttcaatagtatttgtttccactaatcaatcattaaccacattacttatatattaactacatcaaattcgtcaaaagtatctttcaagttgtatgatatacatatacagaaaaacaagaatcatggtgttcaagaaaattcaataattgtaagtagtaactagagaggtccccaaaatgattttatatcattgcatttcgctgtgcttgtgtttatataaacatcaaggattcaagatggtcaagggaaaaatgaagagacccccaaaatcaaatgaggacttcattattggttatgattaaaaacatacaagtgaatattttagtttgtaatgtataagagaaacaaagtgtagaagttttgactttgaccacattattagaatctttattcacgtatgaaccgattctcaatgcaaagaagcacatgtatccatccacttagagccaaacaaatgcatacgtggttaatgttgttgaacttctactctacgtatatgattaatttgtacgaccatcatcatcattaatatcttttcgaaaaaaaaacaaacaaaatctagaagcttatgtattgtcatgtaattcatattaatttggggatatctcattttatgtttaactacaagaatgtcactgttttggtttgacagtgaccataaggttcaataaataggcaaaaaaggcaccagaatcagtgtgtgagattttggtgcatggaagcaaggtatcaaatccattttcaaatttgttttagagatggttaactaatttttatgtataaatgttgtgcaaatccacaatagccgaactaaccttcatgttatgtactagctagtttggactagttttgccctgtctcatagtcatcatggcttcactacagcataaaccatatccaacaagcaaatgatttcactcaaacaacttgatgtagtcacatattcacattcattccaagaaaacgatgtgtaacaaatcgctaaaaacaatatgttttgtcatcacatatgtattttggaatttcattgagtggttgatagccgtatacaaatttttcttcatagtcgattacaaaaataaaaaataacgaaatactcaaaatcttttgttagcgtataattttccttcattaattgagttttattgaaactcaattttaaattaagaaattaaagaaaattatcataaattaattctggcgtctataaacagagaaattaaaataaattcctttttctaaatttcgtttacatcgaattacccaaaaatccgaaaaatatacagaaataaaaataattgatagatcggtcgggatatttggcgagccgacccgtcgcgtcgtgggtttaggtttaacgtattggcgcgccagtgaagaaaatagacgacgatggcgatgatgcatcctccgcagccgccgcaaggctcttatcaccatcctcagacgctcgaagaagttcgaactctttggattggtgatttgcagtactgggtcgacgaaaattacctcacttcctgcttctcccaaaccggcgaggtatctcttcacctctttgtttcctcagctttctctaaaagctgtgactttgtcaatttccaattcacagctctccattttcctgggtttattcgccatctaggaacaagataaagcagtgaattttactttcgggattttaagggttggcttatatttctcgtgctttattgaaacactgattcttaatatggttttgttctctctcgaaagactcgcacgatgttctatgttcaccgtctatattttgtgctcctaattcaataggtagcagatag

SEQ ID NO: 62843 - DNA, 624 bp, Arabidopsis thaliana landsberg
gaattaactgaatttacatacgaatccaaattaataaataagtaaaggatttgatgatccaacaccagccattatcctctattttgatttcttggacaagaagaatcaatcaagcaaatcttttctaaaccctagaaatcggttccatctcaatttctatatacaattttaatttattttcgctgaacaaaacaggaagaaaaaacgattgaattttccaaaattatctcaccattgttggacttgtattccttttgaagaataaaaattaaccgacactgttcttttaagtaaagtttataagaaaaattaactatattattaactgttatgatcgtttaagctcaacacaactaaagacaaaaaaccaaaaacaaacatcaaattacaaacaaaaaggttatgttctttccaaagagtagtgatcagtgaacaagaccaaacaaaaaccctcgtctctctacctctcatgttcttcacatcctgcaattacaaccacacaaataagtctcagatcaataaacttattcaatctcaaatctttaacaatcaaattctattctgaactgaatcaattgatcataaaagatcgagttcaaaaatacctgaatctcggggagattc

SEQ ID NO: 62844 - DNA, 270 bp, Arabidopsis thaliana landsberg
ccgggaccggcgacggcgagccggtcaccaggccgggcccgctcggcccactccgaggccggttcggcatcgtgcaggacgaactgaatctccagctcctgggcctgctcatcgaatgcccgcggcgtgtaggtacgcacgaccgggctggcgttcctccggcgttcatttttttttttttttttttcataaattttatttaatttatttattttttttcatttttttttttaattatttatttttattttttgacattcattttttatt

SEQ ID NO: 62845 - DNA, 624 bp, Arabidopsis thaliana landsberg
cctgatcaccgtctacaaagacctgtcggcccgctgcgattatccgctgcacctgggattgaccgaggccggcatgggaagcaaaggggtcgtcgcttccacggcgggcctggccgtgctgctgcagcagggtatcggcgacaccatccgtatttcgcttacccccgaaccgggcggcgatcgggcgcgcgaagtcatcgtcgcccaggaaatcctgcaaagcctggatctgcgcgcgttcactcccatggtcgtggcgtgtccgggctgcgggcgcaccagcagcacggtgttccaggaactcgcggccagcatccaggggtatctgcgcgatcagatgcccgtgtggaagtcccgctaccccggggtcgagaccatgaacgtggccgtcatgggctgcgtggtcaacggaccgggcgaaagccgccatgccgatatcggcatcagcctgccgggcacgggggaagtgccttcggctccggtctacgtcgatggccagcgcatcgttacgctcaagggcgattcgatagcggaagaattccaggccatagtccagaactacgtcgaaaaccgctatggcgcacgccatgggcatcacgacggttcctagccgaacctgaatcg

SEQ ID NO: 62846 - DNA, 1895 bp, Arabidopsis thaliana landsberg
  unsure (1)..(1895): unsure at all n locations
acgaccaaaaccagtcatcatctaggccagtattttgtttttacttcataacttgaaaacagataaagctgtaccaaaatagagcagaatggctccataacaaattgcagaagaaccggtgctaattgattccattcaaaacgtgatgcagagaagtgtttatatggcggggaaagtttgggaaaaaacaccttgtaattggttnnnnnnnnnnnnnnnnnnnnnnnnnnngttaagaaatgagttgggtggttttacttcacagtcgccgggcgatatttagtataagaagtgtagaggatgcaaagctaagagttttgctttggtctattgaaagaatgtcaagtcacaaagtcatgagagtttttttttgcttgccaagaaaaaggattggtagaagcagttaataggccgcaggcttggcccctcttttaaagctcaatcttttgctttaaagagttttttgtttagttccaggtgtggaagatgatggttttggaaacttttggtgcaaacaggggagcaaatcttattgctaaaagtgtgacaggagatctgagactgcagtcgtatgtggcaatgggtcctccaagctgcctggtaagagtttttgaggaagaaaggacttgcatctctgtttgttaatgcagtttcgtttcatgggctaaagttctttttgtgaactgatatttgcagtccgttgttgagtttgtttagtgtagggagtttgttttgtctcctgtagtttagaccctcacttttttgtagctatatggctttatcagtgtataaaagccagatgatgagaaaaagaaaaaaaaattgcagaagaacccttaatttatgacatatataataccactcatgaagaacagttgaaatttctgacaagtaaattgaattccaaccaagtcaaacacgtttattcgagtttcttttttgttttttctcaaagtataataagatgttgaattctgattagctgaaagatgacacgattttattcattgtttttgggtctaccaaaattggaaagtgagtaaataaatggctttctgcgacatttggctttcccatgttactaatttattaaaggaacagttgaacgcaataaataaaaacaaagacatgcactgatcacacaattcctagactcccaaattatcattctaacaggtaaatttcacggtgatatgttaaatatgtagcctgtaggtccaaatacaacaactacttctttttttttctttctattttcattatacatccttattgttatctaattagtaattatcagcattaaagatctgggacactcctgtttaaagctttcatcgactatttgcctattagttgtaacaatcagcctatggttataggtgaatctagactcatataatcaattctgacttaaaccttgtttgaaagtaaagagtgtttctaaacggttacctatagttgtaaacattcatgtctataataaaaacacaccaatatcaatttacacatagccaaataagagtctcaaatgagtcaaaatattaaaactgatttatgaaaacacaaattttataaaaataaatggtgaacaaatgttaagattagtgaaagttcctattttgaaaaacaaatgtctttgaacccaattaatatgccttgtaaaccagtccatagtatcaaactccaaaaaaaaaaagttacttttaatttcaaatatttacataaaattttgcatgcactactctgttcttatataatcttcgtcttcttcttctctgcttgagtcaacaagaaataaacagagctaaaatgtttcctctaatctccttttctccaacttctcttgatttcaccttcttcgccattatcatctcaggtttcgttttcatcatcac

SEQ ID NO: 62847 - DNA, 1328 bp, Arabidopsis thaliana landsberg
tgtgtataataaaaccccttgaataagtttaactgcaaaaaaatatatcatcgtgtgtatggacaaaataattaagacagaatgtattatctacacttttttttatctttcttacaatggatgttaacaaaatttctcatatataattaaaggaatatttttttttaatattaattgttacaattagttttgaagtttaatttgaattataattatttagtccacatataagatgtttgtggatttgaatcaacaaaatatacaacaataaatattaaattgataatatccatatttttttaaagattaaatattaatttaaaaggtatttcttaaaagttactttaaaatcatgtaacttatcaaatcatatttataacaattcataaaatcatcagaaagtaaaaaatattatatgtgtaacagtgtaaggcactatctttcttttagtatagataaaatcattccttttgtttctaaagtccagctaataatctagaaaattatatataaaatctaatttatttttaggtgtaagtgaaaatagtaatataataatatatcaatatattgagatgtattaagaccacaccaaaatttagaaaagtttgaaaaatactaataataagaattgtcaaagatttacaagtaaggggtttgaaaataaccaatatttgatgagtaatagttatattttctattttacaaaatgacatgacaactatcaacttgtaaaaaataataggaatatgaaaatttctaattttagggaattaaaatatataaattattggaaaaattgaaaatgataataataattttttactgtactctatattcttacgaaataaattttaactaagactttcagaggaaaaaacacgaaagatatttatatttttcagtctaaaattttgttggagaaaatatgaaaagaaaataaaaaatcaaattcatgacgtagtttaaaacaatcaaatgtcccagcacacccaagggaataaaggaccaagtcctaaacccgacggagggagacaaactctcttacttcaccattttaacctcaccataactttttgtgtaccatctgaaatatttcaacaagagaattatgttgtaattcccaaaatcggtcttaacaacactagaccaggccagttcatatttacacttgttcagaactgaaatatgtcaaacctacttaaggcacttgtttgtcttggtctcacaaattcaaaaccggcttttaaaacttgaagtatatatcctagggtaataactttaatggggagaaaagatggataagctgtttcaaatcggatttacaa

SEQ ID NO: 62848 - DNA, 661 bp, Arabidopsis thaliana landsberg
  unsure (1)..(661): unsure at all n locations
gcctcatncacttattaacaaagctgagtcttcttcacggagaaatcacggcggagctaggtctcatataccttgcatcaatatcttgggcctttactaggatcggagatacatcaaacataaaatacttctcggttttattttctctttccttatgtatatgtgaatgcctttaaaaattttgattgcctttttctcgttttggaatagtcatgagaagctgagaaccaaaaaggaaatatttctcacctttgcaactagctagatggagcttattgatgcaaaattcgttttaaaacacattgtattcggatgatgtcaaaatatttcacattcatatagcaaattcatgtttatatattccgatattaactttaaatattaaaacttatatgctgtagattcatatccgggtgaaaacacgaaaggacttatgatggaatcattatatggaacgacgtcatgtggaatatcaagttatttaacttctcgcgagtaagactataaaaagtaatagaataattagtaactaacaatatcagataacgataggcagatgatttggtaatactattttagtatcactacatcacaataaccatactagcatatacgatatacaaattaataaaattatcgtgctttaaaaacaaaaacccta

SEQ ID NO: 62849 - DNA, 555 bp, Arabidopsis thaliana landsberg
atacatatatatatatatatatatatatatatatataagtatctaaattaaacaagtattaaagatcttattctatctgttcacaaagtagtttaccatcaactgtcgttgtgtgattcttcttctccaagaatctaaatggttaaatcaatcatatcaaattgtgtattgttcactgtatccaagaagatttaagacgcaggtgaaaatgatcactccaaagtcgttaaaggatgtgttatgctgacttgacttggctctcgcattctccacttcaaaaaaatcatataaaacaaaatatttcattctcatatagtcatatggaaattatttgtccaatattatatatgaatagagacattgatgaagcaatagaggcaaagtcaaagggcttacctaaaacaccgtccataacatcatcaacattattagtttttaagtggaaaccacgttaaaacgtagtgctgaagccgatgtgggaatcacgtaatttatggccaaagccaggggtaaaacaattgccatgttgaaagataactaaactactcacaataa

SEQ ID NO: 62850 - DNA, 1340 bp, Arabidopsis thaliana landsberg
aaacgaacccacactaaattgcaaaacgttttgattaagataagttgaacacgtttggaacattaattgtaatctaatggatcggttggaacctaaaccataactaaaccggaatactcatgatgaattggaagtatttgggctcgaaaaaagcccattaagaaaaaaggaaataaaaatagtcacaaatctccgttattaatttttgccataagcttgagaacacttgaaaagacaagattcgcgagttcttcgttcttcgttctgcctttttttttttttttgtgtgttcgagagatgtctgcctttgaagacgattccttcgtcatactcaacgatgatgcgtctgagtctgttccagtctcaggctcttttgacgccactgattctttctcagctttcgacggctcactccaagtcgaggactccgtcgacgatgtttttgcagcgccgtcttctgactacggtgcttactccaacggtgacggcatcttcggatccaacggggatcacgacggtcctatcttgccaccaccgtcggagatggaatcagatgagggatttgctcttagagaatggagaaggttagatctactcaaagttttgatctttgttgctttttgtttacttcttcctgaagaaaatcgataaagtggataaatttagttgagaatctctttgataatctgagaatttcaattttgaattttgattcacaatttttgtgaattgaagttatctgctagttagtgtccattgttctcagaagtaatcagtttattagattggatctgttacttttgcttagagtttattggtcaaatcgtgtgttctagaataacatcttgatccgtaagcttgtaatgcttgttgagttgattaagatgtatagatctgatttcgtgctatggctttattatgtttatgtgtagacaaaatgcaattcaacttgaggagaaggagaagagagaaaaggaattgttgaagcaaattattgaggaagctgatcaatacaaagaagagtttcataagaagattgaagtaacttgtgaaaacaacaaagcagctaacagagagaaggaaaaggtttgttcttttgctaaaagatttgaattttttatcatcttttctcaatctgtgttgttgtcatgtggtttgtggagaattgtcaatgcaagtcaatggcttgttgatattaaaattttcaaactttgaccatcttagtcttaagtcaactgtgattgattatcttaatgcattgtcagtttagagattatcttaatacattgattatcttcattacgtgtgtgatctttgatacctttttatctgcatattgc

SEQ ID NO: 62851 - DNA, 672 bp, Arabidopsis thaliana landsberg
gagagaaagagaaaacttgtgtgatcattgtgttacttggagcatggcacggcaaggacacaaaaagcttttagatgaacaaataaagttaagcctttgcttttattaattaatgtctaactaagtaacccttgtatttgtaacgtattatttgcttgttaattaaattaagtagataatatcaaaatcgttgcctaaataacgacgatattatcaaatcgatctttgtattgttaaactatatggatttggttaaaagatttagaggttatggtgaagaaaattacattcaagtaagagtatataatactactatttttttatgtttcatgaaatatgataattttaataagataaaatatatgaagataattctgttgaggctatttgaaattaattacaacacaaatcaaacgaactaatacaatatatcaaaccgttcgaaattagtgtcttaaaccgaactaaaacccccgctaattattgtgtcggttagatctaattccaatggcattattgtaaatagtttgaaattagagagaaatttcccaagagtgtccttgacaatctgacacaagcttgaggtcaactaaatatcacattcaaagctttgatttttattttctctttcgacgaaaatcttaaaactttaagatcctttatttctgatct

SEQ ID NO: 62852 - DNA, 1795 bp, Arabidopsis thaliana landsberg
gctaccagagtgcaacatgtaaaggactttaaagactcatgttgttgcagaagaagattctgtggatacagagtaatcttttctcttcggtgtatggaatctctcaaagcattacaagagagagcattactagcactacaggagcagtcgaatgtgttgtgaaattagtattaatatttttttctatagcagaaatatacactcatgagtcgttcttctgtgcaagaaaatacataatttgtttccctgttctttcttcttcttatgctatgtgtcctctctggacttgcatgtaacattgttgtcactttgtaatcaaatgttgtagtttaagatgttttagattgatttatatgcatttatttgggtactacatcatttctatggaaactaaggttttcaagaattactgttcaagtgttgactgtggatgacgaatgtagtagaactgtgatgacctatatggaggtagaaaactaccaaattaactacataaaacttatctgacaaaagacgaatgaagttcattatcactattttgtgttatcgtgagtaccactatgtggtgacaaccatcatgcttaatatgagtaacatatttatataacaaattgttatgatgttcaaaaaatgttacgagtatgcaatttaacagattctttttaattcatgctttacatatagccatgatgcttaacgatatccaaaagaaaacaaaaaaaaatcattgaagagattgcacctagactagattgcctctcggatgaccatgtacatgtgttgctcttaagaaacgtaatctatgcatcataactaaaggaaagttatacatgtgttttaatatcaattaaaattggttgattacatacttaaactagtaaatcacaatctatgaataatccggactctttttaacatagacacatgacacatcaacaagtagtgtgcaacatattctagaggatggtcatcttaggtagtattcaatcaaatgattttggatcaaaaagtaattgaaatcccacgtttattggttcggttcactccttgattagtcaagtttcatattaacataattttcatcgaaattctctttagcattattcgaaaaaccaaatatactgtaatactagcaagaaaaacaatagttttgacatatcttgcttcataaccgaatatctcattacaaaataatccatttttcacgtttagataatcaaacgaaccctcacagaattttctacacaatgcaaaaaacaaaaacgaatttcatcgagtatatcacgagttatggtcaaatgaatcgagtctaaaagcacaacaaatatgaccaaagcatctaatccacatccactaacttactcatcccaccatctacactccttctttctctgccgtcgataaaatttgatccaacgattaatattcaaacctgagaaaagagtagcgatccgcgtagtcattgttttaaccaatcagaagccagatatgaattgccgtctaatacacatctaactatataaatcggacgtttccaatgatcctcttcacaacctcataatcactttcgaaattacatttacgctttcttgcaatcaaattttccgatcttaagttcagaagacgatgtcagaggtggaaatagagaacgctgctacgatcgaaggaaacaccgctgcggatgcgccggtgacggatgcggccgttgagaagaagcctgcagcgaaaggacgaaagacgaagaatgttaaggaagtgaaggagaagaagactgttgctgccgtccgaagaagag

SEQ ID NO: 62853 - DNA, 591 bp, Arabidopsis thaliana landsberg
  unsure (1)..(591): unsure at all n locations
ggcaccatcggagatgctcttaattatagaaaattgtatgtaccaacgaccacctactaattattgtaggtatttaacgtttcagaaactattcaattaatcgcatagatataccaacaaaacgaaagatgccttgattatttatttgtttatctgcgtggacacctcacaattccatgagtctacaatagtgtcaacgtaaaaaagtactatttgaaagtattatttcttttgtcaagcgttaatcttggaggactacaatttcgatgatgaaatcaaatattttagaaatgataaataatgaagaacaatttataaacacggtcggtatcataatattgaggaaacgatgaataatgaattgattggctgaaacgaaaaagtttttctttgatttttgttatttcttgtagagctagtttaatgcaaacataattctagactacaactaaaacttcttttaattcgcagtcgccaaaaaaagcctaaccaacactagcatatatgtactttcatagagaaaaccaatattgaaattnttttgaacaatggtgatgtaatgagagaaagaccttactctcaaattaataa

SEQ ID NO: 62854 - DNA, 607 bp, Arabidopsis thaliana landsberg
cgatagatattactgtatgtttgaaaagaagtatatagaagttaatacttgttgtttgcatgtgtgtgtctttttctctttttgggctttgaacttcccaacaaagttagaagctcaaaaagggattttagatgctgaagcaagataagaagaagcatttatgcaaaagcctgttgtttttggtgcgcagaggagggaccatatagatttgaaatcccttctcttcttctttttcttgacaaggatatacaaaatcatatttcttggacaggtcttaattgattgcttttatttgtttaccaatatttataatactaagtgctattagtaggatgaggtataggtaactattcatagtgcttttgctgtaggatgcagcattggctcttactctctaggtgcttcgtgatttcaaaaatctttttcagtgcacaaataattgaatataaacttagctctgaccatggattacctcaagtagtgtttctcaacgtcaaagattatttatgtgttaccacaaatatgtacgataatagacggtctaatcgaataatgatctacctcagtaaacaacacatgttttcaacgaacaatttcttttcaaatt

SEQ ID NO: 62855 - DNA, 601 bp, Arabidopsis thaliana landsberg
cgtagtcttttttgttactatattgtctcatgacccattagtactggattgtgactatttcatatgttaaatcaaaccatgacagaaaaagcaggaacatttcttgatccttgtgaagctactttgaacaacaataaagagataatcccaagatttctaagtactttacaaatgtttttaaaacctcatctatggtttctttctctaacaagaatctcctagaagatgaagtttcttctttgtcttaggagttattaatagccagggatttcacctggaactggagccaactcgttcttactgaatttctcttcatcatagaacgttgcacgtacggttcttcctccaaagtatctcccatcgaggtctacaagggctttagttgtttcctcgggtcttgaaaactgaacaaagattcttactgcttcgtgtacagggaagttcggttcagtgatctcgaatatcagtacacgagtgactgtaccgtatttgccacactcgcctcctacctcatcttctagctcatcatctacttgtcctggcccaaccttcagacacagagaaaacaggttatgggtcaaccagaattgatacatgagac

SEQ ID NO: 62856 - DNA, 628 bp, Arabidopsis thaliana landsberg
taaagcctgacagacaaatgaacggtgttcagattctctccaagtaaaattaaaactgttccataaaaatatgtagctcaaaatcaagaacaagataataagcctaatctatcaacacaagcaccaaataagccccacgaaagttggaagatccaatctatatttacatttattaggatgcaagtgtttctcagtgatttgaaccattgacaaaagactttattcatgaactgagaaggaaaatctcaactattttggtaaagaagtacagtaggaagaatctatctacctttcatgacaccgggaccttgtatccagagctctcctcggtttcctggtggaaggaaagaaccagagctccaatctactaccttggcttgcatattaggagccagtagtcccacagaagaatacctactaagcttttccgagttgaagccccgtgttccaactgcagttgattcagtcattccatatccctgcaacaaaatgtgatccattttatacacactttcagctaaatgtaaagaaaataatagtgtgagtcaaaaagtcatggcctcgttaaatcaatttagttgtttcttttgggagagatgtcaatttttctaaaaatgagattctactc

SEQ ID NO: 62857 - DNA, 655 bp, Arabidopsis thaliana landsberg
ccgggccacgccggcctgggcgatgcccacgacttcctggatcaggctgccgatttcccgggccgcgtccgcggtccgcattgccagggcgcggacctcgccggccacgacggcgaagccccgcccgtgctcgccggcgcgggcggcctcgaccgcggcgttcagcgccaggatgttggtctggaacgcaatgccgtcgatcacgccgacgatgtcgccgatgcgcttgctggcggtgtccatgtgctcgatgcgggcggctgcctcctggaccacctgggccgcgcgcccggccgaggcgctggaggcctgcgccaggtccacggcggtccgggcatggccgtggttttcctcgatgaggcggttcaggcgctgcatgtcgcggctcgtgtcgttcaggcggtcggcggccgattcggtctgcgcgctgagatgccggctgccctgggcgatctcggccgaggcgtggcgcagtcccgagagctggctttgcacgtcgtcgatgaaggaatgcaggttcaggctgcattgcttgatggctttctggatggaggcggcttcgtccagccgggtcaggtgcccctcgtcgacccgctggccgctggcggcctggatggcctggcgctggatcgtgcgcaaggggcggatcagcccg

SEQ ID NO: 62858 - DNA, 463 bp, Arabidopsis thaliana landsberg
agagcagttccatcatcaacttgcatgcttctccttagagttttatttagcctacgctttccatcggctgataagttggattgttgattcgtaccaggtacaggttgttctctcttcggtgcaccttcgaggtaaagaacggctacttctcgtttggcatatttgtctagctcaacataacacgtagtgtttgcgagaatttcaggattgcttattgggataagcagtctgtctcttgagtaaataccatggtcgctcatcatgttgtttagccgctttatgtccataacctacattgttcaaaaacaaggtgtaatattaaaatccagttactaaaagtccattttcggtaaataccatggttcgatcatcatgttgtttagactaaaagtccattttcggtaaaactctatctttcgtctgataagtagtctctatctaggtgcaaccaaaaaacctacta

SEQ ID NO: 62859 - DNA, 1116 bp, Arabidopsis thaliana landsberg
accttggaacatcttcttcaacgctctcacgccattatgagaatgctttcgaattccgccaaatctaacggcggatactacactccggcgtagcttagccaacctctttccgatcttgaccttcaacagataaagcttcagccgtataaacgacgaatgaggatcacgccgagaaatcaagtcggcttcttgaagtgttttgtaaatcaagaacttggctcgtcggctaagtacctcttctggatcttccttgtccatctttgagtaaagacatggcctcttgaatagggtcattttcgtctttttgtgttttcccggcgacgacttttggaagagaaggtagtgtgatcagagagagatgaggagaggagttgaaatgaccaagtatttgtagtcattgcattgagcagtgctggtgcactaacttgtagcttgtatacgtgtttcttattttctttttctcaagttatgtaatttcttattagaaactaaactttttggccaaaaaaaaagagaggacaattaaacttaattataagtcaaatcattaagataatatataagatagtatgaattttccagctaacaatcttatagttaatgcctgtatataaaaatcattgttcatatttaattatgcaaaatgaggtcatatagtttatatatttgtaagataacatcttagactgtaaacatttaaatttaagagcttgccgtccaaatatcttaatttatttgtttgcaaaaatgaggtcatatatatatagtacttacatgtataagataacatttactactttagcattttaatttacgagtttgcagcccaaaaatacatatgtggaatttggttttaacctttgtgtccatgtcggaaaaaccattaatcaatagttttgttgagttcttaattttttgatagatttcttataattaatgaataatgatttcaattaatggacataatttaggaatattactgatctagcaggggaaaaatcgctgacttttctttttattgtaatgaaagaattataatttcctcggttatgaaaaagctataagtctataacgttatgaacttgagaaaataataatattgtttcggagccaaca

SEQ ID NO: 62860 - DNA, 460 bp, Arabidopsis thaliana landsberg
cgacgctatctgccatgactggcgcaccgcgcgccgcgcgagcacggccgcggtgcggcgcttgttcccggtcgacaccttcagctgcggccccgggtccagctggccggccacggccgcttccacttccgcgagcaccgcgtcgtcggcggcctggccgcgcagcgcgtcctccgcggcggtgacccggaccggcctctcccccaccgaggtgcagacgatccgggcgtcggtgacgcggtcgtccgggccgacccggacgacggcgcccgcgccggccatcgcgaagtcccccacgcgggccgcgacctcgccgaacgcgctcccggcacgcgggccggtcacggggaactcgatcgcgacgaggagctcgtcgtcggccaggtcggtggacaggaacgagacgaagaattcctccgccgcgacccggcgctcgccgcggacgccgcggatcaccatc

SEQ ID NO: 62861 - DNA, 665 bp, Arabidopsis thaliana landsberg
taaggagttgtgaaagcgacaagcaaatatataaacgaccttatcaacaaagcaaacgtatagctacaaacgattgtgagcttttatatcaaacaatgcaaacatatagatcctcataactaacgtggtacacccatatatataacttatatatttgtaaatctgcttaaaactttacaacttacggcctttatacctttagatatggctatgcaactatacttttactggatttgtaggtttgcatgcaagatttaagtgccataaacctaaagcctaagggtcaatgtaaatataaaacaacctaaatctagatctttatatcactttgctcttttcatgatctctctcttaagtttggttttcccttctttcctttcctctagtgattcaccacctctgtcaccgtggcaagaatgcatagtatgtctgcctatttctgaatgccgcatgcgattttaaccacacaaaataagagggaatcaaaagattttttagaatagtataaatttcattattattttaattaatagactctatggaaacagccatttttctgaagaaaaaaactacggttctagcctcaaaactatcacgttatcttccatgtcaactgtcggttacgcacaatgttattttagtcaaattttaatagatggaaatgg

SEQ ID NO: 62862 - DNA, 553 bp, Arabidopsis thaliana landsberg
  unsure (1)..(553): unsure at all n locations
ncgtttgattaacgatacatataggtattaaaaacttgttagctatctagtatttgattccacatttaaccttatatatattcatgtgacaaatggctcttgtaaaattagaccaagtgcaactaatgacacaaatggttctgttatcattcttaaaccaatatgacttttatagcatgccatcactagtacgtatattactacaagtatgaagtattacaactttttcgaaaagtcctaattaagaaatgttctttaaccaagttatgaggaaccttatttaccactcataacttataccatagaccatagttatggcagaattcaaagtatctaagtttacctgacaaagtttttgatgctatttcttttgttaaaacttgtgtagaccaagttttgtggtcttaatctatgagggctacagggacgtcacatatgaacatgctcaagaaatgactcagaagcctcatagaaaccttcatgattttgcttaaacagataagaaattcttgactaatacatctccacatcattatatatatgagaattgata

SEQ ID NO: 62863 - DNA, 1039 bp, Arabidopsis thaliana landsberg
cgagtgactgcttttgtttaactgagtagaggtgatgaagtagagaattcagtgttcttaccatctaaccgagcaacgttaactccatagcttttaggacatgcaccaggagtcaatctatagagaaatgtaacttcttctactccaccgattccttctcctatttgacatgccatatggcaaagtgagacctatccaaaaaaatattcaagactgatcggtttttgacaagtttcagaatgtacacaaacaatcagattactgatagttcccaagtctttcaaacgcagaaactgaagcagacacttttcacaatacctttggattggtttgataatccacagagagacgatgataatgagtagagaagaatcctctacactgcaccttttctatgaagtgctcaagtacggattccctgtaaatagttaagatattttagataaagtgaacaataacagtaagtcccaaaaaacaagatacgcaataattgattcaacatacgcaatggcttgcccatctgatgtggctgttcctcgtccaagctcatctagcaccaccagcgagtttcgggtggctgatgtctgtatattattaatataaaacattctatcagtgcgtttgttggcattcgcatagtttacaaagcctgtgaccaactctcaaaagggtaaccactgtggcaagtttcacatttatcttagaaagcttcatgtaatcaatttgacaaacagaatgaacattacttaccaacattaccgcagtttctgaaagttctgttaaaaacgtgctttgtcctgccatgatatgatcttttgcacccatccggacacaaattctgtcaacaggcgaaatctcaaaggtttctgctgggacatctgctccaatctgtgaaaagatcatcattgcttgagtctctttcatcaacattaaacgggtcaaagcgcattgcctacaatgttttatcaaatgatagcttacctgagccaagattacagccaagcaaacttggcgaagaagggttgattttccacccatc

SEQ ID NO: 62864 - DNA, 426 bp, Arabidopsis thaliana landsberg
ccgttctctaagtcctacaggttcgggtgtggagctgacggtccctgctttgtaggagtgacgcaagtcgcgatcaaagcccgatcccgcggcgcagtagcgacgcgagtaacacatcgcggcttgcgccgctcctacaggttcgggtgtggagctggcggtcctgctttgtaggagcgacgcaagtcgcgatcaatgccagatcccgcggcgcagtagcgacgcgagtaacacatcgcggcttgcgccgctcctacacgtccgggcgtggagctggcggtcctgcttctgtaggagcgacgcaagtcgcgatcaatgcccgatcccacgccgcaggagcgacgtgagtaacgcatcgcggcttgcgccgctcctacaggttcgggtgtggggctggcggtccagcttttgtaggagcgacgcaag

SEQ ID NO: 62865 - DNA, 581 bp, Arabidopsis thaliana landsberg
  unsure (1)..(581): unsure at all n locations
ggaggatcttcttctttaggcatttatactctttacccaccaaagccaacttgtaatggatcctttttcctctgctttatcatatcttcaatggtgtcaattgtctaaccttcaacatatttattagtctcttcatttttatttcgacacgtttccgcttttcgacctcacatgaacattcaatttcatagtatcgaatattttgattgattttttaatttctgcgtcttataaccaaagctatgtaatgtgtttaactgttcattatcattgaaatgtgttcgtagtttaatgtaaccggtgtattttggatagctcttggatcagaaagtgtgatcatgttgtgaggttgagtcatttcgacaacacaaaggagactaatttacttgctatgatcagtaagaatgtaaatctttagttgattctttaaggttttagatgaatgtataacctataaatttggtcctacgaaaaacaaanaacatgaaagcaaagacaatgagtccataaaacanaatgtttgctaccaaaaatcacaaacttatnaagaaatatttacacaatagtttttcacgaaaacc

SEQ ID NO: 62866 - DNA, 485 bp, Arabidopsis thaliana landsberg
acaggatcacgacgctgaaggagacgttcgcccgctagcgcgccgaacccagcgcctcccgtaccgtttcgcgcaggtgatgcaatccgtacgaagtgtcgacgaacttgccattgaggtagaaaccgggcgtgccgcggacaccgcgggcgcgaccggcttgcaggtcctgcaggacgcgcgcctggtgggcatgcgtctcgagatcgccatggaaccggggcaggtccagtccgagaccttgtgcgatgccggccaggagtttcccatcgagctcgcctgtccggctgaagacgaggtcgtggaactcccagaacctgccctgggcagcggcggcttcagccgcctcggcggccatttcggcgtgcggatgcgcctgcggggcctgaaagtgccggtagaccaggcggatggaggcttccttcccggccaggaggtttctgaggatcgggaacgcctgcttgcaatacggacactcgaaatcc

SEQ ID NO: 62867 - DNA, 307 bp, Arabidopsis thaliana landsberg
caactgccatgagttatgcgtctgcgatccatgccccgcaccgtaggggcggcccgccgccgaccgcggcggtatggatctatctacgcagcgtgcacctgtccgcatagacgaatcggtcgaatccggcgtacccgcccatggtgggggcggtgaacgggggtggcgatacggtcggtgcggtgcacggggccggtcgtggccctgttttgggagaggtgccaggtgtgggtgcggaggtgaacgtacgcccgccggtggccgaccgggaggggatggttcgggctctgcccaaactcaccaaggg

SEQ ID NO: 62868 - DNA, 615 bp, Arabidopsis thaliana landsberg
ctaacagttttttttgcatacatatataggattctttgtcaaatacagctcgtaacaatgtaccatgcacgacttccgcataaaaaatattcattcaatcatcccaccaatacagatgatggtgttacatatattcatttatgtaaaatttattatcatcaaagtaagacctatttcgatcgtatatttcgcactactacataatgctttggatgtaaagtagccaaaaatggttgttacgacttacgactgtgcacaccgaacataaaaaaattgatctaaaattcttggacgctttgattttggctacaccgattaaacatgtcaatgaaaagtcaacgggatttttggcttacacgtacgtaggatcaaacaattttttagacataacatatttgtcattattttgaatcttaagagctgttaatttgaaaaattataaacctcactttttcaatataaacatgtatgttatccgtactaatattagctagcttttactatggcatagctatagatgattgctaactaggttaggtggagattcaataacaacaaattaaatgatacgaaagaagcatgaccatgtactttaattatctttatatgctaact

SEQ ID NO: 62869 - DNA, 507 bp, Arabidopsis thaliana landsberg
attaaacttaaaaagttttagattcagttgataatagaaaatccagaacggagatctttcgctcttctcctatcttcgtccatcaactccgatacgccaagtctgaccagatcataaaccctcgaaacagctttggagaccccagtttcgccatccaacacctctatgatctcctcgcaccgcctatcaatagcgttcaccacagactttgaggatccgcgtttgttgattcccaacacagcgtaccagtcaggctctcctgtgaccgtacgataattggctgccgtcaaaaggattctgtaagcggcgacgtgtgcataagcttgaggagcgtcaggattcgctttgcagattgaaacagcacatcgtaatgcaagttcgagacttcctctctcaatatagttctcttcacagtaacgaagaagctcgttaatctttcttgacattctctcaagcatgaatgatctcttacggttacggctaagtaactcagtattagatactcac

SEQ ID NO: 62870 - DNA, 725 bp, Arabidopsis thaliana landsberg
tattccgtcatgatttgagatttaattgtcagcaacttctctacttagaaaaggtattgtaaaatactttctccgaaaacaataaacaaacagagcaccaattcaagcaaagcatcatacaaggcaatatattcaatcgaaaataataaactaataggaataattcataatttatagcaaggagatggaactaaagaactaccttgcttaggtcttaggtcatgttcgtggagagttctggctaaactaaggggataactagggttttttcgttttgcgaaaaaagttaactaaggttttttatttttctaataatgttgaaaataccgaaaatatcccacgcttccgagttattaaccatacaatgtatatgggctattggtaactactcgttcgggccaaagcggatcacaagtacttgaaaaatagcaagtaccggccttgtgcccaggcatacaagcctctctatttcaacttataaagaacaggagacgtagagatatttagggtttctctaaacaagagtgagtggtcaggaccatgacgacaagtcaattcaagaagagtaaaatagagaacaattctcagtttcttggaatcttaaaagaaaagaacttcaattatgttcctttggacgtagccatagagatatttatgagattgcctgtgaaatccgcagctaggcttcttctacttttcaaagttttgggccccaaaattatccc

SEQ ID NO: 62871 - DNA, 969 bp, Arabidopsis thaliana landsberg
ctctgcaccctacttgattgtaaagtatctacggaagttgataaactccataaagatgatgagagtggaatcatggggtttgtccctgaactctatttgctattggtgtgacctgctgaaggggtctctgtcttccctggaaatgcagttttgggtatttagatcagctaagccaaccatgagagtttaaaatgcagaataaatcaatgtagaaacctgcacgtgattgcagtggcgtttcagaagtagcaacaagcgatttctgagcccttacaacacaagtacgccatgatttctcccagctgcccttcccaccatctaaagaaatgcagattgaacacactgtctcgaatgtggataacaaattagattaaagaataacaatcttacctgcaccaccaaatgcagatatcatataagcttcatccggtgctgttccttggctgtagcaaaaaaacaacaaaagaactccaaatcagatgctctcaagtctcactaactcaacaagacttaagaacaaataaagactaagaaagagcttacatcagagccccgtatacaaaaatctgtgcacgtagttgcacttgttgcaagtccgtgaaaggtcgacgcagaatacttgagagagcagaagagttcaaatccggtagacttgccgtaggggttgaaagggacccaaaagcttttagagcagggctctgaagacttcgctgtttctcagtagattgtgtgatctgaatatgagaagccaaactttgattaacagcatttgttttgcctccactttgaaactgttcaataggtgtagccccttttacactagttccttttctagaagtctcttttcctacagatttagatgttcgcctgggtttccgctcaaattttgcttgggaagactttgcagcttgtttatcttaagctagatgttgaaggagatcccaccacaatctgaataaacaaaaaaca

SEQ ID NO: 62872 - DNA, 316 bp, Arabidopsis thaliana landsberg
ttgtgtcttgtataccatttcagtgttctgattgcgttgaattgtagtgaacaacattttgcactttttgcattttgtctcacagttgctaatttgcggatgattttgataggattaagtggccattgggttcgaagaagatgtgtgcacaagtggactgcaaggcgcctatgattttgtgtcaaagcttgcatggctggttggttagtaacattttaagtccaaatgcttaaaggattggtaacggcttaccacaagttccgggtgaagagaaactgctagcctaatgttggtggtgtggcttttaatccagttg

SEQ ID NO: 62873 - DNA, 1354 bp, Arabidopsis thaliana landsberg
cataccgatctttggcagaggcggttctatctcatgtagtccggttttctcagcgatatcaagagctgtttctcctgatttattaaccgccactctactgccttcacaatactttaaaactgtctgaacaatctgcaaagaatacaagaaagattctaacttctgcaacaagaataacttaaaagattgatcaacgattacctctgctctgtttttacggactgctatatgcaatggagtgtttcctttattatccgcggaattgatcaacgaaccatctgcttccatcaacacatccacaatctcagtgttttgtcctttaaccgccatatgaagagcggtttgacctttcttgtcgactcttgtaaccataccagccttcttttcaatcaactccttcacaatcaccgtgtgcccgttcctagctgcagagtgcaaagcggttttaccattgcttctcgcaatagcagctaagtccacacctttatccaacaagaaacaaacaatctctccatgaccctgtgaagccgcggtatgaagcgccgtggttttggatgaatcaaatgtaaatgagagttctggatttgcctctattaacacatcaagaacctctgcaacaaaagcaaaatccaaattcacataaacattttcctatctttgtcaatgagcacacaaatagcaattttcacataattagagaatgaaagtggattattcagtagtagataattagcaatttactcacaattagagataaaaatggagttgatcttcagcatatatatgcaaaattggtaattcttgagcacaaagacttttgagaatcaagtcaactcacgtagatttccgtttttggcggcgatgtgaaaggcatcgaagccgttcttggctttggttccggctaagacagagtccgagtgtttcatcagaatcttaaccatgtcggtgtaaccgtactcagccgcaacgtacaaagcagtttcaccggactggttttgttccgccaacaactctttcagctccacgccgtcgtgttctccgatcatctccaaaagaaggtccgttttgccttctctaaccgccgtgtgtaacggcgtgtcgtcacgtctcgccgtcatctgcttggtcatcgtcttcttgatttctttcatgattgatgatgattctgtttaaagaatctttgggattaaaaaaagtttggcggaaatttagatcgagatagggaggtctacatgagtagatttgaggaagattcagacaagagtaacatgaattctctggacaagaaacaacaaaatatattattacctcttaactatgctcgtggttttggctgcttgtgttatatcacata

SEQ ID NO: 62874 - DNA, 584 bp, Arabidopsis thaliana landsberg
cttttatctttgtccggctcccagccgggatgccccactttagcctgaaataaataaaacgcttcggcgtttctatgtcttaaagcatccatttcatgaaggtgcaccttctgctaacccgcatcttacaggcagcgtcttttcatcgtcttgccagtaaggtcctgacgggtgggattactctgtcggccttgctcgctatttcctttaacagtatggcgcagcaaacggcggtttatgacgatccgggccatatgtacaaggaagcccagaacctttatcagcaagggctttatgcagaagcccagccattgtttaggaagaccatccgcaatatcggctatttccatgccaccgatcagcagttgatccttcaggatgcccattactactataacatctgcgctttgccagtgcagcaacccaatggggtgcaattggctcaggattatctggccacttacccgaacggatctcgcaaacaacttacggcttatcaattggggcgctattattttcgccaaaataaactccaggaagccattccttattacgagcaagcggggatcgaaaatctgtccaac

SEQ ID NO: 62875 - DNA, 296 bp, Arabidopsis thaliana landsberg
gcatagatgatcaggaagattgcccactggctaagatatttttagcttttctaaaccatgagagacaaagctaatgaacactgggtgggcacaaaaccagcatcacgagccactaagcctatccatcatatgcattatcagcaatgaactatgttggtggacaattgcaaaactattctatcataacacattatcagcagtgccgaggaagcaaagaacagggttcgtgacgagcgcttacctgcatgtgagaagtgcagagagcaacattgtcgccaagaagctgcatgatcaag

SEQ ID NO: 62876 - DNA, 687 bp, Arabidopsis thaliana landsberg
acaatatttccaccggacagctcgaaagggtatgacatatacctttggcgccgtgtctaaggaaacttgggagcaattgcgaaatcactctcctcttttaccatggaacaaagttatttggtttaaggaagcaataccaaaattctctttcattacatgggtagctatgaaaaaaagactgcctacgagggatagactattgagttggggactttccgtctctcttttatgtgtgctatgctcatcagcctaagcaaaattaaatctaatcaaaataaaaatatttacttaatttataacaaattataaccaaagtaacattgaattgaataaaaaaatagtaatatttattaaaaactaaaatgtatatcaaataacatttacgtttttatagatttcaaaagtaaattaaaaataaaattaaaacctaaaaaaaaaatcgaataaaaataaaaatatttacttaattgaacaaattataatcaaagtaacattgaattgaataaaatattataatatatattaaaactaaaatgtatatcgaataaaatttatgtttttataaatttgaaaagtaaattaaaaatcaaaattagaaaaaaggtaatttagattacctcaccatgtggtataggcatatggtaccaatattaaaccctgataagaccaccgagtcatttaccactt

SEQ ID NO: 62877 - DNA, 1791 bp, Arabidopsis thaliana landsberg
atccgtcgtcgggtcggtgtttgtttacttttccccgcgtcattgtttttccaatgttacttcaagaaattaaatattttacgcgtagattcatacactgctttaaaagttcgagtatctaagataaaccacacgaagattcgatcaaaaccaaaaatctgataaatacgaattttcacccaataacatgtaacgttcaatattattttcgattaaaagatccacagaaagttattttcattttaaaaaaatcaaaccaaaaccggattcattacatcccggttcagtttaccacgaaatttaacgcagataggtaaaacataagccagttggttcaatcatcgtagccatgaattctcaaactatcttaatgctgaaaaatacctaatcttcagttaaagcacaaattatcgccaggaatcaagtttcaaaatttcatccatatttcaacattgcaaattcattctacggctttgtaataaggacggacttttataaataaggaaaaggagaatttacagactcttcatcaataagatcctctttggataatcatatcaaagaatgctctgtatcatttacagactctttcgcttgttactgctataagtatcaatggacaatcgtttctcttgtttcagacacaaaatcttgctgtaataatgttctcccgataataaaagcagaaacacatataaaaaaacgatcagacgaatttaccaattgcacaatgatgtgcctctccatagatctactccatggaagagaagatttccatgaagcaaaattgtcatggagaggcaaaatcaatcttgtcatcttccgacacaaatttggcacagaggttataacctatttgctttaaggatgacgaatctcatcagacaccagaaaacagtagctcagagtgttaaaaaaacaaaactaacacaaaaggttatgatttgatcaacgagcttgattcggacatagataaatacatacgactatggaagtgtaacctcctcagagcaactccatggaagagaagagttccatgaagaaattcccatggaggcctataaaactaatcttgtcatcttccgacacaaaattggtacaaattataacctatcttgctttgttagatgacctcatacaagaaaacaccaacacaaactaagatatctccgccactgtaacactaaaccctaaaaactgatatggaggtaacggaagaaagaaaaacgcaaagtttatacagagaggtttagggcaaccgatggaactaagcacaaaaacgacgccggttatacaactattgggtttagaatgttttaatttaatatgggctttatttatagcccaacttatttctacggtaggtccaacctttaaaaggcctatgagttgaagaaaaaacaaggctccagtttaacacatttgggtttgattttaccgaaatattttaatcgcaccaatgcacatggtcaaagccaaatatgagggaaattactttcaattatattgaacctgattcgccaaaagaatattacaacagtggcgatcagatcaagatcaagatcagttgtataaatcacctctatacattattaataaatgcttgagagactaaatgaaaatgagaatttacagattcctcttttgaaaaatcaaaagctcttgtttaaaagctcttcttcttcttcctttgcttattcactgctgagtattatcaatggtagtgtctttaccagaggatgttgttgctgcttgtcttgtttcaaacacagagagtcttctagatttccc

SEQ ID NO: 62878 - DNA, 783 bp, Arabidopsis thaliana landsberg
aaagaaaaaaataaaaaaaaaaacgaaaagtaaaaaaaaagaaaaaaaaaaaaaaaaaaaaaagaaagtaaaaaaaagaagaaagataccgtcgaaacggtaaaaataaaagaaaaaaaaaatagaaaaaaaaaaaaaaaataaaaaaaaaattaaaattaaaaaaaaaaaaaaaaaaaaaagataagaaaaaaaaaaaaaaaaaaaaaaaaaaaaaaaaaaaagaaaagaaaaaaaagaaaaaaaaaggaagaaaaaaaaaagaaaaaaaaaaaataaggaaaaaataaagaaaaaaaaaaaaaaaataagaaaaaaaaaaaaaaaaaaaaaaaaaaaaaaaaaaaaaaaaaagaaaaaaaaaaaaaaaaaataaaaaaaagaaagaaaaaaaaaaaaagaaaaagaaaaaaaaaaaaaaaaaaaagaaaaaaaaaaaaaagaagaaaaataaaaaaaagaaaaaaaaaaagaggaaaaggaagaaataataaaagaataaaaagaaaaagaaaaaaaagaaaaaaaaaaaacgaaaaaaaaaaagaaaaaaatacaaaaaaaatgaaaaaagaaggaaaaagacaagaaaaaaaaaagaaaaaagaaagaaaaaaaaaaaatagacagaaaaaaaaaaaagagaaaaaagaaaaaataagaaaagaaaaaaaaaagtaaaagaaaaaaaaaagaaagaaaaagaagaaaaaataaaaaaaaaaaaaatgaaaaaaacaaaaaaaagaaaaaaaaaaaaaaagtgaaaaaaaaaaaaaaaaa

SEQ ID NO: 62879 - DNA, 1640 bp, Arabidopsis thaliana landsberg
agaaacaccttaaagtttttctttctgctctacaaaaaacaatattccacaagtagcaatgaaaaaaacaaattttatgtggtcatacattttttttcttcttttcaaacttctttttgtagatgctacacaaaggagagatagatgtaacaacaaccacaaccatagtatgctttctccgcttctaattattattggctaccgttcgttgttgttgcactactaacaccgatgttttgctcggaaaatccggcgaggccaagaaatcaccaatgactccaagctcctcaaactcacaccaattctctatacctttggttgcctcgtggttctcgccgcatgttcttcccacgacgaaaagatcgtaatcgaaagccatggaacgtagaagcattgacgtatccgctccatccaatatctcttgttccaaataaattgttgatgtttcttcttttaccattccggcattgttgcttttaatcaactctcttagttccaccgtgtcaagcatttgatcccatcctgtcgcgtctttgctctttcctgatgctaggaggcgtagaactgttaatgttacgttctcttgacgggccattcgcttcgcaaaggccaaagcttccctatcgtcttttcctcccacgaatattacacacacctatcatcaaatagcttagtgtgcttattttttctatatatatagctaaagcatctacaacgaccaacatggaagcatagtagatgtaattgtaagtataccttaaggctttcatgtggttcttgcttcttgttaacgagatggcgttcgataagaatgccgacagagcaaggtgcttgtttcaagacgttgacattcagaaatcggatcgcctcaacgtcggatacgatggatgttcggtcaagtgaccaagtccggtgaaaaggaagaatgataagcgtgacagctttatcaagagctagccaacaaatgtcatcctgcatatggtttgcgtttgcgatgcaagtgaatgtgtctatggaaatggaactgcagacagaacggtggaaatgttcaaaagagaggatgacattttcggaatatttatttccagccccgactccgagtttctgaactttgtgtgagatcaaagtgggaacgtcttgacctcgtaactcgacgaggtgaaggacgtagcaagtgagaggactgtcttcggattgataagaagcttcaagaaggttgatcatggaagatatgtggtctggtctatggatgcacacaagagtctttagctctcccatgttcttcatactcgctaaatttctcttttggtagcatatgaattgtttcgatgggtcgtagagaaacccgatcgccattggtatgagcagagagttgaggacaatggacaagactagaattgagaatgtatctttggttaccaactgtaccaaatcatcaatcaaaagaatcaaaacaatgaatcttttcaactttttgtttttggcaagaaatcataatcatgatcaagaatcaaaatatgagaaaactaaccttgaggcttagagagaaaaggtagaagctgagttcgataatacccttatgagacattattaaagcaaggataatagagtctctcaacggcattttatagaggtaagga

SEQ ID NO: 62880 - DNA, 753 bp, Arabidopsis thaliana landsberg
caaggtctctgcctacaaactatataattcaaaacatattagatagaaaagtcagtcttcaataaaatatttattatatgtatatatgaggtatgagatatagttttttgtcaagagttttaagaaaaaatatctatattcaaccgaataaccattaaataacaagtcttaatcattaaaatgcttacaatattttcatatttttacttaagattttactttttgctaccttgcaagttgcaaaagtataattaagtaattaacagtctagtttttgacaacaagaagaaattagcattctacattgattcagtgttcaaatggagaaaagtttttttaaaatggattggccattttgggtgtataaagaatatagtacagcctgaatgatagacccatctttgagaaatgagagatgcaagtgggaaatattaatttcaacggtaaactcaagagaggtcacgtgtcattaattcagtggttagcggctaagtactgttacaattatcctcaacgccgaccaacttctggttctctacatgtatattcgctatcatataaacaaatctagcaaaatacgactaacttagtaacttgtttcgattttgttagattactattacatagtttggattctcgtttattaacaaattaccaaatatcaaaaacatttttcgttccagctcaatgactaaaggtattgaaatcgagtttaagttcaatgtgggtttcaatcattttattttatttttg

SEQ ID NO: 62881 - DNA, 772 bp, Arabidopsis thaliana landsberg
  unsure (1)..(772): unsure at all n locations
gtacaggaagatgaagaaacagcaaaaaccttgcatgccatggaaggtgattcatgatatatatatatatatatatatatatatatatataatcatacgctaaaaattataccatttctgtagggttttaccatcacttttttttttggttagctatagctcatttataattggactttaatatgcacaagattttttcgttgctttgcaattgcttttttaattattaatgctaacgttcttttataattttctatgttttcttcaatctgtagaaaatcctccgaacattcctcagtccgatgttccttcggtaattccaactctatacaaggttcttttatataaagtctttcgtttgaattacttattctttctaaaatttaagaattgacacacacacaagttgttcatggaaaaattgattaaatttggcaaaaaaattgcttttaactaaatttcagactagtagggacacaagtggccttaacgatggtgataggcgtcaggatcagcctacccttgttgttaaccaaactgctattgagaacaacaatcccggaaatgggtcaggagaatcaaccgaggtagtcaataaagaaggattaccagaaaatataatctccgggttaccaactcaaaagtacagtcgcaaaacttggtggtggtcaaagaaaacttttgttcctgatagaaaagagtaagatcatatcttttaatatctttctacttgtctatatacttgnggcttcaaattctgtatcgtcgttac

SEQ ID NO: 62882 - DNA, 554 bp, Arabidopsis thaliana landsberg
  unsure (1)..(554): unsure at all n locations
acgcctgctgtcctatccttgccatgataattttcatatatatattttttttggtaaagtcttgatttttttttattacaatttggctaaatttaccgtggcaagacatgagatagatcatatattattcattttgctgagaacgcaacaaattcattttcaccaatctatgcatttcgattgaaggcttgttcatgattgtctatctaaaaattagtaacatttgtttccgctatgtacagattcactagaattgatgttgctataatgctatgattccattatggaataaaaccataaaatatttattttaaaatcaaggataatatttaaattatcatagttgtccataaagtccatgaccatatgattttacgatttatattattcagcaaatgaatattgtttctggtacgatgtgacacggcaagttcaagttggccattctttcgtgcgattgttaaattataccgatctcaacanagacataggaattgtcaagtatctttatctaatattttaaacgtaataccaattgaaaacaaagtcataat

SEQ ID NO: 62883 - DNA, 531 bp, Arabidopsis thaliana landsberg
ggccgtcagctcggccgaagctgctcgttcagcaactcgatgacctggtcgtctccgcgcatcccctctctgagctatcggtaaccggaaatcggcggaaggtgacgggtcaagtcgcggggcgagtcgcggcgacgggcgtcaggcggcgggtgtcaccgctgccgggccaggccggacggactcgccgagcatgccccggaggcggtccttgcagatcccgcacttggtgcaggcgcccgtgaccctggccaccgccgcgaccgtggcggcaccgccatcgatcgccgtggtcacctcgtcgcccgtgacggcccggcagatacacgcgaacacgccctcgtcgccccttccggccagttgatgataggtaaggctaacctaactttcactgccgcgtccacagtgacgcgagtcacgttgacggccggcgtccgccggtcgccttcggcggccggttagccgcagttggcgcagcggccggtgactgcgaagcggtgagggttgatcgtgagccgtaatggtcgtgcg

SEQ ID NO: 62884 - DNA, 712 bp, Arabidopsis thaliana landsberg
cacaactaaggcggctacaacctctttaatttgttggattcgcatgacttttatcaaaatacatgattttagaattctttttacggttttctatcttcttcgtgttgaaaagacaaaggaagtgtactttttttttttggttttaatgttaagacaaaggaagtgtacttgcttttaatcaacttttatctagttttaggtacggcgatggaagtcttactagttataactctctacgattggttgcaatttgaaatatgaaaaacatgtggtgcgacttcatattatactcttttgtatctctatttttaagaggtcgtaatcctaatactgtagtttacaactttttgcaatttatgaatttaacattttagtagactccaaatcaccggtacactccaaatcactactgggcttgaaaatcatggatttttacggggtttaagggatcttattggggcacagtttaatgggcattaactatttcttcttctttgggctttgtaagccgacgttgtttttttgttttcccttttcttttcgttttttttagttaaacaaaaaaaaaacaaattgaaagctcgaagcatttgggacgcaacacccgtcaggttcatgataataattggaggtaaatggaaccacgaaaatggaatataattcttctgttatgttgaacgatcagcgaagccatgggaagaatattaagtaa

SEQ ID NO: 62885 - DNA, 518 bp, Arabidopsis thaliana landsberg
gttttggagtccaatatgactcgatgtcctctgtgtgatcgtgcatatctacgtaatccacacccctctcttaacagccttgcacgtgttatactctgttccacgaccctaaagactccctgactgatactgcactttggttgccccatgaaagctttgaaaatctgaaatagagttgcaacgggcgtgggctgctaatgtgacttgatgccatggcttcgattgcagatccgaattcgctctggtactccatcttagaagcgctacagtcgaattattggacgaccacaccagctcgatgacgactatggactttggctgcactatgaacgcttatcacaaacatgaccaaggttggtgacttgttgggaccctactgttacttgaggtcacgcgtatggttgaagctcacaacttaaacccagtctaggtcttaaaagcctcaatagagcctacctgatacagaacactaatgcagcgactcacctggacacagactacgcctatgacaggtttga

SEQ ID NO: 62886 - DNA, 1062 bp, Arabidopsis thaliana landsberg
  unsure (1)..(1062): unsure at all n locations
tagcaggtaggtacaaaataaataatatgagctttctttagcgcggcagtttccaagtcggagaaggctaataataataaatggaatgagagagcagagggaaggaggattttgccagattgcaaaaatctcacaacgacgacggtgcagaaaacgccattaacaacgattacaagagctgttgtgcatttccgattattgaaaggctgatttgtccacgaagagagagagagagatactaggagaaattcgtcgcttcccctggatctccttcttggggtttatactttatagggcatccggagctacgcacgtcctctgaggtatgaaatttgtttgaatgccggctaattttacgcttccggatgtgtaatcgtcgaatttgaaggtccattgtgagtcattgtcccttttttataaatgattatcggctatcctcctctcctcacccaagcttagaggttcatgctatagcaaatgcatgtcacaatttccagatgattctgttttttattaaggggctaaatgtaatttggattgttgttgtttggaagcaggtaggtaggtgtctttgaaacaaggacgaataattcactgcacatgtgattccttgagagagccagatcgaactttctacagaagaggctgtgatatatcatcttcttaagtcctcccctcttcttcttcttcttctaaggtaattattcatttcattcattagtttatgttttgttttctagcaaatgcaattataatatttatagcctcttaattaggcaattgtaatttatgtaacaacactttgacagactgctcttataggggaccaattatctccatataactccaattcctctcctccttatatctttttttattatttgaagcttgcgtttgtctctatctcagacacttctatgactaaggaatcttggttttctgactttgctttggaatttgactggactttccagctgcaatcattgacttgttgattacaattattcgngtttgtctctcatattacagactttgactctatctctctctctatatatatat

SEQ ID NO: 62887 - DNA, 535 bp, Arabidopsis thaliana landsberg
taaaggcatctcatgcagagtcttgtccaactgagagaaaaagaacaaaacaaaatcaataaacagactggaaacatcatgctcttgctagctctcaaagttaagaacttacactagaaatgcactccttcgcaatccctacatccttcttcaaactctgttctcgtttctttgcttgagctagagccgagacatatgctgatttctctcgcatatgtgttaggtcagactcatccacagaggccttaatctcttcatacttcgaagacaattcgtttttctccaaaaggagaagacccatgttgtgttggtcatcataaacctacatgaaagttaagatcaatatagcactgccaatagattcttctgatgaaacacgcaagagaataaactagcccatacaacaatctcaacctaagaggaagcaaaatcgaatctttaaaggtcccaaagcaaagcaatgactgcagtacaccaattacatgctataaaactgtcaggattgacccacgagcgtaacggagatgactgaaac

SEQ ID NO: 62888 - DNA, 1420 bp, Arabidopsis thaliana landsberg
ctttagcgaaaagtagtgtaaatttttttccctgttttatgttgttctatagacaaaaaaaaatgaagatatcatatcttgtgggcctatatccaatatttgagtgtagcccatatttggatcaaacatcacgtcttacacaatggttctcggatatcccaatctgcgtatggttttaggtcaattcaacatagtattattttgtcaacaagcaccattatagcaaaaacaaagatgtatcaaagaaaagtagcgttaggggttggtcagaaaaagacatgtttgcagtgtaagaaatgacgtggacacgtggaatcatacgcaatgcaacatgtcatcattaaggtccattgttcaacttacccattgagaacaaaactagaaaaattatagaccgttggatcatctttaaggaccatgtctgattcacgtatctctctcccacttggaatatgcttagcctatgtatgggacacattcgctaggtccaccagtctcctgtacgcaaacgcaacatcgagaagcttccgtttccaatattctatactataattacaaatgttaaaaattgtttataaaatttgtaatttgacttgtagacatcattagggtaaagatatatcaagaaattacttttttcataggaataaaaatagtcaactctcttaaataagggacaaatacaatcctctaatgacctggaaaacaactatgcaatcaacattaacaaatgtaattagaggtacaacacaatcaattttggttaaaaaattgaaagtatataaaaataaaaaaacaaaaaacgtgtcttagttgataaataactcattaatcacgcctctatctctctgttttaagagtttaacagttaaagatcttcttctctatcttccttatttgactacatctccgtttattcttgggtctctctctatctctcttatccagatttatcatcgtcattacatataaacatcaaacttaacttttcaatattctcattcactttttcctcttgtgctctaattcttatccggatccgatttctctcatacaaagattctgtttttcttcttgggttattgttcttgctctgtttccgtatctcaaagtttcagctgctgaattgaatttgcattgatcgtagatgagaccaatcattaggttatcatctctcagtagaattagatgggctctaaggaacaatcaagaacgttattcttcaactttctactccaaaagccgcaaacttttgatcggtgtcaatcaaaatcaagctctgctgaatacaaacactgataattcaagtttgtattcaaggtcaagtatctttagaggcttatcaccagaagcagtagaagcagctgatcctgctaaaactagggtcaccgtctcaggttttgtttctctttgcgaagta

SEQ ID NO: 62889 - DNA, 515 bp, Arabidopsis thaliana landsberg
tgccattgctgatcccaggaaccgcattcgccgcagcgaaacaccgccggccagtgccagcgaccgcagccggcgcaacgcggcaattcgatacggccttcggacagcgcccgccaatacgggccatcggctccggtcgtggggcgccccgctgatttggtttcgctcatgtctcgttctcaggccgtggcacggatgacatcggccgcacgccaggccatcgccatcgtcggaccattggtgttgccggacggaatctgtggcatgaccgaggtatccatcacgcgcagaccttcgacaccgcgcacacgcagttgtggatcgacgaccgagcgctcgtctttgcccatgcgacagctgccgacggcgtgatagccgcagctgccctgacggtcataggccgcaatgatgtcggtatcgctttcgcaggccgggcccggataggtttcgacgtcgatgagctcgcgcaatgccggttgcgcggcatatacaccggcgctgcgtaccagcgcgca

SEQ ID NO: 62890 - DNA, 524 bp, Arabidopsis thaliana landsberg
ttcaagagagagcagatctgagaaagcagaggactccaacgaagttgcaacacaactcgaattaaaaacccctggatctacttctgataaggtagagagacttaaaactagaagctagagatctccaaaaattttcggatttattatcttcacagttatttgcgaaattgtattttgaaggatacattgcaaaggccagagaagacaaagagatgtaagagaaacaacaacaacaactcaatagaagaaagctctcactctacaagtgttcatcttcttcgagcgtacgataccacagttcttccagtagcgtagctggtggccaaaaacctgatgatgcaaaatgattcgaaagaatctgatgttgatcatctcaagtatccaagtatcgtttcgatgagtactgtttatagtgcgagtacaaaatgcagttagcttgttaaagcagtgttttgatgcaccgtggcattcgttttcttcgaatagtcatttctcagatgattttcatccctaataggtctgct

SEQ ID NO: 62891 - DNA, 1697 bp, Arabidopsis thaliana landsberg
  unsure (1)..(1697): unsure at all n locations
tttggcattggcaaattcaccagatcaacaggcttaattactcactggatgacagaaactggatgttgctgtttagtatgtccccagttaccatgcttatgagtggtgccacttaagggaatacgatagggacatgaaaatcacatttaaaaataaactgaaagggaaagcacttaatagacgattagtttgatgatattgctaatatgtgagaatgatatgtgatgtaatatcatccatttgtcagttatgtttagatttggtcgaccatagatgttaagattaaggttatcgataatctttcttactatagagagaacagattataagcttgattatatcatttaagttattacaatgagcttaacttgcaggaataacttagtacagcttgtattttgatagaggaatgggttgttagagaattgtcagctttattcctgtagtatattaaaactacatgttgctgttgttgatgatgtttatgtattgatcttccattgtagtctgagatacatgagcttttggcgctggtctactatgacagccttcagagtgttgtgccgttttatgatcagcggtctgtgcttccctccaaggatgcaacatggacaagattttgtgagaactcaatgaagcatttcaacaaagccttttcacatcggtatagtttatttttcattcaaagtgtgttttactttggtcaattactaatgaggctgagaattgtttttcttaaaccatcctgtacagacaagattggtcacatgcattctacatgggaaaactcagtgagaagcttgggcactcgtatgaaatttctttatcctattataagcaagccatgacattgaatccgtcagccgtagatcctgtgtatagaatgcatgcttctcgtttgaagctgctaaatgcatgcgggaaacaaaacttagaagccttaaaggttcgtagttgacgctctactgttaatctctttctcatttgcagaaaaacaggcgtcttttatataacttgtaactaccgcatcatggtttcaaaaataaaatcatttgtaaaattcagtttcagctaaagatgttcactattgtggtccttaataatttccgctgtctcaacctttcaggtcctcgcttcttattgctttgatgaatctataaaggatacggctatgacaatcattggcacaacgacttttggatcctctcgtacactggaagaagctcaagatggaaacttggaagcatgttatgctaaatctggagaggggtcaattcagatggaaggggtatggcatatgctctacaacgacagcctctctgcacttggaatttgtgtagaaggagatcttaaacactttcataaggcgagatacatgcttgctcaaggtctgtacagaaggggtgggagcagtgatctgcaaagagcaaaggaagaactttccttttgtttcaaatcatcacggtcaagttttacgatcaatatgtgggagattgatggcatggttaaaaagggaaggtacagacacattcttacgcctgaaaanctttgagttattctttgaactatgagggggctgtacactgacgatatcatccnctgatgattggaataaccttctgagaaacattatgattaaattggatgactaatggtacccatcatgtaagttagctccactactgaaccatcatgat

SEQ ID NO: 62892 - DNA, 728 bp, Arabidopsis thaliana landsberg
tatcgttaagaaactctgtcccaatggaagtacagatcgactgggcgaaaacagaagcttcaagaaacgctgacgctggagttggagaattcttgatgaagttggtatccaatgaaagagagagattaactaggatatggggtttcgctactggtgctgatgaagaagatgtatcattatcagaatatcctaatcgactacttgccatcaccaatacctgtgatgatgatgatgataaagagaaatggtcgtttagtggatttgcttgtgctatttgcttagattcttttgtgagaagaaagcttttggaaattcatgtggaggagcgacatcacgtgcagtttgcggaaaagtgtatgcttcttcagtgtattccttgtggcagccattttggagataaagaacagttgctggtacatgtgcaagctgtgcatccttctgagtgcaaatcgctaaccgttgcttctgaatgcaatttgactaatggtgagttttctcagaaacctgaagcaggcagttcacaaattgttgtgagccaaaacaacgagaatacaagcggcgtacataaatttgtttgcaagttctgtgggctgaaattcaatttattacctgaccttggccgtcaccatcaagctgaacacatgggaccgagtctagttggctctcgtggtccgaagaaaggaataaggtttaatacatataggatgaaatctggtaggcttagtcgt

SEQ ID NO: 62893 - DNA, 1359 bp, Arabidopsis thaliana landsberg
gattataaaatagacctagtattggctgtggaattggttatagcaaaacaaacactttgttactatgaagatatagttttataggatttggtatatgatgttttagtttctgctgctagacttttgattgtccctcttgtttgtttctccatcttcttgaacatgataaaacatgtttacatgaattaagggctgctactgaaattgcttatagttcgtttgtgtactctctgccgttctaggattctagctgttgttatcacttttagttcaggattctgaaaattttctcttttgtttttgattatatagccctgatgggcaacagtttgaaacctgcaaggaagtctccacatatctacgatcacttcttgaatccccaagcaagaaccaacattattacttgcaatctgacaacaagactctaggacaacaaccagtgatagctaacgaatctttactaggtaactctgattccatggactctgagacaatgcagtaccttgagagtggaagaaccagcagtgaggtgtttgaggaagcaaaagccgtagagaatgcaatgaagcagatcgagtgaaaaccagtctgatgcagaaagatgataatgcagattttctgaatggagttgaggacaacgacgatgatatgaagaaaagagatggtaacatggagaatttggcgactctatcgaattcagaaatgacgaaaagcctaccgacaacgactaatgagcttcaacagtatttcagctcacaaatcaaccgagttcagtgaccatttcttttacctggaacaaattgttttctcattctagttcagattttatatttcatgcaaactaaaagcgtgttgtagctaactacaggatatagaatttgaaagggccatgtacaaaacatttgacagaaaccaaattttttcttcaaaagaaaatatctttgagtttcaatctgtgattgatttggatttggatttggattggcataaaaaaaatctatgatttggattgtgttatatattatagaaaagaacacaaacccttaaaataatggacaagaggacatgtctttctccgtttatcacggtcagcgtcgttaaccttttacgttattgactagccaaattcttcgaatttgatcggggtttaataagaaacatatattagttttaagttctttctgtgtaaaaactaaaccctttgggctactttataatttataaaaacttatgttttctgagtttttgttgactaaaaaaaaggtagaatcccaacgggctggatataaatacccacttatggagaaggattccttaggggtttaactacctaaattcttcgaaaaattcaaatttcaa

SEQ ID NO: 62894 - DNA, 1171 bp, Arabidopsis thaliana landsberg
ataacgtaaccaacctttatgtttggccacaatgataaatcacatgctccaaccaaaacagccccccaaaaaaacccaatttatatttttttaaaagtgagcttataacgtaaaagaaatatatacaatgctaattttcttacaactggttaagtgttaaaagatatgtttaggatcatattggtatttggtaatcaggttttaacatttgaaatgattaatcaaaaaataagttgcatagaaaatgatttaaaaaatgactataaacaagaagtaatttcacaaaccatgtaacaaatcaaaaccttaataaatcatgcatcaaagttggattagaaacatagcttaatggattatatacaacattttcgtttaaattagacacctagaatatacatgttatccaataatttaactttgccatctttttacccttattgtattgtgtgtctccatctacaaatgtccgtatatttcaaacacagagagggagagagagactcttgtttaaaaaacttacttcttctcctgaaaattgagaagacagacgtagagaagaactaattgtaacaaaggttctaattttcccagctctgattactcattatcttacatctctttctatctattgtcaaattcaaacccttaacccaatgtttaatcttttggatcctaacaaacatttctatggtttcgtttccaaaattataaaagagctaactttttttgaaattagtttcaaatttttggtttttcttcttcttaaagattgttgaatgttacttttgatttgcaggtgttaaagaatcatctagagtactcgttgaaccatttccatggaaggtaacaaaatttcattatttggtctaatttctcatgaaagttgctacctttttcgttctggaagatctaaattagtgtttgagttacaaacgcagaagcaagagaaagcctttacgaggaaatgggttgtttcgatcccaacactccagcagaagttacggtggagagtagcttctctcaagccgaaccaccaccaccaccaccgcaagttctgggtgccggaagcacaagcaacagcaactgcagtgttgaggtagaagagctctctgaattccatctcagcccacaagattgtcctcaagcttcttcaacacctctgcagtttcac

SEQ ID NO: 62895 - DNA, 589 bp, Arabidopsis thaliana landsberg
agaaaaccactaatccggcttaatttttcaaaagttaattattctctcgaaagtttagataaatttgagagaaattaatgacttcaaggataattactttagttatttatttgtttgtttattccatttgtacacacacacactaaagactagagggtagcaagtagttaccaaaattaattgcattggtcgtgactggtgggagctttccgtttgggtctatctaaattaaattgaaacagctcactggacatgactttgcatttgagattaaaagaaattaattttgggaaatttcaaaaatttgaaacctaaagaatcgaaatcaaacgaataatggccgttgaatcacgttgcttgtcatgtaccctctttaacaaaacaccaatgaagtgttgccaatatccatcgcccatttctttttgttccaatccaacgtacattttctaattcttgtttactcttctttcgggtgtatttttataataaatgaatatgctagtcttttgttttcttttccaatatttttttattataaaaactaacattaaattcgataggttagttgatgaattttacgagaaaacat

SEQ ID NO: 62896 - DNA, 737 bp, Arabidopsis thaliana landsberg
gcaacctttaactcttcccatcaatgatgaatcttgcttctgaaacttttccaaaatggctccatatctgcatagatgagaaactcgcttagtaaaatgtaaaaccgccatgtaactatgtaagcacatgaaaaaaacagagatattaaactcacgttaaccacccggtgttgctgaaggtgtgaaagacgagatttttcttttgctcttcatccaaccaatcagccaagtgattaaccagcgactcgatgttcttctctgctttccctccaacttgataactcataatctcattcatcggaagagtaaatgtaatgacatggtaaccctttgaagtgtaccaatcagcatatttcttcagatgcttctgctttgatccaagccatccaagcaaaaccacaacagttctattcttttcagacacacaactcgaagaaccagacatatcgactgcactaggctcaggtaaatgccatctgtaggaaatatcaggaaccacaagtgaggcaccgattgtgaatgcaaccggtttcgatgctttagccaactctgcagactgataaacactacgaagagcggacagagaagtaacagaagtagcgagactacagctaggattagaagctaggagatcaacatttggtacaggaacacaaatcctcgacacaaaagataaatctgcaagcttggaggccgagacttgagaaacccacaaggacctttcttcctgaactaaa

SEQ ID NO: 62897 - DNA, 506 bp, Arabidopsis thaliana landsberg
ggccttatccatagagaatatagcataaagatcatgaacggcttttgaatgtttaagacaaagcaagctgatatatgagagctatttagtaatttgatatgtatgtaatatatgataaatctttgatgcaatatattattatgattattagatatacactagtcaactttaactttagaagattaatcattccggcgcaaaccataccataaattagcaagggatcgacttaatatctgcgatccgctatatatgtaagaagcattcagattgtggataatacatgtcatgattttataattatgtatatataaatactaattgatgtatgaagtacgtagataatgttacgagctatgaatctatttacattaactgctaattagtgttgagtagggaaaattaacatataaacctttagcagttggttggattattaaaaataatgtgaacttaaaatccaccttggaaacgataaatcaaacaagtataaaaaatgctatgaa

SEQ ID NO: 62898 - DNA, 625 bp, Arabidopsis thaliana landsberg
cgttgagcggcgtctgcaccgcgctgcgcggccacgaataggccagcttgccgtggtagtcgtactgcaccttgccggcggcgttgcgcagcagcacgtgggccacgccagcgccctgggaaccgggcagccaggcggggacgaacgcgttcgacgcgttgatctgcgggttcacccacaacggccggccggacaggaacaccgataccaccgggatgccccgcgcgcgcaggcgcctgaccaggtcgaggtcggtggaatcgcccggcgcgaacgccagcgtgggcacgtcaccctggaactcggcgtaggggttctcgccgtagaccacgatcgccacgtccggcttgtgcgcgtacttgccatgcaccgacagctcgggcgcgccgccggccgcctgcacctgggcgtggataccgctccagatcgattcgccgtgcgggaagtcggcattgctggtgccggtaccctgccaggtcagcgggcagccgccgctctgctttgggatgctggccgcgccggggccggccaccaggatgtgctgcttcgggtccagcgggaagcaggtgggggttcgttcttcagcagcaccagcgattcgcgtaccggacggcgcgccagcgcg

SEQ ID NO: 62899 - DNA, 1199 bp, Arabidopsis thaliana landsberg
tcttcgttgatttgtcgttcttgtggtcattagccaatgattggcgtcgaaattttggaactggaagcttttcaatggctgaaatgaactttcttaagtgaggtaagtactcaggagacatctcaatatcagaatggcctcttcctttaagccataagggttcgtatttttctttgcatagtccccataaatgttttccatgtgaaatattcaccacatcgtcatctgttccctgcaatgcacgcaaagagaattataccaagttgttactataatatcgtataaatataataagaatgagtatatctatattgcaatgaaatatacttacatgaattacaagaacaggacactccacgagatgaattttgtcaatattctgcaataagaaaactctgattagttttgcctaaacaatgtgattatgcttagtttggggtatttagtaaaatcaaggaagatatataagaacaaccgaaccttgtaaatgtcgaacgggaaggagtgcttgacagggtacataacacgtagaccagacaagaaaggactatggagaacaagtgctcggagacgtggaagacgagaagcaagctcaagcgacggtccacttccaacggattgtccatacaaaatgatacgttcatcttttgtaccgtaggtctgtcttagccaattgtaagctgcttctatgtctgcgtacgtatcttgctcgcttggctttcaaaattacgatccaaatcacacacaaatcatacactcaacaatgaatgtgatcttcttaattacaatatggagctgatagtatttttctttttgcattttgtggtttatatatgatacacgaatgtatataaaatggacgtgctaattagtcccaaaagaaaagaataaaaaagaagaagaaaacaagcgtgatttgaaataatcgacttaccttaccagaagattgcccatatcctgaataatcgtatctgcaattatcatcacacaaaaccatatattatttatctaaaaagaaaataatatttaaatgaaattctgtgtcttgcatttaaaaaaaaaaagagaaacagcgagctaagaaatttgaagaaatgatctgacttttgggattgaaaatgaatttggaatcctatgctaaaccgtaacctaatcttgtctcattctcacaagaagactctagaaaccaaaactatccc

SEQ ID NO: 62900 - DNA, 401 bp, Arabidopsis thaliana landsberg
ttttgttatgcactgtcgctacatgttgggttgtgtctgttgttagaaccgtagaatgcttatataatagtggaggtgcaattcaatgacaagtttaattgttcatctaatacattgtcaacactatggggaatatacctaaaacatcaacaatctttggtttaaataaaaatgtttggttttaatctaagtatatctaaataaacaccaaaacctcccaaaagtcaaattgtgtgtatatacgggtacaacttagaaactaggaaaatctttatgcaattttttattaggggacccacggtatatatgtaccacatatgttgtatatgtatgatatataactttttggggcgccatgtgtacccatgaaatttaattgacaacaccatattctttgattg

SEQ ID NO: 62901 - DNA, 520 bp, Arabidopsis thaliana landsberg
tctgtttactattttaacatcaaatgcatggaagtataatttacatgcaggaatcaccctccactagtattccattttatgaactcagagaactccattcagagggtactacatcaattaaatattagtaatgagaggcaaagaaaggagagttaagcaatgtagcacaaattaagaagagaagcagatttaggagccctgtgacactcaaacccatatttgggcaactggcatggacttagtcttaaaacataggaagactagggaaaggctgtgagccatgcaggcagatcatggtcatctcagttttgtttttatagcgttcttcaatctggtttccataaggtggtcacagctgctccagggttcagttcttccatcacagataagtgttgtcattgggagggagatctgggaggtttgatagtactgggggcgtcttgcttctttgccatatagatgttaatggagcaattattctgtttctgcattccaagaagactgtggggttgggaaaatg

SEQ ID NO: 62902 - DNA, 1576 bp, Arabidopsis thaliana landsberg
caaatgtggctataatcgtaatacggtgacaccgcatacatagattccgacttagacgggattaatcggcttatcaacctccttcagttgagtcaatgtgttgtacaatgtcaaatccggtttctccacctccatctccgacatctttccgtcgcttggaagaacttctcaaaaactctgatcaattttcacttctcccgggtaaagctttcacgagctcaattttcaccggcggcagcgtcgaattttgtttaggaaaatataaattgcttaaatagccctagatttttctaagatttccatttttctatataggaaaattatatatgattttctgacccccaaaaaaatatatttgactctaaaacaaaggaaataaaggaaattgctaaataaccttgattttagaaagatttccatttttctatttaggaaataatctatgattttttgtctaccaaaaaatacaaatttatatggctgcgaatattattgactttagttgatctctgagatgtacaaagaaaatctcgtattagcaaatacacactagtaattaagtaaacaaaattggacacctcatatatcatcagatcactaaactcccacgtaaacacattaatagtcacagactcacagcaatattcttcatttgtggcccccgttacatttcaatccccaccacacaaccacatgtatgttttgccaaatttataaaaatgtaccacaatttggaatctctttacttggaatttgagtgaaaaccataagatgggttttagagcactgcctcttcaacacagcagtgggttcatctccacgaccaaagtatccatctcaagaacctcgcccaggattttccggaaccctagatgggtcgttgtctcagcaaagcaagagaaagatgaggataagaagaagaatgaagaggagacttcgttgtttactcaattaacggatgccttggacttctcacaagttcgatcggagaaagacgctgagcttctctacgaggctcgagaagccaccaaatctggtcgcaagatgacccaagaacaggttcgtcttcttttttaaccacacactgatgagttttgtatgatacaaattatatgtgatgactcgagttctaatttcttaacatgaataagaaattcaaacttatgatagtattgtataatcaaaaatcgaattatatgttttgatattattcgtaatgatatgcagtatggggcattgaggagaaaaatcggaggaacatacaaggacttttttaaatcctacgttgaaggtaaagtctagagaactatttaaattggaagaaagaatgatgaatttattttgttataattaaactgtgtgaaataaactgtaacctattgttttaaatacatgttatagtggatgggcaatatgtggaggagggatgggtggacaaaacatgtaagatatgcaaaaaggacacaaagggtgaggcaagacaagtggacaagttagggagatatgctcatgtctcttgtcttcaaaatcctccctctggaaatttcttaccagactcttctctaaaagatgatga

SEQ ID NO: 62903 - DNA, 641 bp, Arabidopsis thaliana landsberg
gtggcattcgcgcgtcagaaaatgacacgtgggattcgtcatgtggccattcactttcttggtccaagactctatcatccgttcccaactgccacgtgctcgaagcagagcaagttaacggttccaagaacatgaatacacgtggcatgacagctgaaattctgattggctttcacgtttatctacgccgctgattaatccacttggattggatgggccatcaccagctaacctttatttttatttttactttggtcgaagaacaacaaccatttttttccctaagttgttgctataatcggcatctatctttttgttactattattaattcgtctaattcttagcaatgacatctaaaaaaaaacaaagaaaaaaaattgtcttcttcgaatttattaagagtagtataattaaacaaaaaaataataattataatgagcaagtgcgtttgttttagatcgagagacacatttctacgttgcttcatcggattcctttaaataaaataaagttgggtaatagtatttctttactttatataaatggatcaatgggaaaacaaaaagttgttttaagttattattcttgtgtggggtaataaaacctcaattgatttattggggttaatttgaaaaaaaat

SEQ ID NO: 62904 - DNA, 1103 bp, Arabidopsis thaliana landsberg
aatcgcgttttgttctcatctgtttttattgtggtctgaagatttggattttgtgatcatctagtcataacaatgtccaaatatgatcaggagcttgtgctttagctgatgatctaggtttctatgtaaatccagaaaagagctgcttttctgttttttgtactttcccttgtaacatggtggaacgactaggatgtctacaggatttgtttctttattgatcttataaaaactccagttcatattgcaggagtttgatgagacgttttcttctgaagaagtaagcgatattcccagtgcccctccattttccggggcagcagaggaatctgaagaaattaaaccagcaacttcaagcgttcaagtttcagaagtcaaaacaggagattgtgtagaaagtagaaagactggccactttactaggtattctatttttagctcttaaatgaattgagttctcaatttggtaaactaatttcagtttttgcttctgttcctatagacctagtgcagcttctgagtcatctgggccacctgatcaacatccagctcggcttcctacttttcatgcaaggtagttatgatctaattagtttattcactgcttcagaaactggatatagacagatagaaaacctcagttatcttcactttgttcagtatacaagttggattctttttaatcactctgccaacattttttattgaaccctgatacagttctcgtgggccatggcatgctgtggtttcctatgatgcatgtgtacgactttgtctgcatgcgtggtcaaccggttgcatggaggctcccatgtttttggaaaatgagtgtgctcttctacgagaagcatttgggtgggtttattatagcctctttcttagttttcatatgtatttcttaaatttctctatattattgccgtgagtataattttttatttctttatgcaacctgaagttgaaggatggtttttcgtccacatgcatccaaaaatttactgaataacagatttgtatttgggttaatactgactaacaggttgcagcaactccttttgcaatcagaggaagagcttctggcaaagcgatcttcacaagctccg

SEQ ID NO: 62905 - DNA, 605 bp, Arabidopsis thaliana landsberg
atccaggagattatccaggcactctttctgctgcgcctgcacgtccggattcggattcttccatttcctatcctgttcgttccgtccccagaactcgcctggggcgatgcagttgcgccagggattgtgggtatcgaggaactcggaaggacagagccgcgccagctcctcctcgttggacagcccgccgcgaacgatcgggtggccggagaacaacacgctcgtgtccatctataacctctcttggggttgagaccgatgccactatagaccaatcccagaagaggggcaagcagagagaatcctatctctttttagacacatgcggattctctgcatgatagaaacgcaagggcatctccgcagctgtggatattccgatccggggagagactgcgatcacaggtacggggtgcttctttccttcagcaatgtacaatccattctttcgtacggacatatccgtaccatcgagcgctcgcgtgatgtgaagcgccgagcatatctttaccggcccattcgtaagattgctgagccgatcttatggcggcagcgcatcatctcactattccagatactggttcaagtgcgcgtatgagtactga

SEQ ID NO: 62906 - DNA, 137 bp, Arabidopsis thaliana landsberg
ccaaaataacagcaaaacccggagggggccaaacaaggataacacggcacacaccagcggcaaattattgcacccaaaccggccgcccggggaaaggggggaaacaaaaggaaaggaagaaaaccccacaaccgagg

SEQ ID NO: 62907 - DNA, 552 bp, Arabidopsis thaliana landsberg
  unsure (1)..(552): unsure at all n locations
cgatcaatggattgaaccagcacaggcatcgcagaaatgccgtcagcgcgttgatgcgcgcgtcctgccgcgccagatgaacacgctcatgcgtcaggatcgctgcctgttcctgcagggtgaaatgctcctgaaagccatccggcgtcacgatgcgggggcgcatgaaacccagcaccgccggcccggcttctcctacgcgcacggcggcagaaaagcgaagctgcaaccaggtcagatacaatgccatcaacagcgcccccaaggcccaggtcgcaaaaagcagtagcgcgaaatcgggcgttccatacaccgatgtcggcggcggtgccgtgatggcggnggacatcagcacgttttgcccggtcaggagatctgtaacgcgcaaggccgaatgggcgataggactggtagccgatatcggtgctgccggcacatgcaccgacgcgacaggcgcaaacgctcgtgcccgcacgcgcggtggaaacaggctngcaatgcttgcgatcggcacgagaagccagatcgcataaccgatggagcgccgacaac

SEQ ID NO: 62908 - DNA, 1808 bp, Arabidopsis thaliana landsberg
aaagatgaaacttttttttaacacaaaaaataagagcttttgggggaaaatctacgtgaagtaataataacaaaagagctttttattaagccgcaacaacaagcgtgccagagaaactatgattagtgtgttgttgttgttcctctctttttcttcttatgaataaaatagctttttcgttgatatattatttaatatttttaaagatctcagcgggcattatttatgggcatgcagtggtgtagaggaggaagacgaggaatataagctgcccgtaacggtgctgctgcccgaactgaccggtcaaaaaaacgggttcgggggagagaagagatggttgaaagtgacatcgctttgggtttggggtaaagtagttgaaagctcttaaggctatgcacccgtttctcctggtcaaacctctctctgttgggtcccttttttctttaagtagaaaaaccttttctaaatttttaatgcaagtaagattcgtaatcccgtatttatgaaagtaaagttaaaatgttaaagaggttcactatcatgtgagcaatctcataccaaaaatgtgaatttttttttacaatggttgtgaattttgtgattgataaaccatgcaacaataaagatattagtgtttgctgatattctttctaaacccaactttggcagagatgagattgaaagatttgagttttgtcaacaaaaaatttggtggaagaaactgtagagacggcaaagacaaaatttggccaagttccactgtggaagtagtatggcgtgcccgatatgactttactactgtttcatcacaataccattaaacagatacttgtcttatcatttaaaaaaaaaaaaaaaactgcccatacaatttgagtagaggtaaaaagtaaaataaaaagcagattacatttgttaccctttaaatatcacacattatgcttaccccatgtggtggatggactctttattttcattatgatcaaaaggtttctagaacaaaatttaattaaagtaaaaaagaaacagtcatttcagaaaatatttcaagataatgcttacaattatttatttagatattgtgagtggctaaatcagctgccaatgagtgaatttacaaacttttttataatccccaacattttttatattcatgataaaaatatgcttcaaattcaaaatttcacaaatcagaaataattctaaaaacaataagagctaccttgttatgaaagagaaacgaacttgaagaagattttatcaaaattaaatgaaacagtagaattaaaatttgcgacaaaaaaatacgcctcctaaatacaacgggataatatcctagtgcaagtggccaccgagcgtttcaactttcaaatccaggaataaaggtaagaaaaagaacaaaacaagagaaaacacagaatttacagaggaaagataccatgcaaagaaaaagaagacatggacgcaaacgccataatttggagaaagaacatcatctcaactagaaaagcagttacggacgcaaacgctgaacgctgttttacagattaagtgagttttcgccacatagatcctttggaagcagttaagcacttgactctcgggaatacaaatactgtctttggaggattaccatctaccagtgtgttctcatatatatctgtgcacgcttgtaccacctgttttcatcaccataaccatttcgtcaatttaagaattcttcgccatttgaaggcttgtaaccatagtttaaaaatccatgtgattcgctacaattataacccagcattttccaaaaaagagagttt

SEQ ID NO: 62909 - DNA, 491 bp, Arabidopsis thaliana landsberg
tcgatagatactccattgttgaatgcatcggtgtaactcaaataggtctttaccgacttctttctgccgaaactctgcttcagccgggtgtgttcttcttttgtttcagacaggaatcctgccttgttatccttattcagcagggcgcctgcaacggttacgcttcgtgatgcatccagcacatgtaccacacctgcctggtgtgccggtgctatttttactgccgtatgcatacgccaagtggtggcgccacctatgagcagcggcttttgcatacccctgcgctgcatttttttggctatatgcaccatctcatccagcgatggggagatcagcccgctgaggccgatgatatctgcattttctttctctgcggtttcgaggatcttatcggcaggcaccatcacgccaaggtcaatgatatcatatgcattacaacccagaaccacgcccacgatatgtttgccgatatcatgcacatcgtcttttac

SEQ ID NO: 62910 - DNA, 470 bp, Arabidopsis thaliana landsberg
gttctgggtttcatacagcagcaggcttatagttgtctctctctgtcttcccctatttattggagctggaggtagggaggcgcttcctttctctgatcatactctcatcagttaaccgagcacagactccagctggtgcgcaatgtcgcaaaagcaaatcctttcctgtccaagtaacggtacatgagctgcaggcgtcagtctcctgggcggcgcgcggtcagtctcttgtcttcattccctctctcctggatactcggtcattactgaccacagtactcctgtagtgtatgataatacgcatgcgatgcgaatgataccactgaaaattaatctctcagttccaaaatattagtttttctagacattgaattttatgtctatattcaaatgcataacaataaatctagatatatatatatatatatatatatatatatataatgctcaaatgactagcattctgggat

SEQ ID NO: 62911 - DNA, 349 bp, Arabidopsis thaliana landsberg
cggcgcgaactgcgccgacgcgttggggaacagcggtttgcgcgatttcgcagcatgccggacgccgcggtcttgaacaggataccggcgagaacgaccgaaccggcggtcggcgcctgcgaatgcgcgtccggcagccaggaatgcagcggcaccatcggcgtgttgaccgcgaacgcgacgaagaagccgagcatcagcaccatctggaccagcggcgacatcacgggcttcagcagcaccatgtgatcgaagctgatcgagccggtctggtggtagtggacaagcaccaggccgaggatcgccagcagcatgatcaggccggacacctgcgtgaagataaagaact

SEQ ID NO: 62912 - DNA, 472 bp, Arabidopsis thaliana landsberg
  unsure (1)..(472): unsure at all n locations
ccaattcagagactcattttgaaaaacaagaggcgaaagcctcgtcagatggagcnnnnnnnnnnnnnnnnnnnnnnnnnnnnnatgcccgctgaagcgtacgcaattcagccccctcaagttgggtgcagctctttccaaatttgctttggcaaagagaacccaaatttctctcgttgaatatattcgcaagcatcgcaaagtaaatcgaacgtaatgctcttgattcatacttcattgaaattgctttggctaagtaggcgttacttacgtgccaagacaacatactgtccgatgccgtcacaaggtttttagcaacgaaagccgacatattttcaaaacaggctttcgacgaacttgtatgcggtaagcagctcaagcaaagcatcgcctctggcacctcatcgctagcgattgatgagttaaacttctttcaaaatcccgtagaagctgagtcaggcttgctcctgac

SEQ ID NO: 62913 - DNA, 1450 bp, Arabidopsis thaliana landsberg
aaggagagagatcttctgcaggtggttcaattctatcgaaaccacgaatctttcaatgaagtacaaagcagaaaatttatgtatctcaacgctatgcccttaccaataaaacccatcttaaacacaaactctaactttgagcccttgaagttctaaacaagtataagtctgtctacttagtggatcggtgcaaaggacataaccagtatagagtataaggtctagggaaaccgaaaataaacaaccaaacagaaatcacgaggagattcttacctccaagaggagaaacaaacgtttcatactgaaccgaacagtccctagttgtcgcatcttctgggttttctgaatcctctggttgcaaccgaatgttagtcttggacgaagctgcttcatcaatgggagtcgaactttctctcacagtagcaccactgttgtctgctcgaagcaaaggagagagatcttctggaaatgggacaattaaatctttcaattaagacaattttaaccaacaaagccatctaaaatccaaattgtgcaacctttgaacccttttctactctaaaggcaggattctagacatgtatgagccaaatgagtcgttctctcaagatctaggtagtagggacataaccagcattcgaactagggaccaaaactaacaaccaaagagtaagtctgtgacggttcttacccgcgagagaagaaacagatgtttgatactgtaccaaagagtccctagtagtaacatcttctgagacatttttttccataggtttactattctcagagttctgcaatgtctcgagtaagacatatttatcagtcttccatacacaatccaataaggtgacacactcttcttcctttggatagaactcgcggaaaacctgtattaattccaataaagaaaacagagtttgctgacattttcattgaactatgtaaaaaatctaaaccaaagaagcttagaccaacctcaaccccgtcctgtgctatcttgacagactgtttcttcagtgatgtagatgtcaccgaattgaaaactgaaacagcgtcaagtaatatctgaaaccaaaacgatgagaaaatcaagcacattatgcagactacgtttacactaagatcaatcacagtgtgtaatttattagatcatcgattggagccttacttgttggaccaatactcggagacgtgcaagcagcgccaaaaatgtcacagaaaatcctatgaagaatgaacgagctagtagagtagatatcccactgtagaacaaatattacccacctaacaagattagctctaagacattacataaatgatttaattcatgaaccaatcaaatacctagctgcctttaagatgggttcagtcatctgcaacaaacacgatgatgagtcagcacactaaggatccttgttcatatgtatgaacaaaggtcgtttagcgatac

SEQ ID NO: 62914 - DNA, 611 bp, Arabidopsis thaliana landsberg
atctcgatgtctatatatctagttcaaatgaaataatcgatttcaaaaacaaataacattttacttattttatttgctagtaacatctaagcatactgtaccgggaaacccaattccacaaaacatcgttaactaaaagtcttccagattatgaaaattgtccttgtataattgccttagagtagataatgatctactggacattattggcctactacttaatccaagttaggggatgattgtgtgcgaattgtggtccgtattatatgatttctgaattaatatcttggaactaatattatataaaacattactttatatgcagctaataagttccctgttttgatagttgagagaaatactgtcaactgccatttgaccggtgtggttttgtagcatcaaagttcgactctattcttttttttttgacttacagttagattccaaatttagcggatgtttttaacagaactttatagccagactataatttgtcctatagccctgtgaaagatatatttgcagaacaaagaatatttcatgtgcgtgcatttagtttacttttcaataataaaagtgtgtcattgtacgtggtttcaatgtaatcaagc

SEQ ID NO: 62915 - DNA, 319 bp, Arabidopsis thaliana landsberg
ccgcctgtgagctcattgtatgagatatttatgaaatatttgaatttaaaaattatttctattaaacattttaaatacagttcgtacttaattaaaataataaaaataataactagataatcatatacagtagtttaattcatgatctatgacgaggcacaaatatctggtatcatatttggcaatttatataaactgagcattactaaattctatcaaagccatgtaaatgagaatacgatacaaatggttatttgaataatatattcttttattttacgaaatgaattgcaaaattttagtcaccaaaaaaattatg

SEQ ID NO: 62916 - DNA, 1041 bp, Arabidopsis thaliana landsberg
ccggagataataagaacacagaacacatggtccacaagaaaaaaaaaaaacattttgtaaggtaaatttacctgtatagacagatactccacaagcccactctgtatttctcaagtaacaggactgaagaagagtgttttttatggttaaagaacaaacatcattgtcaataaatggcggaaataagcgcatgtttgcatcaaatcttcgaatatccttatctggaacaggacattcaatcacaccctgaaaacatagatagcttaatataaaatctgataagaggaaatagtatggaaagccaggaacgatatgattatttataagaagtcttactttcattttgtgtaacaattctaaatcaattcccacacatgctgagggtatcactcttgttttgagatcagtttcaccatctaaagcagcagtctgcatgtatgacttaacttttagcacatttggaagtactcaagtaaagctaccaccaccaacctggaaactaaattgtaacataaatcatatacatgaagtctacctacctctacatagcatacaccttgtggatcagaggtaccaagcaaaacaagatcacaaggcacttcatcattctcacgcaaccagacaatattgccaacttgtatgtcctgtgcttgaatctacaagcaacatactactacaattaacacaaactaccaccacctaaaaattaatcgccatgaaaaaatcatggaaaagtgattcatacatgcttcttgatcccctgtttcacgatccaaacttctttctcatttgctttcttatctgatagatatctgtggtaatcatcccaagcttctttggaagccgagaccgcaaatatgaatattaacggaccccatgtacttgcaggattcacaggggtgataagtgaccatagctgaaggcaagcatcaacaaaaagtactggttcataaaccggctgaaacaaaaagaaaaagatagaacattttgatcagaaaaaacgtaacttagatataagaacattagaacactaaatgaaat

SEQ ID NO: 62917 - DNA, 599 bp, Arabidopsis thaliana landsberg
ccgatgaacatctcctggtacatcgtcctcagcgccctcctattcacgatcggcgcggtcggcatcctcgtccgccgcagcccgatggtgatcctgctctgcctcgagctgatgctgaacgccgccaacctggcgctggtcgccttcagccgtgaggtcggcaacgcccagggccaggtcttcgccctggtggtgatggtgatcgccgcctgcgaggtcgtcgtcggcctcggcctgatcgtcgcgatcttccgccgcaagctgccgctcgacgtcgacgacctgcgggagctgcgcggatgagcgccacgacctgggcctggctggtcctcctcttccccctggtcggctcgatcacggtcgcgctcggcttccgcaagacctcctggcgcttcgccgggatcgtcggcacggcggcgatcttcctcgccttcgtctgcggcgtcgccaccctgatcaccctgctcggcgaagaccccgaggcgcgccaccacgccagctcgctctgggaatacgccagcgtcgcctcgctgcagatcaagctcgggatctacgtcgacccgctctcggtcttcatggtgctggtggtcagcggcgtc

SEQ ID NO: 62918 - DNA, 700 bp, Arabidopsis thaliana landsberg
ttattctttctgtgatatattggcttgcatgtaattttgttttgtgtggtttgtgagtttagacattgtccctgtgtggctatgctcctagtttgatctcaattcctccgaataataagaagaagaaagagttaaaagtttattttttattatataaaaattatattttggcttcgtttgtgtgttgttatatatattataatttatgagcaatctgacttaattttaatttaatatctaagtccattacctccagatataattttcaaagatttcataaatgtaaatgattaaaactaaaaataatatatttgaagacaaaaaaaatgattaaaactaaaatttaatttacttgtcacaaaataagagatacatctcctgaatatgtttcagcaatatataacacaacaccaaataagaggatttacataaatttatgacagagtcaaataaagtcaacggcggaaaaagtcaaataaagtcaacgaaatcgtgtcaagcttgacgaaagaaagtacggcaaagaagaggaaagaggcacgtgcccagtatattggagtgggcccaaattactcacataaaatgggcctacataatcccacgcaataataccacaacaatttccacttatcttttttggtatctgtaattttttcttttttgaaattttgcttttggtaaatttcacctttacatcttt

SEQ ID NO: 62919 - DNA, 939 bp, Arabidopsis thaliana landsberg
  unsure (1)..(939): unsure at all n locations
tcttttagcttaaatatccatagaaaactaaactcacggccgttcacgaatattaaatgtaacagcccctttttattcttaggtggcaagttgagattggttggattacgttatcttttgagatgagtagtcaccaaaaggactttttacgacagtgaaaagaattctaaagcaaagaaaatgccacgtcggagtttagagtcccgccaaataaatctgtcggaatgctctctttttctttaacttaacttgtcgacgaataaaaagaaaattaactgattgactatgtagatgacacgtggtgacttttcgagttattgctttttgccaacgtggcaatagtattgatcgtccgcttaaccctagccgtcagaggaaaatttctcaatcagaccattaaacattacataaagcgattattttgtttggcttaaaattcgaatggttttcaattaaaaagaaacacaaatagtattaaacatattttgtactactattttataattgtttgtcgtatgcgaagatacgtttatatgtgtaaaaaattcccttcattaacgcactaaggcatatcgaaaattgtgagctcttggtattttaatcgtatgatcatatagtttattggataaatcatatagaggtctttaaaataatatacagcgaacatggcaccatgactgtttattcattattataatcattatcatttcaaatctagaaaatgcaagaaagaaagtacacattgccacaaattataatattttatactgttatgagactagattaatcgttgaagttataaacattactttatattagaaacagttgatagaaagctagggcactgattaggacgtattnggatatttctggaattattataccctataattcgatatgtatttagaataaagaaaaggtcacaattatttttattcc

SEQ ID NO: 62920 - DNA, 351 bp, Arabidopsis thaliana landsberg
  unsure (1)..(351): unsure at all n locations
aatagttttatggnnnnnnnnnnnnnnnnnnnnnnnnnnnnnnnnntatttaaattagtaagttgaccaccacttaaaacccaatctaaatataagcctgaaagaaaagaaaaaaaaaagaagaaaaaacccctagattgttgaaagttgaaaccaagatttgtcgacaattatttaatgtggtacgatgattataaatgtcatgtacgaacgacttgactaggtattaaaccacacccaatgaacggtacatgcatcatgtgttaacctcccccactgggcaacttacatatgattcatgttaacattccccactgaaccacttataggtgggctagtggtaggaaggat

SEQ ID NO: 62921 - DNA, 1495 bp, Arabidopsis thaliana landsberg
taaatacttagacttgctagcttgcagatgagaacaaatatataaaagatgatatggatacctcacctgtggttcgagactgggttctacacgggaatgattttgagagacaagagcacttcgcaatcttcccgaagagccttcagattttcgagcaatgtactgcctctcaagtgcttgaatatcacaattaggatgaagtccaaccacaacaacgctttcaaaaagccttgatggatcttttaatggtttatgatcctgtttgatataagttagtgacaaaagtgtctatagtaacatcgaaacgtagttgattcttcattcttaaacacagaccaaatattgcacctgaaatttcgcccattgacgcttttggctagtcaaaacctcaggattgtacaatacactcttggtcttaggagtttcatagaagttcttaaccgctttcgaaacctgcctctgtaacctctccaaaggactatcgctaccttcatctttcgacgaaaagacaacagacggccttggcgggtttatcgcagaagccgcagcagcaaaagccattgcaacatcttctgaagtctgcatgaaaaacgaagcaccccagctcggactactacttccttcctcattcttggccataacttactcaacactacaagacaataacacagtatcagtaacaaccacacttgattaaaaactggtaaaggatcatgctttatctatattagtttaccaatatggtccataagtgaagatacataactcaaattgaggaaaatataattccctcaagtatttcaagacagtgataggtaggtaatgagacactctctagcaataaatcataaccaaaaatcaaccttttaaggattttgattaagaattagtacaaacagacaagacaaaaatcagataatttgcaaaagcgacgttagtgagattataacttagatcaatttgttcaattcttagtgttagaatccctaaatttagatcgcaaatcagtaaacagaagaaagagaataacaaaatcacacaatgaaacattacttgcaagaacttctcagagagcaaataaatataggaatttgaagatacctctgataagcttaaggaactacaaaaaccaaagtaactttgggattacaaaaaaaaaaacagaacagagagtaatcagacaaataagataagaccaaaagggtaagaagatgaagatctcacctacgcaaagaaacttaagcaagcaattgaaaaactctgaaactaatcggaacttggaataaaggagaagaagttgattattattatggaggacgaagaagatggtgatgtgatgatgaggaagatgatcctcgtgggttcaaaaaagtttgaggaaataaaaaggctgcgagcgagagagagacaaagagacgaagagatggtcagtttcttttttcttcttcttcataataataatatcttcttcttcttctgtaatacaatgtttgtc

SEQ ID NO: 62922 - DNA, 487 bp, Arabidopsis thaliana landsberg
ttcagcgcacgccgcgaaccggcaaagcgcaaagccgttgcatgcgcgtcacaagggatgtttttatcctccgcaacagcccctaccgaatcatcaagatcaagcacgatcgctggcatgctcacgctcctcgaaccattggtgatcactttcaaaatgcggcgcaagaaggcgcattgccagtcgtaccaaaggatttcgaggacgcacggcatgtcgtgtaaaggtcatgtgtgcccccaggtgcgccttgatttccggatcactccatccggcaacgtaaaaacgcaagccacgcctgcgcgcgtactcgatattgtgcatccagctcacggcatacaagttgtccgcatgcgcatcggggtaacgcaggccgatgtacttgttcaccaacatgctggcatgttcgaagcacaaattccagccgatcaagcgaccggcgtgtcgataggtaaagaacacgccagcgcaacttttgtcccgcata

SEQ ID NO: 62923 - DNA, 108 bp, Arabidopsis thaliana landsberg
cggactgggaaaagagatttgcccgtcgtgccatagtgaggtcccctaatatatataagccggggtaacctgcattaatgaattggcctacacgccgggagaggcggg

SEQ ID NO: 62924 - DNA, 143 bp, Arabidopsis thaliana landsberg
ttgaagttattagtttatatatctatgcatatggtatcatattctacggggatgcgcgctatatatagacaccgagaacaaatacacggtagtccaatggaacagattctgacacttgtaaaatactctgctacctataccat

SEQ ID NO: 62925 - DNA, 642 bp, Arabidopsis thaliana landsberg
tgcacatgatagcgggcggggcctctgtgccggggtgttgggacttagagctgatggtttgagggcgatacgggttagtgctgcgggatatcgttcttcgaaaattctgaaacggttattatatgctttgcttttttcagaaaccttttcatgtacagcctgtaatacaggcgatgctgccagggaataaaagaagggtggtgcaggaaggaaagatcgtgcagtaccagtacctgcgggatgcgcgtatgcaggctgcagaagctatagggttgtatccatacatcgggtttatagcgtttcagcgctgccggtgcttttatatcataccagtatttgaatgcgagtatatgacgtgccgctggttttaccactaccggggttacgtttgggccatacacaaaagaggggtcgtagggcctgtcgaacaccagtataaattcatgttcgggatgctgcacagccaggcggctgaccagttcattcacataatgtccatatccttccagctggcccttccggagaaatatggcattgaccgctatccgcatgcggcaaaaggtattgaactcataacccgtattcataaaaccccttcccttgttttcttccaagctccctgccgctactttggcggcctga

SEQ ID NO: 62926 - DNA, 398 bp, Arabidopsis thaliana landsberg
cggaggaatgctgatgtggcgttcctcggtggagcggatcaccgtctcggccaacggtgtacgcgagtgtttttccgaactggccgcataggcgagttcctgctgggtctcccaatccttgtgaacagcaacgatcttggggacgaccgggcgcccgacggacagtgtcccgtgtcttgtcaacacgagggcgtacacccgggcggtctgatacagatgcgagccgcccttgatcaggatgccgcgccgcgcgccggtgccgatcgagccgctgatcgccgacggtgaggccagccctaccgctcatgttcacgcgatcagcagcatggacatcgggcggcggacttcgacggtgatcgcgagggtgatccgcgacaggatgaacgaggccggcacta

SEQ ID NO: 62927 - DNA, 611 bp, Arabidopsis thaliana landsberg
ggcgggaagatcctggaacttgtcaaacgatggtttccttgacttcttttctttatgacttttttttgtttttatatctgacttttgacagtgttagtgagattagatcctctgtaatcggttctacgagaacaatagtccaacagcacactcttgaatctgatttggtattccgatcaacggcttgatttatctttatttcaccattgaaaaagtcaataatgctcaagactaatgctcgtatgaacgatattgggttagtaataagttgggttagtatggaataaatggtgtgatacaatatttgaatggtgatgatttttgtaacaataacaaaaaataattatcttgcgactaaaataattatcaagttttaattaatttttgataacatttcgagtaatagcaaagtcttcaagcttcaagactcttaaaacatgcaatataatgcttatgtgctcatgcacggctgatttagtcattttaccctttctccataaatcttgtttagcctcattttacactttttcgttgcaattaggacatataattccttcatgtgttaatggtcctcattcctctgctaatcgcttccattctcataccatttt

SEQ ID NO: 62928 - DNA, 1352 bp, Arabidopsis thaliana landsberg
cggcgtgtcctctttccttttgctttttccatgtttacaagtcattatgcatctttgttttttcaaaaactataacgtatctacacgtttgatttgatcccaataatcgaagtacaacactatagtggttcattgaaactgtaaccactgttcttttttcaaaatttcaacgagtacacgtcacaagccgtaactttgcgcaatcacaactcaaaggtacgtaaatcgaagtagtacttaaagagaactaaagatatcaataattaattattaataaacaaacaaaataattccgatgtttttactacaaacccattagattttaccaaaaatagcagaaaacactatttatgtatcacaaataacaaatcccacccaacaaattttcaatttccccactccactccttaaaaaccctcccaaggtcaacaaaaaaattacagagagcttggtcttagtaactaaaaatacataaatatatatatatatatatatttattaatacaaacttgaatatccccctaaatttattcttataattcaaatccttattactaaccagaacgcaaacttcactagttcaactataacctaaaccgaaccaccttctaaactaagacgctccttccgaatttcgaacttgtaagacaaaaacaacagctaaaactccaacaacatcagtacatccaatcctgtggaagaccaccaccactaactgctctgaaatttccctgacgagcaagtactgtacttctcgccaacatgcactctgttcacatcataacaaacacacaatttgtttaatcaaaaagctgttattatttaacatttaaggtatgagtaatatagacactcaccgtaatcgaactggctacgccttggcccaacaatattggtgaactcatcaaagttgagattttgaggtttcactttaggctgcaacatagctggagtgttgactgttacagagacgcaaaataaaacaagttaaaatctttctgacacataggatctattaaaaataaacacaaacttggagtaattgtacctggtgttttcagggaatcggaaggggcggccgatgggtatcgccggggaagaaaaacaccggttccagcagaaggacgtttcaaaggagctgcggcttgttgcggaggcaaccacgtaggattgttgcgtctcatgtatctcggattctcaaataagccttcttcattaactactctccttgggatacgattctctgagagcttgaatcttgactgagcagagcagagccacatctgttcgatgagacgctggtgttggagttcagcatgtatggcagcgttttgacggcggagaagagactc

SEQ ID NO: 62929 - DNA, 1435 bp, Arabidopsis thaliana landsberg
gctaagttgtgatgtgatttgtgacctgtcgactttttgattcctgctcttcttctgggaagaaatactcccacatgattctgtacatcgtttctgttaaatgaattcttagaggataaatctccacctacaagttttgaagtaattatcagacaaattttacacaaacacagaaagcaaagagagttcagttaaaagatgtaaaatagtccacaaataattgagtcaattattaattatagtggttacgtttatgaattcagtaacgaaaaattgaagagaaaaagaaagaagaaagatacttacatgaaaaagctcaaggggatagtgtgcatcttttggcgctccctgctttgcatccacacgtagcatgactttcctgtaaacaaagttatagatcacttttaatgaaattgactttatcggaactgacacaaagtttaagtgcatcaaatagaaagaggaagcacacacccaaagtcagaaccagcatcaaataatgatgacaaagtaacgatgatttacatcacacattcacactacataggatactttctattaacaatttaggatgaaaatccacaacgatgtgcatttcccaggagaattcttggataagatgatacgtcactttttaacgaaatgaaccaatatcacagaaaggaagtcacttaacacaacgtgacaagatgactcttatgacgacttaaagacagaacaagaccagatcatgtactaagaaaccatcatctaggattaaaatgtcaatcatgtaatatggaaaatatacaagtacattaaataagcatgtaaggaaaacgtactttccccattcaggtggaggattccacgctgataaaagcatatctgactttgcatttggcagacagttcctaacaacaaagtacttggtggtgaatcgagcaacaccaatgtctttgtagtcccgatcaaagtcataaatctgcgtgtataaatccagttaaatatgtattgccttttaatttaaacaggcaatagaccaagtcagtcattaattaagtagacgatggaaaatttgtaagcaaattgctacgcaagttacgctcatcattccgtaggactaatcagtatatgaataagaaaatgtgattatgtgatgctacgactctaacggcactggactaagaatatacagaatgtttatacttaccatgtcatttatctctgcctcagcaaaggatttaccatctacaagcatgctccaaacaaccttattaatttgtaacgaaatacacatagcatatgatgggcttttgttcttctccttctccattattcgcagttgtgcagccttctgcaacgccattcttaaagatgcagaagccgcctttctagacttttgtgcatatgtgagctctttctttaaaccttaaaccttaaacagaccagcaaa

SEQ ID NO: 62930 - DNA, 196 bp, Arabidopsis thaliana landsberg
aggctagtattatcaagctgtattatggctaactattcatatgaataggtgtctgacctgagccatcaaaatcaacaggctttaacccgcatggcaaatatttaggtattgcactctagattttcaaaaataaaacttaatatataataacttatttttagcatcaaagtacaacatagtaatctcttaggtctct

SEQ ID NO: 62931 - DNA, 288 bp, Arabidopsis thaliana landsberg
attcaacaaaagtccacggaccgatccatcgtgagagattagtgtattgaccggaacatatatatagtattgtctttaacaaacaaacaaataacaaaatagtatagtgggttttcttaataattaagctttgtttctttgactggttcggtttgttttgttcgaattttagtaatctggaaatggaagaatgatgtcgaatttttcagttcgattttttggtaaagatatatatttcggttcgatcaagatcgggttctacccgcaccaggttagctatatagaatg

SEQ ID NO: 62932 - DNA, 292 bp, Arabidopsis thaliana landsberg
atgtggtggcgactagcaggtataaatatggtctaatagatctctagtttgtgccattatatgatcagtaaaaagagttcaccttatgagaacattctttgttagtggtcacttatgtgttagatgttaactcttctaaaacagacctatgactcgtggtgaaattcgggagcttcagaaatcaatcaaggagctgcctgagaggaatctcaaccgcgtcgctgaaatagtaggaaaccattccatagcatctggcgaagatttcaacgataaggggatcgtcaaccttgac

SEQ ID NO: 62933 - DNA, 1427 bp, Arabidopsis thaliana landsberg
gagaaacttttcgagttggacccatcattttcgtcttgcataaaacgaacaaaatgaaaatcgtcaaccctttcaatcgataacactgaaataacaccataatatatctcctccagtgatgatatctcctggaaggaactttgcagctgtgctttaaactcctccaaaaccaagggctgaaaaatctgaatatattgctcaggtgaaccaaagcgcacaggaacttccctaaattttccaacattctgactctcatctttctttgttgatgccaatcccactatcgcatagtagtccatttgcaaaatctttctaaaccaatcttcaagctttggtggtctgaatcttttgaatccagcttcttgtctctgccaacgatcggatttcttgttgacaggtgcacaaagttgaatgacttgtcttttgggaacaatgggccctgattttgccaggggtaatgattgccgtttcagagatttaagagccaagtcaagtggatcaacctccgtctcatttaccacctttctcaaatccatgcctttggcgttggaaatcgcagatttctgagcctcttttgaagtaccacgagggccgagttcatcagtagccttctttaagttgggtctgattccagatgaaacaggatcttccacattctgtcttttttccgcttccctactcataccagcagccttgcttggttcagcgtttgttgtgggaagatccctaacaatattgctggagctaactgtaacatctctctctgaaagaactaacgctgaaagctttgaagcatcaatactagaagtactcttcttcagagaggagatctgggagatgtttttgataggtagaagagttttattgatgtcaggttgatgagacttatgcagactaggtaaatttttcaatgattccttttctgtctcatccactgttagatccatcatattatcttgtaatttgccaacaacatcaacaggtttgagaatctggtactcatttgccttgggaacaaggcgtgagatttgttctgctaattgctcgatgtcaacattatctgaattaagaagagtcagagcattgtcaattgtatcacctgggaaaaatagttctaaaatgccagttagaaactattaacaagcaggaaaccacttaccagaggatagaacatgtctgatagcttggactgccgaagaacaagcgtcactgtttgatccttgtaagatgtctagcaaagccactaatgctcgtttccaatacgcaacaacaaccttaagttgtgacctttcccaatcaatgagatcaggaagccatttaagatcagacgcatctttcaaagttcctctagtatcacaggactcttcacggcttactctaagtttttccagaacgacaggaagaatcttaagcaaacgtacacatgt

SEQ ID NO: 62934 - DNA, 265 bp, Arabidopsis thaliana landsberg
atgcagagaagatagattaaataatcaaactatgcagagaagatatattttattatttataaatttaatagtgatgcggtggtaaaagccggatatatttgacttattaagaaaataataatgtattgactaatagacatatcgtcatattgaataatatattaaccaatctaattaaactatataactataatcaaaaatttaaaaaagcgataaaatttattagactatactaaacatttattaaaatatttgtcgcagtatg

SEQ ID NO: 62935 - DNA, 932 bp, Arabidopsis thaliana landsberg
  unsure (1)..(932): unsure at all n locations
ggatgtgtttgttgcattgtgggctcagttatgatcgtcatacacgcacctcaggaacagactcccaattctgtagaagaaatctggaaactagcaatgcaaccaggttttgctttttctacctctctctctctctgtgtttatgttactgatatagacaataacgtatatcccttctcttttttgtatgagacagcttttctaatttacgtagccatatcaatgtcgatagtcctggctttgattctctactgtgaacctctctgcggccaaaccaacattcttgtttatatcggaatttgttcgttgatgggttctctcacagtaagcatctcggaatttagtgctgagctctatatcttttcccattttttgttctctaaaggttttaatttcaaataggttatgagcatcaaggctgtagggattgccataaagttaacatttgaagggataaaccagatctggtatccagagacttggttttttgccatggttgcagcaatctgtgttgttatgcaaatgatttacctcaacaaggtaagaagaacctgtgcatgtgtctgtgtgatgtaatgttgagcacactttggccaatggttaatagtagtcatatgttttgnnnnnnnnnnnnnnnnnnnnnnnnnnnnnnnnnnnnnnttctccaatctattatgtgatgttcacaacactcacaattgtcgctagtgcaatcatgttcaaggtagagagatttcaacaaacactaagagtaatgatcctcgtgtttcaagattgtcaaatgaatcacctttttcttaacaggactggaatgggcaaaacacagacagcatagcctctgagatttgtggattcatcacagtgcttacaggaacggttatactccattccacgagagaagaggaacaagcttcgccacgacgaatgagatg

SEQ ID NO: 62936 - DNA, 476 bp, Arabidopsis thaliana landsberg
cgggatggactacaatcatttccctgatacaacaaggataagcatttttgatttttttttcatgttttaggttaacagggcggaaactgaaaacgatcaagtaccaacactcactttagaggagttttcaagggtagtttgttacgctcacgaatgttccgagcaagatcaatgattttcatcatcctcgtaacacttaactcaatcctctccccttcctattcaaacacagaaagaaaatataagcaggcaaaattcagattacttttattctcttattggatatagagacgtggacttgagtcttaccattccttcccttggtggaatactgcagtagtgaacactttcctcagaacctttacacgctttccgcagattctggtacaaagtttcagtgaagaaaggtgtaaacggggccatcactttgcaagaagtaaggagcacctgaaaatagacaataattagatataaca

SEQ ID NO: 62937 - DNA, 995 bp, Arabidopsis thaliana landsberg
atatctctgcaactatttttagtatacattgaatagagtcgaaagagcagtgtgacaatcatcttccgccgtacggccttttaatctcttgcggttgaatctgacatatatgttagtgagattgtcgaggaacttcaagatacgaggaaccacctaaacaagaaaaacaaaaaccaagatgtaataaataccacgagacagtgatggcggttttctaatgcgaacaccatatcatgctgaaaataacatgtaaaaaccttacagtgtaaagccgataggcatccatctcctcgcggacaaaacgaacaagactctgcgtagctgagtgaatccactgatcaagaatgtttgctgactgtatagttgccagatcagtaggaacaaagggcacaccaccttcagtctcaagtctctttgcattctgaacgaggaaccgatatgcattgtaccatggaaggaatacatctttgacctagtgaatcccaatgcaggaccagaataaaattcagacaacaaccacgaataaacagcaataaagcagcaataaattcaaccaccaaaatcactcacaacaccgagtactccttcttttttgaagcgtagtggctcagcacgtacaaccggagaatttatcaggtacaatcgcacagcatcctatcaaggttcatgtaaagtcactaagttattacgtacacacactgccaagattttcttagctagagaacatttgaaaaagctcaaaacgcagcacaagagcatattatagggaaaacttacagccccatactcatctatgacttccaaaggtggtggataattccgtaatttcttagccatctttttcccatcctcagcaagtacaagaccattgcaaatcagatttttaaacgctggtttttcaaataatgcagtagacaacaccataagagtataaaacctgtagatacccagcgacaagtttagtaactatttattttctacttaagaaaaaaatt

SEQ ID NO: 62938 - DNA, 596 bp, Arabidopsis thaliana landsberg
aagtacaaacttccaaattcttatggaatatattaatttatatccaaattaaattttattttgatcataaattttaaagtacctgagatagttcatgttgtctctatgtattttggaaaaagtacaaggttattcgtatatttaaaaacttaataaccgaaaaattggctcacctatatgattgaattcaacatgaaaattatcaaaggcttttgtttgcttcgggggtgaaagaaagcctttctagttagtttctattcaacttcaatgttggccaaaagaaggaggtatgcagcaataggtatatacgccagcttatctgcataaaagctgtataccttatctgtattgggcttctaattatctgatcaaatatggccactagaacagacgtagtgaccaaaattataattgggcttatgggctttgattacttgaacccaatctataaaagtttattagcccaaattaaaacttgacccgaagtttaagaaccgactcccccacaattggtcggtttcaataactctccaaatcctaaaataatttttttttctggcttcatctggataaaccctagttcatccttttctcac

SEQ ID NO: 62939 - DNA, 847 bp, Arabidopsis thaliana landsberg
cgaggaggatgatgcgaatctggacaccactggttctcttgtggctcagcgcctcgcgtcttatactgctcctaggtcaattcttaacgacgtggctcgtcctcacaacgaagatgacgatgtgggatttaaacctaggcagagtattgccgaacgtgagggtgaatataggaataggagactcaatcgggttctttctccggatagagttgatgcctttgctatgggcgacaaaacgccggatgcgagtgttcgtacttacacggaccatatgagggagacggctttgcagagggagaaagaggaaactatgagactcattgccaagaagaagaaagaggaagaagaagctgctgcgaagcatcagaaagattctgctcctcctcctcctgcttcctcttcttcttcctcttccaagaggagacacaggtgggatctccctgaagaagacggtgctgctgcaaagaaggctaaagcagcaagttcagattgggatttacctgatgcagctccagggattggacgatgggatgctcctactccagggagagtttctgatgccacaccatctgctggacgaaggaacaggtgggacgaaactcctacacctggtcgtgtgactgattctgatgcaacacctggtggtggtgttactcccggtgctacttctttaggtgttacttgggacgggcttgccacgcctaccccaaagcgttaacgtttaaggtgggacaaacacccaccacttggggagtgctcacctatgggtggagtcacttctggtgcagcttacactcctggtgttaccccaattggtgggattgatattgctacttcgacttcgggt

SEQ ID NO: 62940 - DNA, 1783 bp, Arabidopsis thaliana landsberg
ctattatacctaaaagcgacttcaagcatgcataatgatttagtcataaaacaaaggtaaaagtattaatacataattacatatagaataaattcattatacgtgattacgtgtgtgcacgaagcccacaagttctgcttctcgactaatcagtcgatcgttccctttgttttttaatattatggttttgttttttcccgttggttggttaaggagttaacgtaatttgctagttaaccactcgtttaagaattgtttattgctgtattatgttattaatttagggttacgaggtgattagtactaattcactacttaaaaaacattttgtaattcatttaaaactagtttcttcccggaacctatacgtacgtataccagctttacaacacgtcacgaaactgagggccagtgcaacataaacatatttctgtgttttataattaacaagtgtggtttaaagatatttttcacaaaaatctgccaaaaaaaaaagaagacacgaaaatatcattttctattttcatgcaaattatagctagcattgtaagaactgagttttgagttctaaacttctaaatggcaaatacaaacatatatataaagataactagaaaattgtctctttagattcttgatttggtgaacccacattattttagattttatgagcaatccacatacgtcgtcgtaaacactttaaattacttagaaaaaatataataacaaatttgaaccccaaaaaatcaaccaaaaatagaatcgggtcgagaaaaactcggacccttttttgttccgacaagtatccatttttctttctaaatattgacttaacaaatctgaggttcattttctgtttctctcaataccaggtcaacatgcaatagccataagaaaaaagagagacaaacaacaacagaaaaagagagagaggggaaaagaaatcttgaattgacagaacagaacagaacagaagacaaacccatcaccaaagtctattgagaatttgatatcgatttgagaagagaaaaattaattgttcttgttcttttcattagttaattttgacctatttttagttgttccttttttgcatttcttcttaacctagtttgatcataatgccattttgtaaggaactattgattcaagaagaggaaacgcagcaaaagaagcttcctatatctcttatctcctcttaacaatgttgtcctcttctgtaaatacaaaccattaagctctgtttcgttatatttctatcttcctgcactacccctttcttggggttccattgattgttctgtggcggggtttcggttctatctagaggtggaaggatggcagataatccagtggagaaaaagtcgcgttgtcggtttttggggtttgtgtttaacagacgtggcttgtggtccaagaaatgtcctgcggacaatggtagccataaaagcacaatgagtagcagcaatgcctccaccgcaaccgctaccaccgctaacattcagttcaccaaatctccatgtaccgaatttaacccgaggaagcttcaagaaaataaagttttacctgagccgatcgaggtccagaaccaggtacaaagacctgtttcaaaaccctcatcgcatcaatacccaaataacaatcagttaggcagtaatgggaataaccaaccaagtaataataatcaaggaccagtccaacaacaacaagcgaggaaggttccgagggaagcaattggtttatcaggtgagctagagagcatgatcatcgataatcagaaagc

SEQ ID NO: 62941 - DNA, 136 bp, Arabidopsis thaliana landsberg
ggcgcccagcccccaaaacacaaggcgagaaaggccaccagaggcacccacgcagcaaacacctacaggataggcaaaatgccagagacccccaagaagagcagccaaggtaaaaacatacacgaacgacaaaacc

SEQ ID NO: 62942 - DNA, 274 bp, Arabidopsis thaliana landsberg
  unsure (1)..(274): unsure at all n locations
atcgccctgcaggaacagcatcggcatgcccagcgatcgggccacggccacctggtggtagtcgttcaggctctgccagtagctttgcggctgaccgaagaacgtgccacgcggtggctgccccggcgtggcctgcgccagcagcttctgctcatggcgaagggcttcgatcttccgggtcgccaccttggngcggatcccctgctcatggaactgcnnntgaatcaggcacaatccaggcaaggcttccctggcccggccgcccgcccagcaa

SEQ ID NO: 62943 - DNA, 177 bp, Arabidopsis thaliana landsberg
atcaaaggttgcatacatctttctgatctttgtatgtatgttttacagggatatagttgctggtctagttcatttgcatgatattggaatcgtacatcgagatctaaagcctcaaaatgtgttaattgttaagaactcatctgtatgtgcaaagctatcagatatgggtattagcaa

SEQ ID NO: 62944 - DNA, 1535 bp, Arabidopsis thaliana landsberg
  unsure (1)..(1535): unsure at all n locations
aattaaccgagacgcctgcccggagcaacataattaacaaaggtggtttttggatgaaaagaatattaggaactgagaaatgacttacggctcgagcaaaagcagacatttcctcttcaccagaaagcattgatacgatcgaagaaggcgagccagctgcacttatgctaccttctgcaagcacatctcgccttaatcttgaatcttccgtctcagtctcaaactggaagctgcaagttttttatgtgataaccacacaaaagtaaaccatcttggtgcaatttaaaggattggcatgtaaacaaactgaatcaaaatgatcaagccgataccatatcgaaatgtgtttataatccgattggttatattactttaaagctgaccccaaacaaaaactgattctagtgtaatcggattggcatatgtaaatcaaactgaatcataatgattaagccaaaaccaaatcgaaatgataaaaccattactgagtcaaaatgaatctaaaacgaaccaaatttcacctaaaaacaaacagaaataaagaccgggaaacccactaaacctgaacagaatcataccgtaaaccagattgtcaattatgtgttcttacctttccaggtcaaagagcgttccctctgcagttccttgaaacaactcatcaattgctgtctccgcgcttgagacaagacaacaatgatggttgtataactcatctacaagggttataaacctacgtgcctgataacatcaaaagtccttagaggaaggaatcagcaaacatcaaaagccataaatcttgattttagttataccttgtcgcgtatctccatgctcattgctggaatatcagatataaaaattgtatgatagtttttggccactgcgatataatctgctgcacctaccggtcgaccacatagatactcgaatgtgaaccttgccactccactacagctttcaggaacttccactgttctgatgatacacacacaacaaagaccattatggtttgatttaacccatcaaaaaagaaaaaccattgctatcattagtaccttccaaacatcactgggagagtcgccgaagttatttctccaccgtactggtcagtgacctgacgccacattttctcaaactcttccagaacagcatcattcaaaggccataagtagtgaacctataaatggacgtttacaatttcgtcaacagaagcaaaaaagaacacaacattaaacgatgtaaagagtctgtgattcacacattttcaaccgaattttttgctgcaactcggcggtaatctacttcacttccaattgagattatttcacaatgtttctccaatttagagataaacttatcaaatatctccttctgcattccgtcctgtaccaacaacattagcaagaaaattagtggctcagcgcaaaaactctgtgtaatcaatgtacatgtccttcatgaactagttaaagagacctctttgctgaaaatagaagagggcttaacgaggaaaagaaaagngaacctgattcaac

SEQ ID NO: 62945 - DNA, 174 bp, Arabidopsis thaliana landsberg
cccagtcaccgtcttttttcggggagacaaaccttagcccatgaggcttttgatactttccctgcatcaatgtcaccggaccataaatttgcacacatagcttcaattcttttaatgcatcttttatatatagcacaaaaatagacatccagaagttaatatacccatatatca

SEQ ID NO: 62946 - DNA, 985 bp, Arabidopsis thaliana landsberg
gattatttcagatcgttacagtttgaaagcccatccaattcaacaacttctcattagtacttaccaatactagttgtagccaggatattttaaggtgctatataacatttacatatagatcttataggttatagagataccaatctctttgatccgcacaacgatcagattccattgaataatagaaacaggacagtgaatgattttaatcacaaaaagattgtgaggagctgaaacagaacaggtgtgtgaactttgacaaagatttgtccaatttttcatgtgtcagcatgtctggtctagtgacgtggcatgcaaccgtgaaacgttgagtcttccacgtgtcgatcaagaatcgacctcgggagaacaaggagctctccacaacgcacaacttggttggctgatcacaatacgtgtcagaagatctaacaacaaaacagaccacagaaaaaaaaaaaaaaaacagagtttttgttttattttaaattttctggttataaaagacgaaccaacctattattgagtcacaatcaaattgtgggagatgagtctctaacgataacctctctcttggtgacacgtgtttagaccaccgctgcttaataaacccaatcgcccaccggaacatgagtggcggctatacttcctctctatttcttctcttctaaggatttttcgtgtctcaaaactttcaaagactctcagtttctatctctgtgaatataatcttagttataaaaaaatgggtctctcgcattttccaacagcgtcagaaggagtactaccacttctggtgatgaacacggttgtttcaatcactctgttgaagaacatggtgaggtctgtttttcaaattgttgcatccgagactgaatcttccatggagatagacgacgagcctgaagatgattttgttactagaagaatctcgataacacagttcaagtctttttgtgagaacatagaagaggaagaagaagag

SEQ ID NO: 62947 - DNA, 190 bp, Arabidopsis thaliana landsberg
tgctctcagtagagtttattcgtaaagaatctggaccggctattctaaacttggtgcttggtggtcattttgtggatttggttcggatttgcgtaccgtaccgttcacctaaaccccttgcttagttattccttttgggtttatttgtgtaacacttttgaaaactatttaagaaatcaaatttgttatt

SEQ ID NO: 62948 - DNA, 129 bp, Arabidopsis thaliana landsberg
ttggtgcaaaacactctggtgctttcagatattttcatttgctttaggttacaaatgaatatgtacatgttttaatgccttctatcatactgagtagcctgtcgaggtaagctcatttctaaccttatt

SEQ ID NO: 62949 - DNA, 1675 bp, Arabidopsis thaliana landsberg
atagttctgatctctttgcacaatcttccttcaactagccgcaccggtaaccacatcttcggttttacatccaccgtgtacgcaagcgttgtccgaaaatctttaaactgtaaatccaaagcctccccatgaatccctttgtcgagctgtgtcaccaaacaaacgcagaataagaatagcaaaggtatagatgcattctcataagaggactttcatatgatacttacttgttcgatggaccatttgccttcaaacaactgaaaatcgccttcaaccatcttaaaatcaatctcacgtctcctcccatgtggcagaacctcgagctctttctcgtaacaatctagaacagctttggcattgaacttaagtcccaatgctaagttctgctgtcccatctattcaaacaaccacaaaaccatcacaacaaagaaaccactctaagttttgaaccactcttaagttttcactagaaaagattcacaattagtatcaaagtttcgaaatttgaatctaaccaaagcttttcaacagcaatgaagtaatgaacttaagtcccaatgctaagttctgctgtcccatcaattcaaacaaccacaacaaagataccactctaagttttcagttttcactagaaaagattcacaattagtactaaagtttccaaatttgtatctaaccaaagcttttcaacagtaatgaagtaagagccaatgcactaatttggagatgatcataagttttcactaccaaagattcacaattagtatcaaagtttctaaatttgaatctaaccagagcttttcaacagtaatgaagtaagagccaatgcactaaatttggagatgatcacaatttttacctggaaaagacgaacacgattgccttctttctcgaccaattcgctaacaacaagacctggaatgaaatcagatagcttctcgtaatcagtcaatacgctccaaacggaatcgagactcgcttccattccaatcttcgaacgaattcgacgagagctcttctcgagcttcttcacctctataagaacaccatcgtcgcctactaccaattcctctgttttcccatctgtcaaacaatagtcatcttcatcatcagtttcagtttcagtttcatcctcgctcgaattgaatcgcggagaactgtcgccaaatcggcaggtgaaacatctacgagaataagctagcagtgtcgaggaaggcgaaaaagaggccaccggcagatactttttagtcggagagtgtgaattcgttaggccggaagtggtggctaacgcggcggcgcgtgggtggtgaaaggcggaggagaagtctaataagatcggagaagattgcattgtttcttctagatctggaaagcggtctaaaagcaggcttgctttgagctataggctttctatttgggccttatattttcttaaagtcaaaatgggcccatttaaaatatataaattataaatttaattaaatatattcataatttaaaacttttcaaaatgttttctatctacaatattattctttttacgtcaaaaccaaaatatatttttttcctagattggaaacatttaaaagttttgtctgtgctgtgtatttatacattttttaaaagaagtatttatacattttcggtctacaatttagcataaagttctcgtctt

SEQ ID NO: 62950 - DNA, 191 bp, Arabidopsis thaliana landsberg
atgagaaaacaaagacggcaaagaatagggagagaagtgagtaggttagagcagagtgagagacaaggagagaaggttgcggcagggaagagaaggaagagggaaaaaaagaggagaatcgaggagaaagagttcaaaggccatagaggacagggaagaaggaatgagcaaaaaaaaagtctgggggaaaa

SEQ ID NO: 62951 - DNA, 462 bp, Arabidopsis thaliana landsberg
  unsure (1)..(462): unsure at all n locations
aaactgtttgggttccaaaagagataaaagacattttcacctgtgatttgaaacaacataacggtcattctcagactgccgtgtggtttccaagctgagtccggccaatatgcgacaaccgcgacgttatcagaggggcttcttcatcgttaagctccaatcctctggggctccccccatctgacgaattcttctccttccagtcctgctcaattatttggaccaaatccttatataaatatacataggtgatgcaacataagattaggttttactttggtgactacaattccaggaacgacaaaccgagttggacctggattgaacacccttttctactctccagagctagtgaatgaacaagtaaaattcagtaaacagattaatggcctgtaccttcgtgattcgatctgggaggctgtcagtggttggnttgaatcgcttttacatccttgattttta

SEQ ID NO: 62952 - DNA, 106 bp, Arabidopsis thaliana landsberg
attttgtaaaactgaggaacgatacatatatgtgttgatacatattcctaggcaagttacatttgtggcggcatgagacctatgacactgactatgaggaatgtga

SEQ ID NO: 62953 - DNA, 189 bp, Arabidopsis thaliana landsberg
tctcaatcgcatagttggatactatatagtatatacacacaatgccaacccacatattataaatttataataactcacccaattaattatacagccttccatttaggtgaactactaaactactttctttcatgtcaatcaacaaaaagaaagtaactgaaccgcgtgtgaccaaaattatatttatgt

SEQ ID NO: 62954 - DNA, 1298 bp, Arabidopsis thaliana landsberg
tagagagctttggtttcaaagaggaaactgtcctgtttgttttaccacaatgatagaagttcttgatctttcttagacttttcagtttaattatcttaatttatcataatcaggttgtttcctttgttgttgtaatgtgttgttgaatatttgatgagaaatccttttgtagaaattattctctctcagctccatggaatcctactttgtttatgttatttggagtaaacacataaattagatcaatcaaactattatcattaatgagcaatgttctaatggttgaaactgttgaggtggacaaatcggtttgtgaattgccctgtttttatttaccattcataaattataatttgtggcaataaagccgaacaaaaaaaaaaatttgatcgcggaacaagtatgaactatttttactttagattaaatttatcattgtccgtttctagagtgatctagtctgctaaatgctaatgatttaatcctgttcgctcgcaacatgcattcaaaacttaagtggttagtacttgttgtatgatttgaatggaaaacttgaccaaacccatctatattgcatataaaatatgtcaaatcaaattaaaatgaaaaaaaagttggcatagtaaaacaaaaggttgatggttgaaccataaattcttaatttaatttggcttgtcactgatgtgtttgatttgaacaagaacaataagtggtcgggctagacgtgaacaatcctccaactacacttatggttacggcaaacacctaactggtggaaagcgtcactggttaactaactcttacctatcttttcaatttgtactttgctttggttaatttagataaccaccggtgttaaaccaaaccgattagcatccggttggctagcccaaaactaggcccataacgagaagtcatgggcttgctttcattagtcaagttttcatttatcttcttaccatttattttccaagaaaataaaaaacagaaaaaattcgtggaaacgccattaacgagatctagcacaaactcgtagtgtggtgtagaagaagacaaaagcaaggagcttcatattaaaaccctagagatatttgtttctccaatttcaaaagacgagacgtgaagaagacgatcgaggatgaacattttcagattagctggtgatatgactcacctagccagtgttcttgtcttgcttctcaagatccacaccatcaaatcctgcgctggtatgtacatttcctcaattcgtttctgaaatttagctgaaatgcgattagattagcctaattctcgat

SEQ ID NO: 62955 - DNA, 2017 bp, Arabidopsis thaliana landsberg
gacaagaagtctcccaagagataatgacccactaatacccaaatccatagacgcaatctccctctatatatccatttctccaagcgaaagcaaaaaaacattaagccaagagccgcatatacgaaccaagaacacatcatcgttagttctaattatgaagaaggatacatgcaaggaaggatcatcaatctcgagaaactcatcggtgggatactatgatgaacggatgccagagggtgttccgttcgagtgggagatgcagccagggactcccattaatactcaaccacgggaggttgttcctccattaagtcctcctccagctatgctcagcctcggcctccccaagccatccatctccatcgaagagccaaagaactttgtgtttccaacgaagctgaagctgcggaattggaaacatcttcattgcaagagatatttttctagattgactaacaaaatggttttgtcttcaatttgtttgtaccctgataaacgctacatgtggaaaaaatgaatcaaacgtatggaaatgggccggggtcgggcaagattttttttataataataacaattttttaaaaaagttgaggacttataggcctattgacaaagattttctagtaaaattttctatcataggttttaccatctaaacagctagcgtttgcttttatgttgttctaaatctgttaacagtgtttttaaaaagtaaaaaaaaaatagtttatcagttaaacaaagtgaaccaatttcaagttagctgcgaatactacttagtagtactacgattattgttaatatcagaaataattgtttatcaaataaagaatgaaagttgttaaaatctctgatcgtgtattttttgtcaacgaaatgttcgtattaactgaaacagaaatgtcaagttatacgtcgtcttcattaactctgtctctgaccaatatgtgtcgaaataatcatgttctgatttgtttgtcagaaaatcagcggatcggaacctctgtccgggggagaggctgcttggtttatttgatacttttatcatttccttaatcatacccccttcattttctgaaactattttcttacatttcttttgtttcataattgactgcaactctccaagtattagtatcaaatgtaaactttcataaaattaattttattaatcgctccagtacacaaaaacctacttttaacgtgaaacaaacatcttacttagttaccactacaatcatctaactaaccctatttactagtatttgtttttgttttattctacaagattttgaaagtttctagacatgaccaaaccggattctaacaaaaccgactaaactaaactcttaactcttaagtgaactaaaccgactaaactaaagtcttggaccattcccctaagtgcaacacaaatcggccacgatctaagcgaacgatgagatattaaatgacgaaaagatggacctaacgaccaacgcctcctccgaatcaatagttaatgcttacccaactcttttccttatttttcctctctctctgtttgcattgtttatatataatatgatcggagccaaaaggtagagaactatcacttcggctaattgtgatgaagagtgttttaaatcattagtttttgaggttttcagattcgtttcatacattgaactcactggttctttgtcaaaagaaactatcataaaaaagattcagaaatagcgtttccttcaacagcttctcaaatggtaagtggattattctctatcaaacttgtaattacaaaaaaaaacttttaacaacgtttaataactttcaaaaacttcacaaattaatgttttaatttttaaaaaaacttctcaaatgtaagggtgaggcatagatagtttatacttgtaatcataatttagtttttaacaattctaagttctaactgttagagattgtacactctaattctgatttatcgtaattttgataaatcctgaattctaactgtaaaacccctaatatagcggat

SEQ ID NO: 62956 - DNA, 144 bp, Arabidopsis thaliana landsberg
aaccaaaaacaaaagcaatcagtagaagtgtggactcaagaaaactaaaagaaaacctccacaaaccaaccataaaccgatcttacatacaaataaagctgggcagcggagatacgatatccgccctaaaaatagagcgaacta

SEQ ID NO: 62957 - DNA, 1100 bp, Arabidopsis thaliana landsberg
agatatatatacatgagcctcactactaaataaacgcacagatcaaatccaaaactcacgaaatccaactatacataacaagctgagaatcataaacaacaacagcctctaaaacagcttcatacgagtggaaaaaaaaaaacctaaatcaagcaggagtgagctacagaagccaaatctctcaaaaactttcacagattcgtaagattagcctagaaactcagcaatatcgaaccacagaacagaaacgagagagctgacgataataacgccgatcgcagcaacgaatcgtggatctactacgaaaaacacatcattaagcacagatcaagccaagcataacaatgatccgatcgagtcaagatgaaaatggaagcagcaacgacggatcagagagggagagagagagtttccgtcataccttgtttcgaggaaggataataaaatctggagaaatgcgagtggctggcacgagtaagacacgagtactactttttatgagagcgttgaggagaagaaatgcgaaatatatagagtcatgaatgagaacgttctggtagatctgtagatgccgttagatgacggatatcgtgtggtcaaaatttgccaatataattgacgatcatgattaaacgcacggctttaaaatggacgttcggatcttagggttggtggtatatagatgggaaaagaataatccttcaatattattaggaaataattggcaatatgcaattggaggatacatgcttcgtgtggagggcccactaactttggggaaattatcaaaaagggcgttgatgttgaattttcttcagtaaattgacgaaattaggcatcagaggacttttattgcgaacacgttgggcagtggtatttccgtgatttcatctgtcgcaggtgtgaacgcgtctcacgcagacgaagatcccaattggactaaggatatgataaagtcacagcagcagtgttattaggtttctcacccatcgctccttgattggtgggtcataaaccaatgcggtttagacctagcaatgcacggtttggttaattgtccacatttattaagtctgcgattcggaattttgaatcgggta

SEQ ID NO: 62958 - DNA, 1283 bp, Arabidopsis thaliana landsberg
aaaaacctacagcgaaatctattcctgctgcttcacatatgaattatactgctcctgccataccacaatatatgactatactcacccaaatcaccaaaaccaaagatcatcgctaaaataaagttgcatacattgaaatttcataaaggaaactatctatctcgaagaatgctaaatcatatcgtgacataccgattccataactcaacctaacaatagcaccgatcttatcccaatccttaaaatccccgccgcttccgccgacaaactcgccgacggaagtaacctcacctgaaggtccagctaaaccgccactaccagcaccaacaaattcgccgctactgaaacttccaaccgacgttacatctcctgaagtaacagctaaaccacgcgccgccgcatctccgtcgtcgatcacttcgctactgctctgtccagcggaagacgacgatgctttaatcgaccttaatttctctaacgaaagtccgtttaaccgtgaatttctcttcccgctacgtttcttcaaatccgatctcgaacacgccggagaatcgaaaagcttagaactactcctaaatccaccgcttccgctactacaccaagatgaagaagaagaagaagagagagtgactcttgtggaactacaagacaataaaggaagacccatttataacatgcgacaactctcaggcgaaattatcggaataacgccggtgatctcgccggagagattctcttcttcatttagtaacagagagagcgagagagaatcggtgaccgcgcgtttttattttctcattttattgtaataaatagaagtggagactttggaccgttggatggtagagaattatttgatctaacggttgtgtatagtttagtaatagagaccacttaaatttgacaaagagtaattgaacttgactacgttaccttgatcattgattttgatttgtaccactttgcatgtctacacgttacccattcgtttttgtgcagcacataaaatgggccatagttttagttaatgggctttcgtcagaatgagactcatatccattgcttgacatcttaacatatatgaatgagactgagcatgtataacatatgtatcatgtgggtttcccataaggtgtttcttttgggaggcgttactattacaacatatgtaacattcttcgtatttttttttacacaagaaaatgttgggttttgttaaaaatgtgaagtatatcctacgaaaaaggatacacaagagttgtgcctaaagggatcgttaggat

SEQ ID NO: 62959 - DNA, 574 bp, Arabidopsis thaliana landsberg
tcaaactatttcacactgcataatgtatttgcttaaaattatttcatgctcttcttataaaataaatatcgtaatttctatgaatttatcagcgaaagtctactaggtatttcaactactttcaaaattattatcaaatatttattatttggtgacaaattaatatcatgaattgattttgctatatattactacaagtctacaactctaatcaacctattttaagctataaaactacatctaattaaactacgcaatgctttaaaaaaaaaaattgtaactgcacatttctatgtagtcatgtattttaatagactaccatggtctggctttaggacgatcatagatcataaattttgtctaataatatcacaatattatggaattgcaaatgtcaagaatgagagtattctcgactataatgattgtgatattattagacaaaatatagggtgatcgaaaaattatgagtgagatcctttttattaaatttaccgtattgaaaatgggctccaaaacttgtttcttagaataaattttggataattatacaaaacaataatattccaaaatg

SEQ ID NO: 62960 - DNA, 531 bp, Arabidopsis thaliana landsberg
cagccaacaggacgggcttgccattttcgatcaggatattgccgagatgcagatcgccgtggcaatggcggacagagccagcttcaaaccgcttcaggatatcagcttcggccccggcataggcgatgcgcatggcggcatcataggcatcgacggcctcagcaccgagttgatcccgaaaaatcgcaatatttttcctattcgagtcaataacatattttacgttattaacatgttggatatcattgcaaacctctgatccggcatgaaaacgcgctaccagttggccgagattgtgcataaccgtcaggtccggggaccacttctcctgcaaagccccttgctcaccgagaacgcctgccgtatcgaaccggcgcatgaccaggatgctttcgccatcaatttcttccacaccgagatagatatccgccgccatgcgctggttgaagcgcagctcccgcaacagggcggcacggcgcttttccggcgtagtgaaatcaaggaagccgtaatcgacgcttttcttgatct

SEQ ID NO: 62961 - DNA, 1408 bp, Arabidopsis thaliana landsberg
  unsure (1)..(1408): unsure at all n locations
acatccataaagaaatcagaggaagtagcataaatgtacttggtttatgaataagttataagtcaagaggattggaaaaggaaagaacatgtgaagtcactacaaacctggcatttgcagcaatcgtttgatcatcatgtggaccattcaagttttcagtcacgcccagctcttggaaattaaacctcgcagactgtcttctcaaagatatcctgcggaaaataaaatcgcattagataacagtcttaacactttagtctgtaatactgcagaatacagacaattatctatcactacaaaacctgcttttcccgattatctcttttgtgtcatgtggttctactgcttcgggtttagacccggtagactgttcacgtgcagagcatctgaaatgacatccacaaagaaagaaaaagaaaacaccgcaaatggcataagtgtacttggttcagggatatgttagtggaaaaggaaataacatgtgcttctacaaacctggcctttgcagcaatctcttgatcatcaggtaaaccgttcaagttttgaataacgcccagctcttggatattaaacatagcagacctgcaaaagatcatatcgcactatatcaaccttcagaagggtacagtagttataaacagagcctaaccttattgccgacctcctcctcttggttgtctctattgagtcatggaagctttcagatggctcaggttcttgagattttaaccgggcagaacgccttctcaaagggaacctgcttgaaacaaagagtgcaaaatcactagtcatttccaatagtcttcacaggctttagatgttagtccaaaatttgaaactggaaaaaggacagttaaccaaccttgactcgtataggctttcagatggctcaggttcttgagattttaaccagtcagaatgctttgtcaaagaaaacctgtttgaaacagagaaagtgtatactcacaagtcagttccactattcttcatccactttgaatgctattcccaaatttgaaagtggaaaaaggcagttaaacaaaccttgcatcccccttaatttctttggcgtcaaccaccttttgcaaggtttctgtttggctggcttctcgagtcttagaactgctactctgtcttcctgcacaatatctgtagcaaaaacaacccaaaaaagaagaagcaaaaataagatagtgaaatacaaatatatatttacgttatctaatcgctttgaataaataaaccttttgctttggacattgtcatttatatggttntcagcatcattgtcactatcagagaccaacttcttgttgtcaatgttgtcttccatctgacatgtctctcccgatctgccaattatatctaatacctcggaattggcgggattcttccttccagaaactct

SEQ ID NO: 62962 - DNA, 657 bp, Arabidopsis thaliana landsberg
  unsure (1)..(657): unsure at all n locations
nnnnnnnnnnnnnnnnnnnnnnnnnnnnnnnnnnnnnnnnnnnnnnnnnnnnnnnnnnnnnnnnnnnnnnnnnnnnnnnnnnnnnnnnnnnnnnnnnnnnnnnnnnnnnnnnnnnnnnnnnnnnnnnnnnnnnnnnnnnnnnnnnnnnnnnnnnnnnnnnnnnnnnnnnnnnnnnnnnnnnnnnnnnnnnnnnnnnnnnnnnnnnnnnnnnnnnnnnnnnnnnnnnnnnnnnnnnnnnnnnnnnnnnnnnnnnnnnnnnnnnnnnnnnnnnnnnnnnnnnnnnnnnnnnnnnnnnnnnnnnnnnnnnnnnnnnataattgggggttatttgaaacctcaaataacaaatcgcgggttctccccttaaaaaaaaaaaagggggggggtggttaaggggggaaaaaatgggccccctccgcgtttttttaaaaaaaaaaaaaaaaaagggtgggggcgccaaaagggctaaacccaggtccgttcgtttttttaaaaaaaaaggggttttttttctttttttaaaaaaaaaaacacttccccaaaaatttttttttttttttttttttaaaaacattggttggcgggggagaaatcttttttttaaaaaaaaaaaaataaacaatggggggggcaaaaaaatttttttctttttttttt

SEQ ID NO: 62963 - DNA, 1435 bp, Arabidopsis thaliana landsberg
tcctaccatatacgcgtaagagttgtttatataaatgctttttatttttattttcatgatgaagcaaaaagagttcaagaatggaagattgcaataaagaaggagctgagtgcttttatgaagaatgaaaccaatttcgatagtcatccctacggcgtcatagtttcagaccatcatctacatagtctctctcaaactaaatcgattcgattttctctgaaaagaaatatgcacccgttattaattgtgaaatatattaaactaaagattaatgtaaatttaagttaactgatttgaaaaatgtcgatgttagatatatttccaggcgtagacagtactgtctgctagtttatatataaatggtatcgagagatatcgaattgaacatgccgtcaaaaaaaaaaaagatatcgaattgaaaactttcacaactaaactgtatgaaaatagcaataatatattgcaaaatttaaagagatatattatagataaaaccagagttattcaacattaaattccgtaacaaatttcgaggcgagagaaaattcgtttcgtagtatacttgattttaactaaagattttaaaatcattgatccaataacaccaaatttgatttaaattttcaaataagtaaaattacacaaaccaataacgtcagttactagtacatttgacttttttcagttgatccagatgcaatcaaagtagcaataatattatgaaatatggatggatccgacaggcgccgctaaagccaagacggaataataaaatattggagaatttattacctactaaccaccacatatggtgtcgttgatatgagaaagtctactcttgagaaagaaagtcgtctcttttcatgttttcaagaaaattaatttggtagagagagtcatggatccaagccaagaaattgatgaacgtgtaacgatgttgaatatagaagaaaacgcttccttgctattagaaaacgtggttcgcccaagtcttctgcaggattcatcagctggtaaatattgttgcatctaccgaatttctcgcagccgcgaatctacattaggtaagtacctcacccccttataacttttttaaattttcgtataactgctaaaatagaagaaccaatttttttttttgcaatcaacgtatcttttttgcaaataaccaatttttttttttaattatcaaagtattaactctttttaatatgattatctatagctttgagaaagaaaaaaaaaacagttctatgttatatttgtatttcatatttgaaaaactatagtataattttgtgtgtttattactaccatttttattttagttttacaattgcatttggagatgtctaatctatatactaaaaaacacagtaacatatgattattggttgatgctggtaaaatgtttttttagatccgtcaatccctt

SEQ ID NO: 62964 - DNA, 175 bp, Arabidopsis thaliana landsberg
caaaaatgaaacaaagggaagttatacaaaataaattatactctgtaaagattgtatagtactaatctttaaaccaattctattaaccacaaaacaaaagggatttataaaatgaacaatgtaccgacctcatgattgtaaatctagtgaaaaagtttggatgcccgagatattt

SEQ ID NO: 62965 - DNA, 704 bp, Arabidopsis thaliana landsberg
  unsure (1)..(704): unsure at all n locations
agataacctgtatttttcatggatagccccggcttttctattaatgcacaagacgcccgctttgaatccggtcccggtgttccagctctacggcgagacccacgcctggccgacacccgaccccctgcactgcgagaccatcccgtcgcgcagcagcctctacgactgggagatccgcccgcaccgccacgccgacctggtgcaactgctctacgtgcgcgccggcgaagccgagctggaagtggagggcagcgtcacccgcgtgcgcgaggccacagtgcaggtctcgccgcccctgtgcgtgcacggcttccgcttcaccgcgcagatcgacggctacgtcctcagcctggcccagcccttcgccgaggaactgctgcgccagttcnaccgcgccgtgctggaacagccgcagtgctacgcggtgggcgaggacgagcgctacctgagcaccctgttcgactccatcgagcgcgaatacgcgcgccaggagccgggccgcgagctgatgctgcgctcgctggtcagcgccttgctggtgtggctggggcgccgccacctgcaggccagtcacgcccgccagcgccgggccggaccgaggtcgcgagcacctgccggcattccgccggctgggggagaaacacttgcgcgagcacctgccgatcgagcgctaccccagcgcctgggcatcagcgcggggcacc

SEQ ID NO: 62966 - DNA, 389 bp, Arabidopsis thaliana landsberg
  unsure (1)..(389): unsure at all n locations
tccgnccatccattctcttctatggactgaccgactaccgctgcggagaagggatgaggttgaaataacggcgacccgcctcgcgctgcttcagccaggccagcctgaataatacattcgtcacgactgtggcaatgcactcgttcccccagatccgctgcgggggccgtcgcataagcagagcctagcaattattcgagcatggacatgtccaaaccaaagagaacaagtcttgacatcatcccgcgccgcgcatggtatggggactgcctgagacaacggtcgagatttgcgatgcgatgcgccgtggaaatgcaagagcaaattcaatcaaagaaatctcatactcacttagaaactttgggagcctggcgggcagagcctgcgac

SEQ ID NO: 62967 - DNA, 534 bp, Arabidopsis thaliana landsberg
aacggatcacacacgtttaccgcctttaccagcagtcctaacggtagcacagatggttataccacctttgattcttaaacaggctcctttaccattaccacttccacttcaggagcagccctgcctttcagcgaaggatttgaaggaaccaccttcgcaccaacaggatggagcattgtgaaccccgatgccaacggcacctggacacgtactaccgcagccagcggatttgggaccagtacggcctgtgcgcggttcgataacctgacccctacgaccagcattgccgggcaaagcgattacctggtaactcctgccctgagctttgcttcagcatcaggtaccctgcaaatgacctttgatgtggcgtatgcacgttacagcgccacttactacgattcattgaacgtttatatcaccaccgactgtggcgcaacatggacgcgtttgtacaacaacggaggatcggcactggctactgcccctgacaataccggtacctttgtaccaactgccgcacaatggcgtaccgag

SEQ ID NO: 62968 - DNA, 1892 bp, Arabidopsis thaliana landsberg
acttgtctgattaatatctcgatcggttaatttgattaatctatcaaaactgttcgtttaataattcaatccgtaaatgtttttaccttcttggttatcggtttttgcttgaagtaaagtgacagtaatagccagagagacgatcacaaggcgtacgagcttctgcgtcatcttgatttgcaagaaagatagaaaatgggtttccaaagttagggttgtgctttttggtttgcttcacggacaagacgacggggtttgagagaatgtgtcattgtgattggatttagggatagagacattgttgaggtttggacaagaaatgaccattcacgaccattaacttttgctgaacaattgtttactaattttgatttattttagatctttgagggagaacgaaagatgcgcaatgacggtgaaaatgcgtgtgtttaaaaaattcaattaaccaattattaaatatttgttttgtttttttggaaattgtggaagtatatagatacttgggcttagctgagtgttaggctaatatctactctcatatataagcccacacaaaccctgtcacacgcttaatgcgcttaatgtgagcgatcctaaaaattcttaaaaactcgaagcctttggaatacacttgatatgtttctgattaatgccttagtttctgtctgatcaatactttggtttattagattatattttttgagaaataaatttattaaatttttagttaataagtacatgaatattttccgataataaatgctataaaggatatttagttggttgacaaaataaggttttgaaaaaagaaaagtaaaaaaaagagagacaaaaaaggacatttagttgttaagaatgactttgactaaaaccacatatttctaatcttccccaacgacaacaaaatttttacacacagttttttactttactacacaaattcttccacgttgacaaataacaaggctacttattacacacccattgaagctttaacagtagtggactatactatagtatttatatttaacatttacatgtacctatacacatcttatacttatgtataaaattatttaaactcttttataagattatttatatatatacagtattctgaaatatgttttttttaatagaaattaagtaaaaacgatggaaatgtttttgtatatgtttatttagttccttggcgtatattttgttcataacgtatgttaaaatttataaatgtttgcaaaaaaggtataatatatataatctgcacttttcatgaacgtttggaaacgaattgtttatagtgattaagtgattagtgacaagacgagaaaagaaaagaaaaaagtgattagtgacaaaaggtcaaaagcagtatacacgtgtatattttttcttagaaccactagtatatagaaagaagcaatacttattttagttaaaacattaaatttctattcgtagaggtgggtctaggtttagtagttaaatctgcttaatatttgtttggtaaaatacaacaactaggaagatgaacaaccaaattttggataattaaactataaatagctatcagtgttatcaattacagtcagagtagtcttgactaaaccctaaatggtacaaccacacaagaaccaagctctagttagctagtaccatctatagactatagtgatcaatactatacatcacaaacaacttttctaagtattcaattattaatgcatatatcataattaatgtttacatagatgatttatttcataaatattggatatgaacagattgtatatcacgcagttttgtacgataggtaaattgcaagtagcaaatagaagaatctacaataaacactaattgacggataagtgacgagtattttttaataa

SEQ ID NO: 62969 - DNA, 450 bp, Arabidopsis thaliana landsberg
  unsure (1)..(450): unsure at all n locations
tgaatatacctccccttgttaagaaaaacaataaagcggcgatactagtaattttgtttttcggaaattcaatgtcacgtcagcaagagtgccatgatgttattgatttgtcaaaaatatttgtggaaaacaataaattgaataacctttaataaaaaaaaaatatatatatatttgtgtggtaggctgtacagtaatgtagtgctatgaaaagaaaaaaacaattgtcggctaattgttgagttttattattgttggaaaaaagttgggttttaacatgtgatatcatgagatcacgaacacttttagtaattagtactttgaatttaaaaagaaatcagaaaacgttattcttaaaaaaaaaaaaacacggattatcgatgctttcccgtgtggatgactgncctcttttacttaaccgtagatcatgggggttcagcttatgaaatc

SEQ ID NO: 62970 - DNA, 445 bp, Arabidopsis thaliana landsberg
gacactttttgatattaagcccgtaccacatctttatcagctttttggcatatcgactctatattcttgcaacttggattgtggaaggctcgcaatcagtttggcttctccatttgctgaactcggatctgcatattgtgatttagccctaccattatcacttgcaagaagctgcttgctctgcttgccatctcttctgcgtctttcattgccaatgagcagcgctgatataaatgcatgacgcggatagctgcgcgcccaaaaggacgtgacaagaagcttcaacaagaacgggtcgtcccactgtaaaggattgaagacgatcaagagggagtggtttactctacggacactcgtacaaattgggtcgatctctttccctcatactcacttgcacattttgatgtcaaaactgccacaaagcagacattcatagagctctgca

SEQ ID NO: 62971 - DNA, 507 bp, Arabidopsis thaliana landsberg
gggtatcgtattaataaatactagtatacactaaaaaactaaaaatatatacttaaaaaatacatacactttagatcgaaaaagaaaaatacacatatcgtatatgtacgcgtgctttatacatgtaggacgatgtctcacgtggcatgcttacatcataaattccaccatatttatccaccattttcaagttgcatacaaaatagagtagcatatcatattaaacttacaattatataaattagttgaaaataaaaagccttcgaactaaattaatgatttaaaatattcttcaaaacatttttttaataccagagattttaaataatgtatacaactaggcatgtacgaaaatatcacctattctttctttatatatgatgtatttttggataaaatactttatattatatgtttctacaacaatagttatagatttatattttaatgtatctctacaaaataaatgataggcctaggcaagataacctttatcatttcacatat

SEQ ID NO: 62972 - DNA, 737 bp, Arabidopsis thaliana landsberg
agtgagatagaggataaatcaaagttttccttatccaggctttttggatgtcttttacctgagcctcctcttccaagcctgttttgctctcagtcaggatttaccagcactctgcatgtgtaggcacgctcgcctgcttccttctgtagtggtaatgacaacctacatttgtattctgcagttgataaagcctgttcgtggtacaatacctcatttgaccctcccaacaactgtagggtagatgttatctacatgaaattgagtctcagagagggtaagtaactcacccaggttacacagtaagtaacagagatgacacacgagttcagcttttctggagctaagttctcctcttcctccacccatgcccagccactcatatcctaggtgtagatcagaaggttcttaaaaatattgttagactgagctttaaaagcagtttggatcagagattttcattgtctgttttgtgttcacatggcagtcgaaagtctctaggttccattgcattatacccttcttagaggctccagaataaatttttttatagtggtggggaaaagcccttattcttagaataagaatatagatcattggtaatagtaatcagttccatttcttatgagatagttgtcaggattaaatgacataatgaatttaaagtatattgcctgtcatagcaagcactctgttactgttagctattatcatttatgactattgctctatgttgtttt

SEQ ID NO: 62973 - DNA, 955 bp, Arabidopsis thaliana landsberg
ccaaactattctttagtttaataattttgtcctatattaaacaaaatgatcactttaacccccaccaggaagcttctgaccaaaccttcgagttaggctttgtcaacatgccacgtgttcaacagtccttctcttttctaactctctaaacatttccttccgacagatttgcagattgaagcttaaataatcaaagacaagtaccaaacacagcaacaaattttccagacgatttgaatttgatcatctcgaagaaacttcatcgcaggttcgttcgctcctctcttctttttctacagtactcaaggatcagcacatttgaatttatagatccaatttattgtaattgttttcttccctgatctctattcgtttagattttggttgattgatctcgattcggagtttacgattgtgtactgtttagtattatatagaacgatggtgactcgaaactgattcggaaatcaaattagggttttttagggcttcgttaaattaagcaaagtctgggaaaattgtgcagagaatatggacaaattgaagatagcagaatggggagagaagctgaagactggtggagctcagatgagcagaatggtgagtgagaaagtgaaagatatgcttcaagctccaaccttggaatccaaaatggtggatgaagctactttagagactttagaggagcctaattggggaatgaacatgaggatttgtgctcagattaacaacgatgagtttaacggcactgagattgttagagctatcaagaggaagatctcaggtaagagccctgtgagccaaaggctgagccttgagcttttagaggcttgtgctatgaattgcgagaaggttttctctgaagctgcttctgagacagttcttgatgagatggtttggtcaatcaagaacggagaagctgattccgagaacagaaagcgagcttttcagctta

SEQ ID NO: 62974 - DNA, 447 bp, Arabidopsis thaliana landsberg
  unsure (1)..(447): unsure at all n locations
gcaccattatctgtagaacagggctgattggcagtgtcgaggtatactttccatgatgcattggcattgttttttttctccgcatcactattaccctgcaatacaaaagccgtctggttgctcacctgcgccacgggggcatatacgcccatattccataccagcgccgcaataatattattgcctgcatgcaggtaaggcacaatatccaccgttacaaaataccagttatagagatcgccgcgggcagggcctgcgctcacctgtttgccgcttacgaataaacgattccgggtatccgcactcgcatgcacgatgaaagttgccggtcnnnnnnnnnnnnnnnnnnnnnnnnnnnnnnnnnnnnnnnnnnnnnnnnnnnnnnnnnnnnggggcaggtgatccaggaagcagaccatcctcccttgggcaaagaagggttgatat

SEQ ID NO: 62975 - DNA, 428 bp, Arabidopsis thaliana landsberg
  unsure (1)..(428): unsure at all n locations
gtgggcgccttttgcgcctcttcgtacacgcgaagctcggtctcggcggtcgtttgcacggcctcgaggttcagcgttttcagcgccatgtgatcaccgggcagcgcttcgtagtaacgctggcgatcgatcgagtggacgatcgcgatcggatagccgccctcttggagcatctggttcgatgcgatgcggatcgtgcgaccgctctctttggcccacgggaagatcgccatgaacttcgagtggagcgacgcgaccttctcgatcacgtggacatcgcgtgtcgccggatcatcgannnnnnnnnnnnnnnnnnnnnnnnnngggaggattttctcgggcgctgcgatgtcgtgatagtagagccggtgcagcgggttctccttgcggaacgggagacccttggctttctcgttggcgcgaggatc

SEQ ID NO: 62976 - DNA, 1255 bp, Arabidopsis thaliana landsberg
  unsure (1)..(1255): unsure at all n locations
gttatcatgctacggtttaagcaattatactatcagatatccgttaaatcaattacttttatatataccgggcagtacaagatctggtttctctctttcccctaggttctgaggtcatgggtacaaaagactctaatgtgcttaaagattatgttaatattagatttattttggctgtaagtttgtattgcttatctatcttgtatgttctccctttgtcttgttgtaggagctacgtgcctaccaagcaaatatagctacagtgttgcgaaatggtactgatataatatgtcgagtgatttttattactactaactataatttaaactgctgattattccgactgtttttctgttggtatctcctctagagacactttgtatcttgtttagcaaacttttcttctgccaagccattgttttacgttaacaattccctgtgttgtcttaaaaatgacagctattgacattcagaattaggtttttgtaaatattttggcacatttttttttttcttttaagtttttagcttgggacattgttccagttgtagtaggatatctgcaagttttttctaggttgttaacatgttcataattgcagggtgcttctctatcctaccagcaacagagctggttccaggcgacattgttgaagttactggtatgtttgttctactatacctagatgatattttgtggcaatggcttagacttttactagattctaaattctgctttttttgatgtgtggatgctaaacagtgggatgtaagattccagctgacctgaggatgattgagatgtctagcaatacgtttcgagttgatcaagccattctaactggtatgtcatctgtgtcaccataagtcataactcttgatatgcgtagccacaagaactacctatgcctattggtacttagtacaacttcaagccaatcgttttctccaccatttaatctctggaatgaacatgcattctcttattacattatagcttcaacaacaatagtagattccttttatgtaaataattttttttttttttttttttgtcaatcttatgtaaataaattcaaagtgaacatttacagtggactatattcatactctcactactaattgttttccccggaaattgcaggtgaaagctgttccgtggaaaaagatgttgactgtactttaacaacaaatgctgtctaccaagacaagaaaaatatttttttttcggtaggagttataactcgnagctgca

SEQ ID NO: 62977 - DNA, 479 bp, Arabidopsis thaliana landsberg
tattaaagtacggttttttttttctatagggcatagtattgaaaagcctatgtgtcatagtcatagtatctaaagctttagtgatacccattagattataacagttaaagtctgtacagttaaagcctctagagttaaaatgtttaccgtgaaagactctacagcgaaattaacactcattaacaatcggcccctagattggcacccgagctcgttgcacttttttaacttttaaatgatgactatgtttgggtaaaaacctaatctgagcatctataggcgccaaatcaaagtgaaaatgttattcaccaatatcccatctcgaaatatagagatatttgccctttcatattctatcttgccattttaatgatcaagtctcatttctggccggtgtcattgattactcttcctctgtagccttctctggtatagcctgcatcttcatcttccttgaaaatatttgaaactttgcttac

SEQ ID NO: 62978 - DNA, 609 bp, Arabidopsis thaliana landsberg
gtacggctgcaaaagggcaagccataagtcgtcctccagcttggatgatgaggcaagcaggaaggtatatggctgtttaccaaaagctcgccaagaaacatccgtccttcagagagagatcagagaacactgatctaatagtggaaatctctttgcagccttggcaagcattcagaccagacggtgtcatcattttctctgacatcctcacccctttacctgcattcggtgtcccttttgatattgaagaggtaaaaggtcctgtaatccaatctcctatccgaactgaagaagatttgaagagattacatcccattgatttcgagaaactacagtttgttggagattctctcaagattttgagacgagaggtggttttcttcttctttttagccttcccctagacttgaccaaatgtcttccagtttgtgaaaatggattcttgttttgaaaggttggggaacatgctgcggtgttgggtttcgttggagcgccttggacaattgcaacatatattgttgaaggaggaacaactcgaacatatacagtcataaagaatatgtgccacactgcaccagatgtattgagagctctattatctcatttaac

SEQ ID NO: 62979 - DNA, 1875 bp, Arabidopsis thaliana landsberg
atctcccacacacaacaaaaaaaagcttaaggaaatatatttaaagcctaaaaataaataaatctctaaaacataaatgcattgttaatttctctcttgcagacgtatatatataaccatgtaactagcaacttcacatattgagaattcttatcaacaattaaacatctcgataatggcttcccttggcttgatcctatgtctttcctcggttcttctcatgagcctttgtcaagttcctacagctattgaagatgaaagaaaagcaagtcatttctgttttgtttcgtaaacatatataagaacaactatccacgttcctctctttaacaaaaaagaaaaagaacaaaatctatcgacgttcttaatttgtattggcctatttcattcgttgtgtcatgacgcaggtgtatatagcttacatgggagctcttccttcaaaagtttcttactctcctatgtctcaccatcagaatatccttcaagaagtcatcgaaacaaggttttaatataagactctcaaatctcactaacccaaatcttgttgcttgttgtttacgttatactgttttctctttttgatcggcagttccgttgaagattatttggtcagaagctatggaagaagtttcaatggttttgcagccaaacttactgaatctgaaaaagataaacttattggtgagttatataatcatagaagataatgaaactcgtgatcatgatggtttatttgatgatgtcttgtgtaatttgtaggcatggaaggtgtgtttcggtattcccaagcaccgtttataagctttttacgacaaggtcttatgagttcatgggacttggtgacaagagcaacaatgtccctgaggtcgagagcaatgtaatagtaggtgtaatagacggcggaatctggcctgaatccaaaagtttttcagatgaaggcattggcccaataccaaagaaatggaaaggaacttgcgcaggaggaactaatttcacctgcaataggttagtaacatttttatttttattctcaaagtttcttgcgtgacaagaaaagagcaaaagataaagattaactacccggccctaatccaaattctactgcagaaaggtgattggagcccgacactatgtgcacgactccgcaagagacagtgacgctcacgggtcacacacggcttcaacagcagcaggaaacaaagtaaaaggagtgagtgtgaacggtgtggcagaaggaactgcaagaggtggtgtgcctttaggtagaattgctgtttacaaagtgtgcgagccattgggttgccatggtgaacgaattttggctgcgttcgacgatgctatagcggatggggtagatgttataaccatttctcttggaggcggtgttactaaagttgacattgaccctatcgctattggatcatttcacgcgatgaccaaagggattgttaccacggtagcggttggaaatgccggcactgcactcgcaaaagcggataaccttgcaccatggctcatatccgtggctgctggctctactgacagaaaatttgttactaatgtggttaatggagatgacaagatgttacctgttagaagtctttcccttgttcagttgatatatgaatgtgcttgttgtcgtcatcatggtgactaattaaagttttatatgcagggaagatcgatcaatgactttgacttagagggaaagaagtatcctttggcgtatggaaaaactgcttcaaataactgtacagaggagctagcatggtaagtatgtgattcaaggaaatccacaatgaccttaacttgtgcgtcaagcatttcacttgtatggatatatctttatttattggcattcattctctggtaggg

SEQ ID NO: 62980 - DNA, 498 bp, Arabidopsis thaliana landsberg
  unsure (1)..(498): unsure at all n locations
ctgaggaaggccactgagcctgacgcaccaccgggaaacaagcgcctcatgagtacccgcaccgtcctgttcaccggcgccacctccggcttcggcgccgctaccgtggatcgcttcgtcgccggcggctggcgcgtggtcgccaccggccgccgcgccgagcggttgcagcagctggtcgacaagcacggcgccgagcgcgtccatgcgctggccttcgacatgcgcgacgaggccgccatgcgcgccgcgatcgccagcctgcctgccgagttcgnnnnnnnnnnnnnnnnnnnnnnnnnnnnnnnnnnnnnnnnnggcaccgcgcccgcgcagcaggcggacctggcgcagtggaagcagatgatcgacaccaacatcaccgcgctggtgacgatcactcatctgctgctgcccacgctgatcgaacgacgcggagcgatcgtcaacatcagctcgatcgccggcatctacccgtacaaaggcggcaacgtctac

SEQ ID NO: 62981 - DNA, 525 bp, Arabidopsis thaliana landsberg
  unsure (1)..(525): unsure at all n locations
atatttcttcgaaatgtatccatgaaaaaaataactccatgacacacaataaaacctcaataaattagtattgctggacattgcatatttgttattttatcaaaatagtaactgaaatataaaaataattattgtttatttacataaatattagtaacaaaattttgacaaattataaaattttactgtgagattatagaaagatacaagtgagacaatttgatcaatacaagattataaactaattttacagtatcaacttgttaaatttaatgttaataaatacaactaatttaactagttgaatatattagagtgatttatttagtcctccacaaaatttaagaaaaaattttattactctataattcaattttcttatctatacatttcttctataagttccactattttactcaagaagtttcacgaatcataccccacaacaaaatcttattgatagtgcataagttgtncagatgcaatatcaacaaatctagacataattaggggtcaaaataacat

SEQ ID NO: 62982 - DNA, 540 bp, Arabidopsis thaliana landsberg
gtccatgttcatgaacccatctctcatttatggttaaccaattggtacaaaccttaaatatgtcccctctcatggaccaaacacatttaacgaaacacacttttcctaaaatggcaatctacctatccccatcccatcatttagtttattaattcccacactctcgtgattatagattcatcatggcgacaaagttaagtggctaattaatttgatttaaataaagttgtttttacacgttgatgtgttccgagtatttaaacgaaaagatgaaaatgttttattttttctagagataaaactattacatgtttttgtttatgattaataaataaaagtagatcacaaagactttttcaaaaattatgtttatacaacatgatgataaaattaaataggggataaggttgcttcccctaatttttttttttttggataatcatgttgccaaatgatatgataatgatttattgggctataacaacttgataataaaaatattagtgcgataaggatcataggatgagatcatagggatga

SEQ ID NO: 62983 - DNA, 389 bp, Arabidopsis thaliana landsberg
  unsure (1)..(389): unsure at all n locations
gtcttgttccaccaccaatacattattataaaatatctgtaattgatcttacctaaatcatcaaattttgaaagtttctagtgcatttaagtaagacgttgatatatgtatcggcagttctggatatgtatcaaaatataccaaacaaagtactattaaacaatacgtttatataaagttaggtattgattattgactgtagtagtaatccattgattacgaaaaaaactgaaaggtgaaacaatgtcaacaacaacaacaacaaaaaaaccagntgaaagaatatgaagatgaatttataatggtatcaactagagcaactagaccaaaaaagatatgatataatattagaggtatacatgactgattctctattgtatacagcatga

SEQ ID NO: 62984 - DNA, 406 bp, Arabidopsis thaliana landsberg
atgaagcaaagcgaccaacgactccatgcacgttgactctcttgtatcgttcttccaacattttattttttttcttcttcacgtctcttttggctaattagtctttttaggtggcttgagaataatacgcactttagccccttcacattccaaaattacacaattatttttgaattctagtagcaatctttgctctctccattacaatatccatattatgggtttgcttgcaagcaccatgcatctatccatacttattagatcatcaaaataactgacattctcatatttgatcgattccatttatatatattcattcttataacattagattggcaaatagctaacttacaagttatgtgttctggtcttcaaataatcttttcaagaactcaatatatttccc

SEQ ID NO: 62985 - DNA, 1707 bp, Arabidopsis thaliana landsberg
taaattctctaacaattatataaattcaagacctgaaagattcatttttaagcgcaaatgaaaacaattggaatttcacatataccacaaaaaggcaaaagacaaatttcatttttcgaaaagatcacaaggagaatcgaaaaacacactccctatcccttacatacttaatagaaaaccaacaacagaccaacttcttatgtaacttttggttttctctacaatgggaagttagcagatttggcagcgagtctttaaaacttgttgcatcaaccacggccgcgacctgctcctgtttttcacaacatattagagttttagcttaaatcccattgtggcaagacacagatatttgaagtattctagtaaaatcagagttttgtgacaagctttgtttgtgtattttttacctctgttgccacccatcttccccattgaagttcctctgcctctgcctctggctcctccatcatccacaccacgtcctcttccacgtccaacacctggtggttttctatctgcacatattcaaccatcgttattaacacctgaagtattctcaatgtctactctggctaaatattaacacctcagaaaactcgaagcatatctcagtaaaggtacaatatagacatgagtaatactatacctgtgcgtgtcttctcctcctgtactttatcaatcacctgaagagagaagaaaacaatctatgtcaagtcaactcaatctaggttgcagcagtaagaacgtaaataaaaacagcatatgactgtccttatagatgaagatattgtttatggtaagtgaatatagagggaatgaaaaaagtagaaacaatagagaaaaatccaagataaaaagtttattggcatcagaaacacaaaacaaaagggtcaatattctggtcagcaataaccattccctgtgatatcgtctaagacgcactacaacaagaggcacaccatctgctgaacagagttccaacagaaacatgcctattggagcacatatctgatttggctaagcatcatcattccagagagaggggaacaaagaaaaaactagatcaagcaagagatatatacacacacacacaaaaaaaaattacctcatccggaactcgaaggtacttgattgtgttaccacggatataacattccggcatcctccaaaatctatctccgtcctagagtaatcaagcagcaaaatatatgagtgtcagctacacaaaatttcatcacgaagtctaaacaaagtatatttgtatcaacatatgaaaacataagataacctttgatgtacatatgacttcacgcagatggatgttcatccaagtatcacaattcaccaaatgcccattgtatgtctctccattcttaagctccacgagctaccaaaacaaaacaagattcaaaattacagtaaaaggaagttcctttagatccctaatgcaatgctcacttaaactcagcttcacttcatatataacaaaattgtaatcaagggtcgaaattttactcaccataggatgcccttgagcagttttaagcagcgatagaggaagctataaaatcaaaacaacagctttcagttaataaaaattgaaactttaacgcaaacaagaaagaaggaaaaaaaccataagtttgtctagtaacttaccatcttcttaaatcagaagatttagagatccgttaagaacctgat

SEQ ID NO: 62986 - DNA, 409 bp, Arabidopsis thaliana landsberg
gtcatgagcgtggaggaaggaacgacattaaaaatgtaagaaagaaagtgtttctgtaagcaacttatctattttggagatggaaataccgattacctaacacatcactctatgtactcacatatgaaacattatgaattccaatttgtgcaatgttggcaatgactctatggctaggaaacactgcttatctctacataactgaaggattgacccacatgtacaaagccatcagtacaaacttaagctctatctgatctcattcgcgtgacttataaattgtaaataatcaagacttatatttttgcagcgcctgctgctgtgcttatacttggagtgtgagttgcgcttgaaatattgagctgcatgatgctttcgataatgtcacacataaggcttggcgtattac

SEQ ID NO: 62987 - DNA, 1533 bp, Arabidopsis thaliana landsberg
atcatttccttgatggaagcatcggtggagatcttacacatttggcgtagtctggttttgcggatccttccgtaagtccagggatggtgtcgaactgcctgcgaacttcttcaaccatcttaagagctgcacttcccacactcttcattgtcatggcagagaaccagtaaggaagcatggcaccaacaaggagcccaatgataactttaggggtcaaaacatctacggtgtggatccctgcacggctaacaaaggcaccaaagagagccaaggagactagggcagcagagccaatggcaaatccctgtacacaacaaaccagaataacatgtcaaaatacaacacaagcaaaggcaacctgaggaatggttcaagcaagcaagctcttttattaattcatcggattgcagaaagaggttaagaaggctccatacctttccaatagcagcagtggtgtttccagcggcatcaagagcatcagttctttcacggatgcggtggctcattccagccatttcagcaataccaccagcattgtcactgatgggaccataagcatcaattgccaaaccagtggcaatggtactgagcataccaagagcagcaacagcaacaccatacatagcagcaaagctgaagctaacgaatatactgatagcaatagcaaagattggaataatgacggatttgtaaccaagagcaaggccgaagataacattggtagctgcaccagttctgcatgaatctgcaacatcttgcacagggctgcaagaataggaggacataagagttagctctactagctgggaaaagttagtgactaaatacagctaaaatgagtcttacctgtaggcgttactagtgtagtactcagtgacgaaaccaataatgagtccagcccaaagaccaacacaaacacaaaggaatagctgcctgaaatccaaaataatgcaagacttaaaaaagtgcaacgagaaatttgaatagagaaatgcaggaaaaaaacaaaagcaatcatccacaaggaaattaccagttcttgacaactttttgtgttccaaagttgaagatggtaaaggaggtcggtaagccaacccatgacacaatagcaataccaacagtcataataacagttgagataatgagctggttcttcaatgctggttcaatctccttaacaagcttaatctcaaagaagtcagtggcaaagagagttgtgatcaaacaaaccaagattcccattgaactgatgagcaatgggtagcacatggcagtgaagtcgtggttgattccgaaagatgagatcgaggcaacaacaagagcagcgcatgatgcttcagcatatgatccaaagagatcagatcccataccagcaatgtcaccaacattgtcaccgacattatcagcaatgacctgttacataaccaaccaaaataagtctaaacttctattgaaaaaaagaaagcaaagtgttatcacacagtgaaatggtgtacttacagctgggtttctggatcatcctctggaatattc

SEQ ID NO: 62988 - DNA, 567 bp, Arabidopsis thaliana landsberg
ggacaagtcctagtgtacccggtgatagaatttctcttcttctgaagatccagacgacatacacgtgggaccctgagtctttttaactggtaaactcactgctttttttgttgttggaaaaaagacaaaaagtaaaaatacacattgtttcctagcaaatacacattagtcttcaacttctaagaagcaacaaatgtgatctaatttacgctaaaaacattggtctccattacaaacacgaaacctaaatttcacaaactactgcataatctttatttttttctagacttcttcgatgatctccggctttcaacttttctctgagcagcttctaactcttgttcgtttggctcaaagtcagcattgctaccatacctagagacaagtgaagagaacattgaatcgaacttctctttcctattatctctccgctgggacattacagcgtataaatctttatctgcattctttgctgctctgaaagtatagaaatttctaaacaggtcacaacaaagataacttcacagggcatttattggggtggacaatgtaaacaattaaaatctt

SEQ ID NO: 62989 - DNA, 479 bp, Arabidopsis thaliana landsberg
acggtagcaacataattgtatcgcaggactcacataccttgataatactattaactctataacagactaggaggttttgcttgataatggcaggaggctaaacgactaagtgtaaagggtctacataattagaacaacttgatcattgaacgtttctacacacagtaggacaaaatagtactttatattatcatggcgctgtgaaagagttataagctgtcatttggaataatatacgaacttgcttgtacatgtgttgtggacagatctaatataattatcgaaacatgaaagactttgttcccagcaacttggagattagatgtatgaaaataaaatcaaatgatataagagagagcttatatcaagcaaaaacgacgttgttgtggttatcgttagtgactggagctaaaaattgagaataaccacttgctcaatattaaacattcacacatatgtagtttatgaagtccatagat

SEQ ID NO: 62990 - DNA, 372 bp, Arabidopsis thaliana landsberg
atcaaatttttatttttattatttaaatttaataagtcgttggctactttttattgcgtttcagaaatactgttggtttaaggaaaaaaaactgtttatcttaaaaattttgtgagaattaacaaaatttatacatgtgtattaattaatgcctcctagagtgatgattaccttgcgtcccaatagggtgaatttatataggttttactgtaaacagaatatttggtagaaagaattgatcaagtgtttctataactgtgattctgttgttaagcctagttatacgtaatatgactgtcaaaactgacctctgattatacctattagttcaaactatacctatcgagggactcttaaatgcactgctgacca

SEQ ID NO: 62991 - DNA, 1953 bp, Arabidopsis thaliana landsberg
catctatcaataacatgcagtatatcgttgagcttctagcaaaatcaacaaaaatctaaaatcttttagtaaaataatattaaaccttttatcattaagaatttttttaaaattaacaataaacccatgacatttgtctaatctgccatagagttgaggtgggacttctaacatgctctattatctcttgtactccgttgatcatcgatgataaatcacaagctaaatgtttgtgaataagtgaaaatttctcttggaaatgaaaaattatccaaatcaaagggttacagtaagtggataattcatttaacactttgaatcaacaagatcaaataaaaaaagttggaagacagtgaagcgacaacatagtccattactttgagttaaagtaatattataatttagtaaagttgatctaattacatttttataagtttaatctggtcatcgctggaccaagttgtcatcctccaaattccttaccaatcatacaaattgatttttggccttttcttggaatcatctcttttttttctttgtgtttttcttctcattcattttgtttttctttaatacacacacatgcatgtataaacgcagttttatgactggacatatcgcgtaagatccataagccaatagctttttttaagtaaagtattttcattttatgggtataattataaagatgtaaatttccccaaaataatataaacagcagtctctctcctacttaatcaaatcactagacgcggatttgcttaacaaagtaactttaaaccaaatcgttccacctaaaaggctaaaaccattaggattgattttggtcaaaaaaatcggttactattttttaatttacttagaagactggcaaaaaaaaatgattccaaactactaacatataagataaaatgtatttaacatcaaattaaaatttcacgttaactaatataaaaaaatgatatgaaagaaaacccaactaatctttgattatatgcgttagccttcttcattagccttctttaaatactagattagtacttgataaacttttattgtctatacaatatatcaaaaaaatgcctctaaattaattacataaattagtaatttctgaaattaataaaaaaaacacgtaaccataacttccgagtatgtttactttaataattttcacagaattctgaactctaaataaagatcggttagtaaaaaaatattaaaataaaaatttacgggatttacaaattagttatcatttgaatcatttgttatagaatctaaaatcaaatagtaaattgatcatatagtaagataaagtaagaaatcaaattttctttttttgtcataaataaatataatttgttctttagttatgcacgctggaaatagatcccactaataaaaattggacttttcaaacaaagaaaataattaaataaaatcttcctttacaaaaacaaaagaggaaaattcaaagaaaggagaactctcttcttcttcttcttctcctctcctctttatttacttagttggttcacttcagcacatgatcctcgtccctctttctttctctctctctcaatcacaagtttcagttacacagctgaaccaaagtacctcccattctgatctaatcagaacactgttttgtctgtgtaacaaaaacaaacgatcctgtttttatggaaaaattaatgaaacagtgacgattcttctacacttctttataatgacaaacatttcatagtaccaaaatacacaaataccttttctttattcttctcctttctctgtttctttatcattcatggctccaaattcagtagcagtgacaatggagaagccagacaacttctctttactagagatcaacggctcagatccatcctcattccccgacaaacgtaaatccatcagtccaaaacaattctcatggttcctccttctcaa

SEQ ID NO: 62992 - DNA, 611 bp, Arabidopsis thaliana landsberg
acaactacacactacttcttattctaaattaacaatcatttgtcaattatcagcactttctttgttaatattttcaatgcagcaatcacaatcttcaggtgtaattttatattttggacaggccatagtgtttatctattaaggctcaatataattataaacctaacgcctcacattatcattcttttcatttaatcggtagttaaccgatcataatatagattaattacttttatatcttctgttagtccaattgtaattacaaaacctactctttaagttcttaaaaatttagttccggatggcaactactagttcatgttctaatcaacaagcattagtccattatcaacagtttctttgttaatattttcaatgcaacaattgtatggttgttacaaattttaataaggttatgataaactcatagaggaaccaaaaaattaaaaatcttacgtaatttactttaaatccaagggagatgactttaacttatacaaccaataatccccttagtgattataagcctaccacaatggattctatgcttagatgcagaatacaattaagctcctcactgcagctcctcctgcagggcataacccgtccta

SEQ ID NO: 62993 - DNA, 797 bp, Arabidopsis thaliana landsberg
acattcttgcaacaacgtgtttcacggtaataattaacatgttctttttatttcttttgttgttgttgtcaattgtagtgcgaaatttaaattgtgtagttagcaacaacaaaaaaactgtgtagacaacaatatacacccttcatgggaactcagttttcaaaaatcaattgaaccaaattggctttcagcaaaaaacgtattagccacttaatgcctaaacaccaaataacctattttctttaaaggatcattatatttttatatataattaattaaaagaaaaaagtaatgttcacagtactacagaagattcatatctgatttttttgcatacatgacaatttgattgcctaccaatgtttttatgattttattttgtaaatccaatttatatactatacaacatataatatatcttttttttttttgtttaagcctaaattgacaataactgtgaatgttgttattcaggtatggaaaagtgttcaagtcaaatatatgtggtggaaaagcagtagtctcatgtgaccaagaactcaacatgttcatacttcaaaacgaagggaagttgtttacatcggattatccaaaagcgatgcatgacattctcggcaaatattcccttctattagccaccggagaaattcacaggaaactaaaaaatgttattattagcttcatcaatctcacaaagtcgaaacctgactttcttcactgcgcagagaacctctctatctcgatactaaagtcatggaaaaattgccgagaagtcgaattccataaaagaagttaaa

SEQ ID NO: 62994 - DNA, 1170 bp, Arabidopsis thaliana landsberg
  unsure (1)..(1170): unsure at all n locations
ttgcaatcacaaggtaccaataataatgacagcaacactccaacaagttaccggtttaagaatccagaggcgttagaccaaacgaattgtgcaatcataccaagcaagagggcatagcaaacgagagacaggaaatggaaattgatccattcaaaaagcacccaaattgcggtagctcccatcaaaacacttgcagagatcttcttgttcctccataacaacacatcagcagctgaaggaatctctcaatactcaattacaagaaaaaccaatctcacatttatgttcctgtaaacgaattcttacatttgccaccgcctaagacatgatgaattggcttctggcgatcaaacaaacggttgaaacgagaactgacggaatcttcttgttcgaagaaggaggaaccatgtttgttcttctgaacagtctccgtgaagttatccaccaaatcaccgataacgtcctctacgatattcttgtcaggcatgattctgaaacacaatcgaaatctgagattgctcaatttgcagatgaaagttgacttcataaaaaattgaatcttttgatcagttcttcataccctaaacccaaaaccatttcgagtaatcaaatttggtcttaacagttcgttggtgataattacaatgatataaaacttagatcttagtatatttggcgagaagacaagaacaacaaaaagaccagaaattgaagagcaagaacgagacaaagatgaagatgagtaagagtaaacctgtaggaactggagaagaagaagaagaagaaaaaccttggttgttctgtgaatttcacccaaaaaaaagttgctttctttcgttgaagattctctcaatcacgaagaaagatggagggcggaagtgaaacaagagatgggattggttgtgtcgaataattgaattacaaaaaaatgtttttttcaaaatgtgggcaaatgttggagtagtgtgtagtaataatggataggacttgtcttcccacgtgtagctcatgacaataaacaaattattttttaaaaagtattattggacgctcaaaaaagagttgaaacgtatcgtttgtatttgcaagacaaacaaaaagaagttttctgagtagatntatcaaccgttacaagccttgttgaaaataaaaatttcatttattcaatga

SEQ ID NO: 62995 - DNA, 1513 bp, Arabidopsis thaliana landsberg
ctcctctccggaccatcagctgcgtcgccggagacgatgaaaccagagaagcatcttctcttccttcttcgatatcttcgcttttcgtgaaaggtatgtctgatctgattcctccctctttgaaattatgttccactgtatttaggtttctacgaaattgaatccgtttccactattagggttctcggattcagtgagtgaaggacgtttaaagaaagtcttctccgagtttggacaagttaccaatggcgagtctctctatataggatgactcataatctcatatacaagaacattgaatatagtgaataggttgatttgaagctcattgtttagcttgtgactgttcaatcgtaaacgagaatgaagcttaggaggttcattagggtgagtagaagaaaagccagagaatttgttatgctgatcaatgatttctctttaagctcttgactgtgataagcaatggtgtcagagcttccattgtctactctatgatatctaaagctcctaaatcttatttggagtagagcttgtggtactcaaatagtgaagacctttgtgaggtttttgttactatgagtcgtggtccgaagcaataccatgataagaggatgaaagatatgtgcttttgatatcacaaagtggtgttgagcagaagcagaaatggaagctctgaaacgaaaaaacaagtcctcatgagctaaagagaagctattgatttgctgaaaactttctctgcttttcttcgttataatcacgtctttagatagagaaagaaatgagagaattgtggattcttgtttgatactatttatggtggaatcattggctagatattatttgttgtttcttagtgtttttcttttcccttcatataactgtaaaacctacgctaggtcgattataagcaaaccttgtggttagtgagtcaatttttaacagcattaagagtatcaataggttagcttgattaaggaatttgcgatttagcatcagtcagaaacccgttcaatcttatttttcttactgtagagcactacttttctggcagtaaaaatcatcgcaaacgaaaggactcggcagtcactaggatacggatatgtctggttcaacagcaaagaggacgcacagtcggctgtcgaagccatgaacggaaaggtatattataaacttctttgaattcaatttatcctctatggtgtgggtttcatactttagtgggtcttcaagatccatttgaccaaaccttataacttgatcccggattggttatttgttcttgattgaacaaataacatgaaattgttgttgatactggtttatgttttagttctttgatggcaggttcattcttgttaaatttggtcagcctggtttgtcccgtcgccggagaccacattccgatttcctttttgtaaataaatgatcttaaccatttactgtatgttgttttatgagagaaggtaatatacaataactctgattcaataggtaatattttttaataattata

SEQ ID NO: 62996 - DNA, 1574 bp, Arabidopsis thaliana landsberg
  unsure (1)..(1574): unsure at all n locations
gggtttctgttttagacacttctttgattttattgtgatgttatcactacacttataaagttgtattctaaaggtggatatgttgacaataaccctacaaaacgttccccaagaacagctcaaagcctcaaagaaagtcgcttcaaaagttttaaaacaaaagtaaactcattttataaccaacattatgcgttcatatataactgttttctttaataaaaatacaaaattcnnnnnnnnnnnnnnnnnnnnnnnnnnnnnnnnnnnnnnaacttcctttcaagagaactcaagttctcgaggtgtgtgtcaatgtaaccttttggattctgcgtaaattaaaatatttttaactgatactcttttcagtagactgataggcttgtgcttgtctttattttgacttatctctaaccccacacatacaatagtataactaaatagctagtattattttcctagaaaatatgaaatctgtcgtcttgtggatccatgcgttattcgtttttcattgtcaaacactataagatttagtatgtatttatgttatttgcttccccccaccaatggtaaatcctattataagtgccactaataggattatttaaatttaaattttgatgcatgtcaaaatcaaaatcacaaaacagagtaatatttattttacataacatattattctttccaaaatctgaagcaaaaaaaaaattagatgcaagttttgtgatactgatccggttaattacacttccaacattttgggcccatcaagtattctgttaggcccatatttatctttcagttataaggttggcctttaaggcttcaattctaataggcccaagaatcgcagttatcttacgtggcagagtaagagccaacgtggaatagttagtcatacgtgtttaattatcattggttactatttacgaaattgaaatttacttaaaacaagttccacgtgggtcataacgattggatagaacaacgtgttgttataactagttacacttaaaacatgcaaatcaaaataaaaaaaaggcttcgaattcgatcgaagaacgataattcgaaacacacaaatttgcttgaatcaaagactcttcttcttcgttcgttcgtttcagtgattccaaagattccaaatttgtcggtgtaatcttcgttgtattcagaggtgtatgtatatgtattgaaatcgagaatggatctgttccgagtttggtcagggatggatttcttagcttggagaggaatggcttacacacttcttcttctcaacttcgtctttgcttgccaacttcttcttctccaacctctcgtttccgctctaggtatattttattctctttgattttcctatcttcgcttcgttttcccctggtgagattgatgtttgttgtttagctgatttgggaatcttagggcttagaaatttgctctaaatggcgaattgcttctgtacttttcgaaagttttctccttttcgtgttgggcccgtcgcaaattgaggttccctgtgatggtattgaaatcgaatttaggactctgtttttgctgctccacattataat

SEQ ID NO: 62997 - DNA, 774 bp, Arabidopsis thaliana landsberg
cggatattctggcttcttcatttgttcttgcattgtttttaatacgtaacaattaacttattctgaatattgatattatatagtttggtatgaaaatcaaattatatttcaactaaaatgaaaatgaaaaatatattatttagaagtttactttgttttgttttatttgtatgtaggttcaataaataacaaaaaaaaaaaagatattacataaaacatagaagatattaggtctgttgttataataaaccatagatattaggtctgttgttatatattacatatatatatatatatatataaccatagaattctaccatttttttttgtttgtcacaaagaattctacttcaagatgatgttcttggaaggaacggaactgaattttcagctacttagaaatttcgaaccaaaccaaccacgtcacgtaaatgacacgctgacaaagaccgaccatagaaagccaacgatttttgggtctagaccaagtgtaaaaggactttaagaggtcggtgcaatgcaacttttcccgagttcaaaagaccatacctctactaggattcaaaaatctttccaactgacccattattcgtatataaatcatacatcatcttcatgtctagcatgaaacatggagatcttatccgcaaagccattatagggaaccgacctagctaggcacccggatttgtttttactctccaagacttgtcccgacctataatatatgatcaattattatattctaacattttttttaaaagattgaaaaaa

SEQ ID NO: 62998 - DNA, 651 bp, Arabidopsis thaliana landsberg
aacatgacgtatatcttgttgtgcacccatcattgtacctaaacatctgttgtcttggtttcctacaaattcaatacattacagagagagacttgtaaagcgacatacagttgagtgaatgattaagcattaagcatataaactagctctactaaaacctagtactatggatgcatgtaacctgaaaaatggtcaaagttatagaaaggagagatgaagctggaagaagacgcgccatcgatgaaggagctgctccaatattccatcttctcttttttttacctcttttgtctatctctgcttacaacaatcactttcaagagactattttttacctaaacaaggaaatgagcaactttgggtgtttgatatgggtgtatttttatcactatatgcatatgttagaacatgcaggaacattatatatagataagttaatgtggttgaaaacgctagggcttctgtttttaacttcgggtaactaattgggcactatcaagtaagataaatatatgtgtaaatgaatggtttcattagtctgaccggtacaaatagtacttctaacgaagagggtagaatagcggtgttgacaaatgcattattcgaaccaaacagctaaaaaagttaagggatatttagttgaatttttgt

SEQ ID NO: 62999 - DNA, 1376 bp, Arabidopsis thaliana landsberg
taccgctgtatgctacatcatcacataattgaatgtaaaatcaacactttacctttttgaagacaaatgcaaagtgatagttatgtcctttttaaactatcttgttaaaagattatctttaaaaataattgtcagaatgaaagaaatttttccaaaagctatataatctataactttttcacgatataaagtatacttagaatcatattagtacggatggaataaacttcaacgacctaataagttgaccatccattgacgagttgacctcttatattctctcttagtttggtcgacctattatattcttaaatcaaataacaacaaaatgatacatttcatctaatctttaacatgtttttcttgggacatagtcacacgtacaagtgtataatgtgcaaatgttaagaagagaaaagccaaagactcccttaaaggtccacatgcaccagattaaaaagctcatcatctgttatttcataaaacttatccgtatttcacgtgttacttaagattccaattaggctatgattacctgtattgcacgaatttaattatagtatttcattttagacggtcatgatctactccatcataacgttgtggtgtgtttgattagtctggcccccagatttaacatgacatatatgtcatcgccacgtgagctatcttacttagtgtacaaaacagctcaggaacacctaatttctttcactccacatgccacgctccctacttatttagtcatcttcttatcacccaataaattgttaccaaacacatataataacattttctctaaactaatatccagcacaaacattcgaataaatcatattcactcgatttggtttttaaaattaaaatttgaaatagtcaaatttcattataaagaaagattaatctctctggtaaactttattattaatcttcattttcttgaagcagtaatcataggagacatatcaaagactgagatgttgacaagtgtcgtaatttaagttgactgagtcgactaatgaacggttattacgggttgatgtggccggtgaaattcaggtcccacgtttgctcatgcgcgtgccttctctgataattctcgacgaagaaaaagtccatcgaatctcagccgttggatttagtaatgggtccgacgaagtgcgtggatagcatcttagaagttgcggtccatgtcagcgtgtgtggacaaacccgcaccatattaacaacttgcctttctctctgcaccttagccactttaccaatagtgtgtcttttctttttttccctctcgaatacacttttggaatagataacaaatctgatgcaagagcttgtttcaggtaaaaaaaaagattagaagacgggtaccgagc

SEQ ID NO: 63000 - DNA, 309 bp, Arabidopsis thaliana landsberg
agtttctccaaccctcttgcaaccatttccatctcagccttttgtttagtaaacaagagaggcagttttgtgaaaaccatggaagagatttatggagaaaaaaatcttcaacttgtaaagaaacaaaagcacatacagagtactcgttgggaggaaatatgcgatgaatgaggcatattttcgacagctctgccaccgattcagaatgtttaccttgtatttccaaagcctacagtaacatcgaatttgcttagaataaaaattaggacaaagagtaagcaatactgcagtaaatatacacaagaagaa

SEQ ID NO: 63001 - DNA, 603 bp, Arabidopsis thaliana landsberg
ttttatcagaagaagactcccacggagctctacaggagagttaccaaacaagttcagaattataccaaaagccaaaccagtagaatctacttaacaagtaaaggtcaatagatagaaacctgctgcaagcgttcaggacaaaatcaatagatgttctgtaaaaggaatctcctgtattttttggctcaaaagtgacttgtactccagaaattctacatactctacgcagctgtatataatttcatagcaacaaagaaagataaaaatccaattaattcaaatccattcaagataattccacaatctagtggaaagaagaaagtaaacatatactaacttgaataatatcatcatccgtgatgtcttttccgctggttctgttatcaacgatcgctggaaactaaactagtcagttacatttgtaggacataaccatgaacacacaagtaatactaataccattttgtaaaaatgaaatctttcagcttttaagctttctacctgtaaacaaagcaaacaaaaagtcagtctttaagcaaaagcttgcatgaaaacataaatcaaaccaaaatgaggacttttgcatggagtttggaagcaacc

SEQ ID NO: 63002 - DNA, 791 bp, Arabidopsis thaliana landsberg
cttgtcgtcaatttaaatgttttattttattttatatgcggctgtgattatggctgatgaaatccttatctccacctgagggcaaaaagctagtgattgcttaattggacaacacttctctaaatggaataataattagtgaacaaaatggaattttaattagtgtaatatagaggttgttcttgagaattgttccacaataaggcaaagtgacgattgcagcaatttgtctgaattcccaagagaggaataatccaaatgtcaaagccaaagatgcaatcattttctcttgcttaagacaagatttttcctcttttgcttgaagatgatataatttctaaaggcaccgattccatcttccatagactatggatctaatgccttttttctttctcttcttgggtagtcatggtactagcatcttagtaccaattaacctaaaagaaaaaaaataaaaaaaaataaaaattcacaaatttcctcacaaattctgtataaaaaactatgtatattttatttttcgtatatttatacttaacaatatatatgtatctatatgtttaaattagaaacacataaaaaaaatcaaaataattcggccaagatatttattctaccaatgtatttttcttttttgatgaggtgatatggattactaggtaagaccacgacatgacaaaatatgaattcaatatactttgatctctatgaattttggaattcatttttatccttccaaacccgcaaaaagaagcaaaaatagtaacttcattttcataatctcattccat

SEQ ID NO: 63003 - DNA, 330 bp, Arabidopsis thaliana landsberg
tatgaattgaagggaaagaaggggggtgtggtatttctatacacggaagctgctatgcgcctccaacttactttcccacggatgaagacgagaacaaattgttggacggattgactgtgtggaaaccagggttgttccggaaccgctctggaccgttacttggaatgctattggcgcacaggtttgtttgattcaagccggaatggttcgtcaagatggttgggaccgctatggggccgcaacttgacacagccagattgttcatgaatctggagatcatatgggacagagttaatcttatggccactgtacaagaagaagtgagatcac

SEQ ID NO: 63004 - DNA, 984 bp, Arabidopsis thaliana landsberg
tcgcgtaagcacgtttatgaggactaatgtggcaagccatctgaaactttcaggcccgcgaatcgggaatttttgattttcctcgtcggttccgaggtgaatagactgaacttgtgattgagccaagaactcttgcagtgttgttgtaccattggaaggctttttttcttgggtgacaaaaacttttaacttgaggtttaagttgtagattgggttaaagattatagatgctatcggaagcaacatgttaagatcttggaatgtcctaaccgcaaacaccagctgcactctcttgggagatttgagtcggtttttgctcgctagttctttcaaaatgcttagaaatggtgtgatcccaattcctcccgccacaagaaacagattatcatacctgccaaacaaatcaataattatataatatataaaacaatttcttgaaattgagctgatgtagagagtgttttagcaacctgagaaaatctaccgaggcaggtccataaggaccttccactcttacgattatgttgttaatcttattttcacaatttgccgcttcttctattttgttataaacagaatttgtccaatctccctcacatttcatcataatagacaatgagtgtttgtctacactcgagcttgagataatactaaagggatgccattgaaaccgtgagaccaacggaatgttcaagaatataaaactggatggtgcatagttaagcactgcaaaataccaaaataattcaccaaagttaaggaacgtttttttatatgtttaaaatacttggagaaattaattttcttacttgggtcctttggcacgacaagctcaatggctttacaagagaagagattggcggaaagaatgcagctttcagatcgtgattgaacaatccgaagtatcttgtcgagtccaaagagaaacatgcctgggaggacccagtagaagtgacgatcaccggcatgaaacgagaaagctac

SEQ ID NO: 63005 - DNA, 854 bp, Arabidopsis thaliana landsberg
acttttcaaatgaaaacgctttgaagctatttttacattgttctatttgaatttcaaaagaaaatgctagataaagaaaaaaaaacaaatatgcattttatgcaaattctcctttgagaaaaaagatcaaactgcaaacattaaaataagatagagacccaaaaattatacaactataagataaaaaatacaggagaatgagaaactaacgatacaaactaggaaaatgttgttagattagaggttgaaattaagagaatgaaaatttagattcatcttcattctgcttcttcttaaatcttctactccaaaacactgaggccattggcgacacattgatgccacagcttctttcactgactctggtccacatactaaaactccaacactcgaccatcctctcaagttcttctcaaactccgacattatctctgtgttacaaaaataaatacatgaaactttatagacattattactcaagaagatagtagttttaattaacaagtaccttcgagttttggcctttctccgatatgtatctcatgttcctcagtaataggaattggttttaactcggtgaagtttctttcctctggtttaattactacttctttagacattcttggtgcttctttatgttttcgtctccgttgtagaatagttgcagcgaaaccaccaactgagatagctataacgtaagagacaatgataatcaaatctggaacccatgaaagaaccttttctttagctgtcttcattgctcctgaagcagctaacttcataacccctgaatgattcttgtgttcagaaggtataaagaaatggcttaaacctatcaagaagccgagaaacgt

SEQ ID NO: 63006 - DNA, 1864 bp, Arabidopsis thaliana landsberg
  unsure (1)..(1864): unsure at all n locations
ccttcttgtaagctttgattgatcttaagcctgcaccttattgttatagtaaccaaagaagccgttgagggttattttactcaaatgtgcaatactacaatacattagatttcatacttaaagagaggtctgcattttaacatttcaacttatcagactccaaaagttgttgaacagcaaccaaatctggaagcnnnnnnnnnnnnnnnnnnntccagtctttagcagcttccgtcttaaacctatcaaccaacaaagcatgcatcccaatactctttgctggaacataatctttgcgcatgctgtctccaatatgcaaaacctcttcaggcgcaatattattcccggctctctctagcgcgagcgtaaaaatcctcggatctggtttctctatcccttcaattccagagaatacaccaaaatcccactctgcctaaaaagagtcaaatggcaaattgagtaaagtttaaagaacctaagaaccacacaccgtcacaatgagtcactcttcactaccttgctcaaaccgaaggaaggtaaaataacttcttgatatcggtattccgcattgctaacaagtccgactataagacctgtcctgcgtgcccatcttaaaaacgggtgagaatctggaaacacagagtaaggtgcagcagaaccaaacgtcgaatagattcgcctaaatatcttctcaaatggctcctcatcatactcatatcctgcctaatcaaccaccactcatcaaagtaagtaacacacaatacacacacaccgaatatcgaagaatataacattcaaatcaaataccttgacaaatgaatctctcacacaagttttccaccaaacaatgtttggcattttggcatggaaaccgaaacaaggatacttttgtgccatatctgtataagctagcttaaaaccttcatgannnnnnnnnnnnnnnnnnnnnggcaaaccaatggctttagcagccatacaatagtaatcaccaagctctcctttgtaagctataagtgtaccagtaacatctactgttatacaccgtagtttcgataaaagcgacaccgccatttcaaatcctttcaccaaaatctgcacaaatacacgaaactgagctcaaataggctaatttctgcagaaaagaaatgaaatttacagagaaaaaactgattcgatttcagggtttttgctaaaaagtggtgattgattaacccaagaaacaataaatgatggaatctaggcaaagtatcaatttttcagcagttgagtcatatatcaatgtagggtcacaaataaaaaaaagatagctttttttcgcaggaatcaaggtaaaaagtatggaaatttggaagaacccgtgaaggagagagagagatttgaagtacccagaagctaagaatcgaggaaaatatctaaatgaaagaaatcgccattgtttgtttcttcttatcttgtgtttgctttaagacaacagtaaaatgagagatcacgaagaagactgtctttgtgtttttatatatagagacgaaatcgaatacagtagatgcgtgtgtacgtgtggattattgcgcacacagacaaattttaggcagctaatagaaattataatcttagtgttagatagatttcttgagaaatcggacactcttaattaagcttttaaaggtaaattaattgcaattttggagagcaagttcgagggtatttagggtattttacacacaggaggaacaataatataaagtatacccattggatggcatgacagtggcctgcagtattgtcctaaacccaaaaacgggttcaggttttcgaaatttgtgtttctttattaccgttttacgctcacaatgaagtaaaaatg

SEQ ID NO: 63007 - DNA, 353 bp, Arabidopsis thaliana landsberg
  unsure (1)..(353): unsure at all n locations
ggactactaccggcgggcgaacgcgatcctgggcagcagcaccatgtgccggatgaatttcttgcaggagggcggaaaccttggggggatcaacgcgggcgccgcggcgagcgccatgatgaccgcgctccaggcgggcgagcccggcgcgacgtggatgcagctcgggtgggaatacaacccgggctccgacgaactggacgggctgagcgccacgcaggtgtcgcacnnnnnnnnnnnnnnnnnnnnnnnnnnnnnnnnnnnnnnnnnnnnnnnnnnnnnnnnnnnnnnnnnnnnnnnnnnnnnnnnnnnnnnnnnnnnnnnnnnnnnnngcgggcagaccatcatgggcg

SEQ ID NO: 63008 - DNA, 515 bp, Arabidopsis thaliana landsberg
cgacactctctgcatgtcttctttgtctcttgctgttccattagaaccggtgtaaccactcatttcgcgccatgaaagcttctggaagattcagaatcaaagattcaaagtgacatcctctgttcttcccggatctgaaggtagggcaagtcaatagtttcttgagcggtccttaaggttatctgaaaaataaaacaaaatgcagtgatctttattatacaaaatagtaagtggttgatcctgaaacagaactgggacacatatctagtattgtgtacatgttatgcctaatgcttacccgctttcgcttcctacttcttttcgtctctacaccgaattctccatactcatcggagtgttcagtctcagggcatccacaattaggtgcaagaatatttggatcattatgatggttctctggtaatgaacagtccctgaggaagcgtacaccgactcctgttattttgcagcgagaaatactagtgaaatgaaactctgtgaccaccttatcattg

SEQ ID NO: 63009 - DNA, 416 bp, Arabidopsis thaliana landsberg
agcccgacgagccatgacagccgttcttcacccaagagatcgatgatcggttttagtacgtgcgcctcggctgttcctgcgagcatgaagttctagcgatctcggcgccgggtcccatgagccagatcaaaaaaccgccaacgccacaggacgccggagccgagcggactcaggggcgcagataggcatagccctgctgctgcagctgggggaggcgtaccacgccggccttctaggccgacacaaagccgggcgtgagatcgttcagcttgacaccctgcgccttcattgtgttggcgcaagcgtagaagccgacgccggcgtcgaccagcttcgtcatcatcgcaacagtgtggtcctgggccgcgagcgcgtggaaggcccgcaacgccggcccatgcactaccagcctgatg

SEQ ID NO: 63010 - DNA, 583 bp, Arabidopsis thaliana landsberg
  unsure (1)..(583): unsure at all n locations
ggggtcttgccgccctgnnnnnnnnnnnnnnnnnnnnnnnnnnnnnnnnncttaattccgttttaagcgaattgccgcacctgccgccgctggttttcgccggtgaagcgcgccgcctgacggccgcgctcggcaaggtggcggaaggcaatggcttcctgctgaaggcggggattgtgctgaatccttcaaggaattttccgccgacaatatccgcgacagctttcggctgatcctgcaaatggccgttatcctgaccttcgccggcggcaagccggtggtcaaggtcggccgcatcgccggtcagttcggcaagccgcgctcatcggccatcgaaaccatcgacggcgtgaccctgcccagctatcgcggcgacaacatcaacggtatggaattcacgccggaagcgcgcattcccgatccgtcgcgcctgatcaaggcttaccaccagtcatcggccaccttgaacctgctgcgggcctttgcccgcggagggtatgccgacctgtacaacattcacaagtggacgctgggtatcgattccggatcgccgcagggtgagcgttaccgcgctctggccgac

SEQ ID NO: 63011 - DNA, 701 bp, Arabidopsis thaliana landsberg
agcttttagaagaagcacgttatcgatttttttattttttaaaagttgagttgttgttatgattataactaatactaacaaataatcgtcaccattatcttaagcttttagagtggactgcggacatcaggtaacgtgccaggtccaatcttgttccagcatgtggtttccttaaaagttgttttaattaaaagaaaatgatatataatgaaatcgacgtttaggttcttttaggtagaatctcacctaaaagctggtttaataacaatatgtctgtgcggtttcgttttacagatatcaaataccgaattatcatgtgcatctagagacaaaatcttattccatttgagccatttaatcctttttagttaatacattgtaaagccctttttattagtgaattggttggatcaaactctgttttttttttttttggttatacactattatatgacaaaatagcatttttgaaagacaaaaatcataactgaataatcacaattatatatgtaagaattttgctataaaaatatgtatgatacatttcattttcaatatctcatttccataattctcttataagaaaagacgcatatttattaaaaaatttgtacaacaaggtgtacgttgctactagtaaatagttattctcggattcacaattcaataacttagacgaaggaattatttctattgttttt

SEQ ID NO: 63012 - DNA, 1096 bp, Arabidopsis thaliana landsberg
attgcgaaatgagggatgggactcacgtcgttatggagcaaaatctcacagatgagactaccatcatcaacatagcatagaagctcatacgtagactgttgcttgaactggaatttcttcactccagttagaaagcactgcaaaaaatgaatactttaataacaagagttgaaatcatcattgattgaagactgagagtgctttaattagtggtgttagtagtaccttgatccttccttgaacaaaatgtatggtatctttcataactgcccatttttgagacaactcggctaagtatgtgaaaggtttctctgtatttgtagacagcacagaagggccttccaaatcgacaaccatattactgaattctgctgctacaccgcctgaatctgaaccatatatatgagtcgttgtatcccttacacgaccagtgtcaatatgcatttcttcaacaaatgaagtcacgttagatgtttgatccaatgaatttccgccaacgttgttggcaaaagatcttgcaccactgcaggcaccactgcagctagtaccagtaccagctgtggatgctgctcggtgaatgttactagaagttgaatgtatatcaagaaaacgttctttccccgtgcgcagaagcagtatcaatctgcatatgctcaacccttgaaacagtagctcccacattggtagaagcaagaggttcatccatcgcccgtgaactattgtgagttctcgttacatgtacgggtatgcctgccataagtggtttgttcaaaagagagttaatagccactaataatctcaaaagaaagtggtcatctcacgttccagaaagtattcaaggacagacatcattttctcagaaagacaccaaaaacgtttttaatgttgtaactcggctatggtgaagtaagaaaagatcataggaaacacagaacgaaccatgattgtgctctagtatgttataatttatgataataagctaaaaaatgggaatagtctgtttcctttgattcaaaatcttcacttataaactttcctgtgatggaacaaataattactctggttcagggttgacagtaatgaacactttgactag

SEQ ID NO: 63013 - DNA, 1842 bp, Arabidopsis thaliana landsberg
agcacgaaacaacacttcaaagtaaagtaaaaccaggctatacaaaatgtttttcaagtaaaacataaggacaaagaggaatggaatacaatcgggatggctattagctcaaaccctggtgaaccaaaataatctagatagctacctccagtatattacatcacagagggaagtattacacaccaaaacagctaaaaatcatccgaaatttgatagaaaagagtcaatagaacatgaatcatcaatcattaaatactctaattttagttacttccccaagatttatctgtctaggtgtaattttgattgctaggctttcatctgctacattacaaacacgggttgctactgacttgaagaagctaactgaaccagaaaatcatgtacaactacagccgaacaatcaaagcatacaaaattgcctaaaacgttaggtccaaaacaaaacacccaaatcttcataaaaaagcacccggtctccacatgcaaatagtctttatcatgtttctatggccagaaagtaagaacaacactgatgaagtgctcaatattatcatagagaaacacaggaaatcacaccaactcaaatatttctctaaatctatgtatcaatattagacaccaaaaaagagctccagccaatacaagtacaaacggaaaacaatgcgatagaatcatgaagaacacaaaagaaagtttactaataaatatatatgaatcaataaggcttacaggtgtgctacatgatgggcacacataaccagcaggtgcagtatgaggaggaaaactcttgataagcgaaaccaggcaacttgtatgtatagcatctgatacaaatagagggtaaaaaatgttccattaatttaattatcaaaattcagaaataaaaatccaatccaacaatggtaagagtcagacaacatacgcaagcaacccaaccgagtgacttgatgacctgccccctcatcaaatgttgcttggcattgacaacactttggctgatcatactctccatctatcacccattctgaataagtccggacctattgattaccacatgataaaaacatatttctatcattgtcccaccttgtctaccatataaagtagcaaaaagaaaacgagaaattctgaacattgttcaacttataatgaaggaaaaaaactgcagaatgattataaaatagaacaaaatgtatatgccccatgaaatagatcttgccgccactaatatttatctcgcgtctgttatgatggagcactgtgaaaacatcagtaaatcatatttttcgaagtattaagttgttgagagtgtcaattatatctaaccacttggggaccgtaaatctagatcatccattacaaatgaacaaacataacaatcaataactaaacaaaaccaaatgcttctgttcccataagcagcaatctttccaacagttagatatcttccacacaacttttcaatttctaatccaaacaacaagagactaattcctctataaaactatcagttcgcggtaacaacaagaaaaatgaattgatcaaacataccacacaagtttgatgctccgggaaacaaatgcattcgccgcaaacagggggccttgtgaacaaagtaatacaggctcggtagcctagcaaaaacaagagcaatggcaacattagcattcacaagacgagctttgcaaacaaccaaatcgttataattctcccctaatccagatcaaaatacgtcaaatcaggggaaaacaagatacatacatgcaaacaaatcgaaaattacttcaattgaaagaaaaactcagctgcaagatcagaaatcacgaacactttgatttg

SEQ ID NO: 63014 - DNA, 384 bp, Arabidopsis thaliana landsberg
taattacaaacaaaaaaaaatcatttgttttttaaccaatctcaacctataccaaaaacttatgaaaaatgggaccaaatgagttttaagaaaaaaccataaccaaataaaaccatttatttcggttcggattgatttttcaaattttggttatttcgcctaccagttacatggtatattgccatattttgatttacctcaaataatacggtagtgagattaaacttgactttgggctaagtacaatcacgggatcatgatctagagtatactaattggaccaaactcaaaataaactaagtctaatttctagaaaaacttatgaagtggtacacaccaagtaaagttttgtttagaactatatcttctatagaaaatattata

SEQ ID NO: 63015 - DNA, 1211 bp, Arabidopsis thaliana landsberg
  unsure (1)..(1211): unsure at all n locations
gcacataatacacgagaggttacaatcaaacactggatacgcggttttttaaagactaagccactacgagtttaagtagtcaagggatgaatctatgccagtaaatacaagcttttataagaattgtcacataataccaagcaaaagtaaaacaaaacaaaaaaactacattccacaagtcaagaatggacaggcaaaatcaatgaactggttaaggaaacatgaaatgagaaaaactaataagcaaaggaaaatgcttgattgtgtgatttaagtcatatttagagcttctaaacctgccatgaaaagggattatccttttgtttatccccgttttctaatcaagcaaaacttacaacctatacaaatccacattgtgaactttgttttaaaagctgacaaccatttccagctaaataaaatggtttccgaagacaattttctactcttggttacatcttctggtcggttctcttgggccctgcagtagtaggctcttggttagagatcatatatacttagttttaatatagaaagactaaaactctgtcttggtgaacacaaatggataaacattgaaatttggccttaccatcagacaatgtgtgaaacaccagtgaagggtagttacttgccatatgaaaagcacctatgaataatctgtctgtgacgatagtaagaaactcaaacgaaaacatagaacgagaaagcagggggataagaaccaaaactgattctgctttctttttccacagagaaaaaatgaacaaacaagaaactcagaagcaaaagaacaaaaccaaaacctacagatgaattccagagcatcatttactctcccatgccctaaagctcccaagcaaacccaataccaaagactccctcgaatctttcaatcctatacttaagtactcgatcaaagaccaactaatatgttaagtgttaacacacggacacatcttgttaagttgaaatcgcattcggcagtctctgaactctttataaagatttatcacaggacaggaatactctttgacactgaatgatactcaaaggtgttattgagaggagtcaagaacaaagaacactggcctcctctcaagaacgcaattcaaccattaggcacacaaaaaccctgttggtattggttcaatttacactagtgtattgaaacgatgattgaaacttctacanaatctatctagaagaac

SEQ ID NO: 63016 - DNA, 636 bp, Arabidopsis thaliana landsberg
gaatgagtcttctcttatagtaactcgaattcttgcaacttggattagaaggcccttggacatggttgttttactctttgcagtaatttattgaaattgtaacaaacgagagaagtaataatgatccttattcgaaaaaaaaaaaatgatccttatttgtgcttgacacaaccaataaaaatatatgcaactccatacgaagggaggaaacgcccctatgatggtttgaagacctaaaatattggttgttccatcttgaagttgaagaatccaagcaacactagacgtttaatccttttgtttttaaggaccatcagtataaaatgtgaatattatggtttgtaaatcacttgaactatctctactctgacaatccactcaagccttagctatgaattagatctcactttttattgaccgctaaatcatgtatctccaaagttgttcgatcgatgacttaaaaaaaaagaaaaaaagtcttagttttgcacatataccaaagtatctaaagaatatcttgaattgaactttcgttcgcttacgcgagaacagattatccattataaatttttttccccccccaaataaaaaaaaaaaaaaaaaaggggggggggtcgccaaaaaaaaaaaaaaaat

SEQ ID NO: 63017 - DNA, 522 bp, Arabidopsis thaliana landsberg
aaaatagaatgattcatgtagatgtctctctatatatagtatcattaccttatttgaattagggatgagactttgtaaagctttcattttttcattaattctacttctcctcctctgttacaagaaagataaacataaatctcaaataagaaagtttctacttttgggagagactctaaaccaaaccttctcagagagattatgaacttcagcagctctgcatcttttagatgaactacgagaagaaggacctgacttggaagagggagcttcatcaactacagcttctcctccttcctgtattttcattgaagcaaattatcaaacactcggtgtgcattcattattacactcacaaatgacaaaacttcactcaaaatcacaaccaaaaaaattgcggattttaagggggaaaataaagtacagatccgttaaagagaaatctctgtagaaacattttctcgggaaagagacaaagatttcacttttaaaacatgcaaaagataaaaaacagagattgag

SEQ ID NO: 63018 - DNA, 845 bp, Arabidopsis thaliana landsberg
  unsure (1)..(845): unsure at all n locations
ataaaaataaaataaataaataaaaaaaataaaaaataataaaaaaaaaaaaaataaataaataaaaaaaaaaaatagtatacgagcgaaaaacanaaaaaaaaaaaananaaanaaaaaaaaaaaanaaaaataaaaaaaaagaaaaaaaaaaaaatatttaaaaaaaatnanaaaaataaaaaaataaaaaaaaaaaaaaaaaaaatataataaaaaaaaaaaaaaaaaataaaaaaaaaataaaaaaaaaaaaaaaataataaaagaaaaaaaaaaaataaaaaaataaaaaataaaaataatattaaaaaaaaaaaaaaaaaataaataaaaaataattaaaaaaaaataaataaaaaaaaaaaaaaataataaaaataaaaagaaaaaataaaaaaaaaaaaaaataaaatataattaataaaaaaaaatataaaaaaaaaaaaaataaaagtaaaataaaaaaaaaaaatttataaaaataaaaaaaaaaaaaaataaaaaaaataataaaaaaaaaaaaaaatatataatgaaaaaaaataaaaaaaaaataaataaaataaaaaataaaaaaataaaaaaaaataaaaaaagaaaaagtaaaaataaaaaataaaaaaaagataanatnaaatagataaaaaagaaataaaagaaaaaaaaattaaaaaaatatataaaaaaagaaaaaaataaataaaataaaaaaaaaaattaaaaaatataaaaaaaaaaataagaataaaaatattaaataaaaaataaagaaaaaaaaaaaaaaatgtataaaataataaaataataaatatataataaaaaaaaagtaaaaataaaaaaaa

SEQ ID NO: 63019 - DNA, 570 bp, Arabidopsis thaliana landsberg
ggaaatcagcgccagcgatgaagccagcaagccgacgacgagctccagcagcatgaagcccgtcaggatggccagcgcggcgatcaggtagcggcggtcggcgtcggcgctgacgccgtgggcatggtcatgatgggcgtgatcgtggggcatggcggtctccaggcgccaatgtacgcggcggccacggtgttatgtaatgacgtcgggggcttgccagcacccgtcggacgcgtgcaagaatgtccaccggacatcagagattcccgggggaggtacggcgtgacgccagcaaggtggcgcaatcggggcgttgtgcgttggcagttgctgttgctgctgctggcggtcgtcgtcagcgtggccgggccgtactatttcacgcggcgcaccaccaacagtgcgctcaaggccagtcaatgggtcgcgcacagtgccgaagtgcgggtcacggtctacaagctgctgtttcgcctgcgcgacggagaggcggccacttattcggtgttgcagggcgtgcgcagccccgacctcaagcagcgcattcgtgcgcagcgacgcacagatcgt

SEQ ID NO: 63020 - DNA, 539 bp, Arabidopsis thaliana landsberg
  unsure (1)..(539): unsure at all n locations
gcgccgtcatgctgattatttcgtacttcgcactgcacaccgtatccgccacttcatacagtatctgaccgttcatgtggtgcggcaggttgcgcattactccgtccatatcatactctccggtgctcttgcgttcatgcggaatggagagcgtgcggtacgcaatatcatgcgcaccaacaagacactggcacgctccgcagagcgcgagcgcgcgtcacgcaccaaactggaagagatcgcgctccacaagatggaaaacgctctctctgagaaggaacgcgcgatccataaggagcgcgcgctcaacggataataaaaacctcttccaagaaatgaaagaggtttttctttatcggagccggctctcnnnnnnnnnnnnnnnnnnnnnnnnnnnnnnnnnnnnnnnnnnnnnnnnnnnnnnnagccggcttggggcagcggngctatcttactatagatgaagcgctaaagctaccattagctgagacagccgatggtacactgagactatatgagtcgatgtcttcagtgcgata

SEQ ID NO: 63021 - DNA, 342 bp, Arabidopsis thaliana landsberg
gaggatgtgctccattcggttactaattctagatctatgtttactatgtcatatggattatcgagctctgtaaatccgtacctgtggagtaatgcagcattacccatcaaaccgtatgtattgaatacctacacagaaaatcatggcatcaatgcaaatgacatataattctaacttgaaaaccaaatgaaaaatcatacatacctcagctccagctgagacatccttcaccataatcatttttagaccggattgatcattttgcagcattgaagagtttttttcttccttttctccctcttcttcttcttatccttcatcttcttcttatttattttattt

SEQ ID NO: 63022 - DNA, 867 bp, Arabidopsis thaliana landsberg
gccggtacactcgagctagactggccttgtggagaaaactaggttacacaggatgcgagagtcaaaactcagaatactttgaggtatcttcaaccggagaaccccaaaccgagctcctgatcctactctatatactgctcttaccagacgacacatacaataaactggatctagctgaatcaacaacaggagcttctccctcgaaagaaggaaaaagatcttcttcttacgagataacaattgggaaacacaagtttgtgtatggagaaagcggaaatgatattcttctgacagatggtgtttgtgaagctcttctaactattgtggataagcgagagagtttatatggatcattgagctcattggaagatgacattgttagggtgaagacttgttgtcttccgagagacaggagactatatcattcgcttgtgttgcgtgtgagtgagaggaagattctaaagaagcttaggagctacatccatacccagaccaatgagtcttccagcggaaagcgccggaagaagatggttccaaaatcctagcaacatctttagtttgcttgttgaattttcacttttcatccccaagttaccatttttaaacgacttgttctactaacattgagtttcatctataatggtgatcgaatcttagcagatttgatcgattcttttttgttctatttatagaaattcttgaggtttaaaaataaaagaaagaaaggattttatatcgtgagtagtatattgagtaatcttcagacggaagcaaagaaagcgtgacaaaaagccggcgactgtcagacaggtagaactgtaaatatggagaaagatggggttactttaacaaaggtagacacgtggc

SEQ ID NO: 63023 - DNA, 1428 bp, Arabidopsis thaliana landsberg
tttgtcattctttattactaacattttcgtattattgccttattggtcaactttttggctaacacggaacataataactaaagttcgatgtgtattcttcttacgaaaatactgatttatatcgtattgatatttctgtttgaactcttaatcaatgataagtgttaatatattgttatttggttgatgcaaaatgatatttggaaaaagacgtgtgtgtattaaaatccaaattatcaatgactcattgtatttcaatctctaggctttctagtttctagctttgataaggttcttattttattataatactatttaaacaatgttagttggattttaatattattttgaatgaaaaaccctgctattttacggttgactaattaagaaatataaaatattaagacatttgaactatgcaataacgacaaaattatgtaaactcgaatagatagaattggttggttggattttggtttagctccaaattcagttttcactattagatccttaatgtttactataggttagaataagatgaattgtgaattagtaaatgaatgtatagaatataatatatgtattttattggttctataaggcatgattagggttatctttgtttatctttatattggaaacttgattggtccatgcataatcagtttcctccacacgacttgtcaaagctatgtaagcattttgaccgtaacaactgaaagcaccttatagaattaaattatatatgtatcacattactttaaatctcattactgtagattgataatatcagctcaacaacaactagagaaatgcaacttatgcagcagtataagtttgttgtattgttcctccgatccttccaagttccaagcctattcattgacatagacaacgtttctaaagctaatgaaagattgcatataaactttgtgtaagatccaccaaagtcaaaattaatggcaaatggatcataatttggcccatgggctttaagtgaattatatggaatgatctaatgacatttatgcccctaaggttttgaccgtcacgcagaaaccaaggagttagttccaatcacgtgggaaacaatcgcgtaaatcggacggtagaaattaaatgcgggtgagcaccgagctgtgagtataagagaattccaatgttcagacaattgccacgtggacttatgctttgctttcgtttccacacagtacattgctcccttcccactcacacaaaccaaaaaccaaaaactcttcttcttctgatgaaagatgattggcattggaagaaccctaacttcttcttctccatctaagatcattctcgaagattttcctcctggaatttatcgctatggaacagagatattcacttccgttcccaggaaaacgttccatcacatcaagtttttgcgtttggattctg

SEQ ID NO: 63024 - DNA, 1192 bp, Arabidopsis thaliana landsberg
acaaaaccaaactttggatacggagagaatctgaaaccttgggaagaagattccccctttgtggagtattgaattagggttcttagatttaaagcactgttaattggtgaactagtggctgagtcgtgagattattattaaactgtgagtgtagttcatgttctgtatcgaagtgattcggactgtgatcgagtttcttttttttcttcttggtaaattaaaagataaatccattagttctagtaattaattatcccttaattataatatattgggattagcttttggatattttggatctgatgcctcaaaatactgcaattatgtaccttgtttatatagtgaaacaaaattatctatactgatgttttgtttttgtctgcaatatattaaaaaaaaaaactattttcgagttctgactttggaatcaaagtttgacttttatttgtaaagtactcttcctcaaattcggtcagtttaaaactttagttaatgttgctattaatattaattaatgtagtcatatagtttttaaactaacaatatgagtaaatttatatattattaaaaaaacaatattagtaatagcctaatatttgtcatactgtaatttaaaaaatttatatagttttgaattctcataaaaatttgtgcaaagatattataatttttttttgtgtaaaactgattttatcctttggtaagcttaacaaataaaataaagttatcgttgatggcacaaaaataaaaaataataattatcctatgcaatttgcatctctagtcctcgttatttaaataaactacagatcgaacccatttctcgttccttttttttagtctccctccgcgtagaagcttctccgagacttgtctctgctttgattgaagaagacgcttgatcgaaaattcccttagatttcgtaaatagggttttacagaaggtgagattacacagagatcggatttgcgaaaaaaaaaaatgggaagtccaaagaagaacgagaacaaaggcttcttcgccgccatgacttctggcttctccatgttcggtaccgccgtgtcgagatctgttaacgggtcagtttcttttgaacttcttttttcttatctatcagaattttgcattaaagttcttgtttttgtgtgtataaaacactaaagatgaaaactttgcgtatgtgaatcgctg

SEQ ID NO: 63025 - DNA, 638 bp, Arabidopsis thaliana landsberg
aatatttgttaacttgcataatgatgctttagttacgatttttcgcaaagctaagcaacctagtaatttatatttatgtatttaaaatttacaaccaaacagaatttggaaagctataaatacatcaaataattcctttttttggtaaattatatatatatatatatatatatatatatatatatatatatatataagatgaatattgcgtgttatccattacctaaacttaagcaactataaccaatttaacaaaaaggaaaagaaaaagcaaactatataaaagatgaatgctatataactatataagctatgttggtgttgtaactctgaatccattaaaagattttctcttaaaattgataatgttaaattaaccaagaaaatcaagtttttcatacgttagcaatgtcactgaaagaaacatgacccaaaaaaaggagtgaaggtaagtgtacacaagtagcatttaaagagtcgggccataaactctcgttttttagtctgtgacatgggccattcattacctaaggtttaatgttgggctacttcacagcctgaaccagtatcctttcatcaccataaatcgttgacatgaaatataggaattcgattataaggatttgtgtttctttata

SEQ ID NO: 63026 - DNA, 596 bp, Arabidopsis thaliana landsberg
  unsure (1)..(596): unsure at all n locations
atcgaaatatccggatttgcctcaataccggtcgaaccggatttgttccaacatttttcttttcctggaatattctaagccgtattgacaggagaacaatgttttgtccgaataacaagttgatagattatctatcatataggtgtcttatgctaaagcatgtatttctttgtgaaaaacatatattcgatgaacatgtcactcatttatacaaataaaatagcaacatatcatattgatgaatattacaagtttatttttattaaaaaccattttctaatatactctaaaattactcaaatttagataatatatgactactttcttctttgaaaaaactttaaatactcaaattagttcttataattttcatcgtatgcaactcgtattatttttcacacttagaaaaaaatataggtttaagtgcatgaattttaacaaggaaggataaatattttcaccatagaaagtggaccgacaaaaagatgatggtttcacgggtggggctgacaagttcctactatttttcttgtttcgcatatgaattacctcacctctcctatcacttncaactttttaatggaattcaactaggc

SEQ ID NO: 63027 - DNA, 101 bp, Arabidopsis thaliana landsberg
aaaaaattttaaaaaaaaacaaagagacatggggaacagggggaacatgaaagcaggaaagggagcaacaagaaaagacaagaacatgaccgaaacaaccg

SEQ ID NO: 63028 - DNA, 2071 bp, Arabidopsis thaliana landsberg
ggactatgacgccaccgtacatccttctagatcacgtgaaatttacgctgaaaaaccgagtttatctttatatcatcagagaattgttttaaatcacgtgaaatttacatttagagacatgtttacgtgtaaacgcccatataaccaatcaaccatcctaaagttgaaaaactaaatttggataaaatcttggaattgtttttgtcgcaatcatatattctaaagtaattattcatttattttgtataacacatgcgacgtcacagaatctggagatatatttgtgtatttgtaccttataatttaataaaaacgttttgtttgctgaaagtattcgccgttgaaagattcgaacatattttatacgttttgttctgtagacaatcatcgagttcgcaacgtagttaacgtatgctactatacattgccgagtcatatgttcgtcgaccgtacgtacagttataatctcgaccaaatatttttcattatctatactatcattcaatttaaagtggccaactggccatgaccaattatatttcttcgtgctttattcaataagtcatatgcagtttttttttttttttttggccggatacattgtttttcttattcaagagcaagagtcaaagctattaccaactcataaggagaaagagtcataatctaaacatttgatctgatttttttagtttgaaaagtcgataaagttgtgaaatttctctgtaaatttttctaatttacttttgtacacggaaactgggaagacattcaaactagagtaaccacaaacacaagttacaaaagttttcgcaagtatttaaagaaaattcattaacaaaaaatgtatttaaagaaaattcaaaaaatggcaaaatgttaaatacaagtttgataagattttgacgcataattgaacaaaaaaaaatacttgtggataaattgatttttgacgattccaatgctatttgttgaataaaaagtgattacagaaggtgaattggcattagataaacacaattttttttttttttttgtcaaagtagtgtattatggaataatgtttgtcgaccgttaatcgaatagtcaggcttttttttttttggtctgcattattcttgtgggctacttaagtttggcccaacacatttcctagcaatgcataaactagaaacagaatgaaaagtccatccaaaaatgaaagagaacacaatgaaccattcttcttagtttttacttcttacctttgaatttgattatcaagcattacattttttccccattattcttctatatctgtaaagttctagaagtgtttgtagccaactgttaaaagatctaaagactaaaaagcaaaagaaagcccaaatatttgagacaactaaaatagtttttttttttttaatttgttaagcggactaaggataaggtgcaaaaataaatactccaattcgtttcactttacaacggtttatgcattcctttttttacaagatgtattcctctctttatttgggtcaatctttatgttttcctttaaacaatgaatgtcatcgaatacaagaataattatcacgacgtgacgatcacttcaattatcaaaacaaaaggagctaacctttgacattttatgattacgaagacaattatcacaatcactccataaccctcgcattgacattttctaattcgtttgttgactttgagaccctacaatattctgccttccataataagttcaagatcatttatcattaataagtaatgctaacaaacaaaatcaactattagttggagttggagtaagctaccaaatagacaaacttagaaatgctaatttttcccatcacctataacagattttaatttgctactatatcctaatctaaacttaattaactcaaaaggctaatttttgacagaaatgaaaaatatttaactagcatatgatctagcaacaattaacatttttaattttgcaaccaacatggtactataatgttgtcggttcaaactatatttttccaatataatttaaatgtatgtcataattcttcttattacatctgat

SEQ ID NO: 63029 - DNA, 475 bp, Arabidopsis thaliana landsberg
aaacccttttaacaattatgcgcccaagaaccgacaggaaaaaagcaaaagttatattcaaacaaaggtgtctattttagtttctgaaaagctcacgatgctcctaatgatgcacagttctttcaaaataggggactgcctggattaccattccttaccctaatattgataattaagagttgaaaataagagaacctgagtacttgccctctttctatatatgcactatggtctagggaggctctttttcttaataaccaaaagtgttatgaggagagactcactttgcccataattcaacaaacttacactcaacctagtatgtaatatggctagtcaagaaatcacactaacgctttctatgtgagagacataaagagacaaggggcatttaagcacagaatctccaaggaaagaacactatgagaccttccataaccagggcctgtactctgaaataagagtatataaacat

SEQ ID NO: 63030 - DNA, 518 bp, Arabidopsis thaliana landsberg
cgctagctaatattatgaaaaaaggatcgagtcaatctaattttaaattgttatcaatataatgaggaaccgtgattaggtaagggagtgattaatagattgagacgtgtctatactatgtctacagtctacattctacatcaatttataaggttcctaagtgttaattcctttcaaagacttgaaaaaaatctgtcattatctaagataactatgcttatcttactttgtctcgcgaatcttatatcataattcgcaactatactataaacttaaaagagaatcatactactgttcaaactcttgccaatgatatgtaattagaaatgactgaggcagaacgcatagatattgagaatggtgtaccacttttttcttgtcgaaatgaatggtgtaacacttcataagatgaaaacagatgggatgcacatagatatctcgctcgtggaataaactatggcggaacgaaccattgatcaaaatatggctaatataccatttatgttgaacggagtgag

SEQ ID NO: 63031 - DNA, 425 bp, Arabidopsis thaliana landsberg
tcatgacgttgcattttttgctttatgcacaataccaatagtttgtatacatcattaaccggatcataccccaaaaaacattgcgcaaccttactattggtttggactctccctaaaactgtggatttaccggtgctagggttagttatgaattgctatagaccaatatcaaggcttatcaagccattaacataatgagaatagtgcacggaatctggaacgggacatgtaacacgtgatagataagatattgatgatgaagacagtgagaagaactaccaatcttcgcagttacattgtttatttaaaataataaacactactaggagacgcggctgcaacgaaaacctaacctggaaagacgtgatgaaatgtctacttcggattatttcggcccaaaactttgagagtaggagaaacctagc

SEQ ID NO: 63032 - DNA, 672 bp, Arabidopsis thaliana landsberg
tctttccaagttctaatcgatagcgtttagaaattgttagttcagatgagtgttaccatggtacaaattcttatacactaaaacaaaattctgatggaagaaagatggataaaacatatctaatccgaagaaaaaaagaaagaaatgtaacatctataaacttttaaccttttcacagcatgtagaaaactattttacagcatgtatacgtcttttacaagactaaacctttaaatatatgtataaatgaaatattttaaaaaaataaaaaatcgtaataagtatcaactttgatacgacaggttaaaaccatacacacaccatttcagtatgtatgaatattttcttattacatctttttgattagtaaaataacaaatggttattaggtcatcactaagctttgatcggtatgacgagtgttcgcattaatttactctacacctcttcatcccattactaatcggcggacgctttcgtcgtcacgagacagggacctccattattaaatccttcatttaacgcttttttctaaatttccaccaatgattttctggccaaaaatattatatctgttactattcatgtgctactagttataagattatgcaaaaagatgtgaacttttaaatcaaaataaattcctttttatttaaattatttatccttaaa

SEQ ID NO: 63033 - DNA, 1333 bp, Arabidopsis thaliana landsberg
gaccttcattgttcaaagacggaaagggttgtggggcttgttacagggtgggtatatatatataacaatatcagttcattgaatatgatatttgtaatgtagaactatatactaaccatgtttatatgttatagcttaaatgcgaccatccgttgtgcacgaaaaagccgatcaaggtgatgatatcggatgagtgtcccggctgcacgaaggagtctgtccattttgatcttagcggtaaggcctttggtgcattggccaaacgtggcaagggtgatcaattacgcaaccttggagaactaaaagttagttacaaacggtacgtatagtcaaaacccgatttggttcggttaggtcggtttttttggatagaaaatattcacaaatatgaatagtcattttaaactaatgttatattaatttactagagttaatttgaaatataatattttagtgacttattttgttcgataaccaataaattctaataaacttacattgatgttggattgtaaaaccatatactaaattctactcagtatcatacatatatttagtgcatgttgcaaacacccgaagactatgatcgctatccatgtcgacgccggagcaaatccttactacatgtcattcgcggttaagtttgcaaacggtgatgggaacttcgcctgcattgaggtccaaccggccggaggacagtatatgaaaatggaggaaatgagatccgctgtttggagactaagccctggtgttcctttgaaaggtccgttcaacatcaggcttacctccgccgtgtccggtaagaagatcattgcgaaaggcgttatcccggaaaagtggagtcctggtgctatttaccattctaaggttaacttccccgttcaaaggaagcagaaatgatttaatttttcttcccctcataaacgaattgtaacgttttaaagaaagaggggttaaacttgtaacggatagtaaactaatttgaattttttttcttatctactcttgttcttcatatgggcctagagttgttgtcgctcggcttaaaaaagcccatgattaataaatggaattcggtttggtttaccattcgatgtggaacataatagagtcatagaccggatcagatcggtttatgagagccgtttaatttattttgtatgtgagggaagaaagtacttgcacaaagcattgatggactgttcttcacaagtttggtaaataaagacttattaagttcactcataaagtctcttaatttgtggtaaactaccctactacggtaaatttgtgaagttaaaaattaaaaacggcgtttttatagctaaacaca

SEQ ID NO: 63034 - DNA, 415 bp, Arabidopsis thaliana landsberg
gagatgaacattgacaataacagtctagaagacgtccattaggtttcttacaagtttatatataaaaaagtggtgaataaccggactggctaaatatgactaaaaagaaaaacctactaaagaagtaaagatgacaaatagaatcctattagacaaaaatatcttattttgagatatttaaccttctacttcccaaaagtaaattagatgagatattttattttgtatgctagcaactaccaatagacatgtttacttgaaaatacataattaattataagctatataatctacagattttcacttctttttgtttaattgacaaatttacatccttttaaatatgactggatatggtatattaaatgtttttgtcaaggaaataacaaagaaggtaataagttgcaaaaaaaaa

SEQ ID NO: 63035 - DNA, 127 bp, Arabidopsis thaliana landsberg
ttttttcggaaaaacatcttataacttcgattttagtatatataagaataaagatatacggtgcgggaaaaccagaggtcaccaatatacacaagcattcaacagaattaaaaactcggtttattag

SEQ ID NO: 63036 - DNA, 1951 bp, Arabidopsis thaliana landsberg
agtgtactgcagcggaaaagaagaagatcatggcaaatgataaactagcagagatggccatgtctgaccctaaacgtgtcaaaaggtacaaatattgaatcttgactaacattaccggtttataatcatatattctgatgtttaaggaatgatcctcttttcagaatcttagcgaaccgtcaatccgcagcacggtcaaaggagaggaagatgcggtacatagtagaattggaacacaaagtgcatactcttcagaccgaggctaccacattgtctgctcagctcacacttttgcaggtgcgttgtttacaatgttataaaagcgcctagattggtcaatttttgttttgttctaacgatcttagttactgcattatccagcgcgatatgatggggttgacaaatcagaacaatgagcttaagttccggcttcaagcaatggagcaacaagcgcgtcttcgcgatggtatacatttctcttcacattgtatcaaatttacgatattattaacatgactttaacaaaaaatggaaccagatcctatatgctttaaaaaaatctccatttttgcgcttaacgaatgtgaaatgacgatttttttcccccgctttgcagctctgaacgaagcactgaatggagaagtccagcgactgaaactggcaatcggtgagagcagtcagaacgaatcagagagatcaaagatgcaatcactcaacgctgagatgttccagcaactcaacatcagccagttaagacagcagccacaacagatgcagcaacagtctcatcagcagaaccaccagaatggaaccatggcaacaaaatctgaatcaaatgaatagagcagagaagttgttgcggtggatcaaagggttggagtttttcaacaagttacatatcaaatcaaacattatatttcatttatgtgcagagtcagttgaatttacatatatatcatataagtccaagaaatttaattttacaatatgttgttatcttagaaagaaaaaattcaatttatagtagatataggtatgaactatgaacacaagttatatgtaatgggattgattgagcttcagacaaaaagattctctgttttttttgtttttagtttttaatttagtcttggattctgtctctttttgttggtttgtttattttaacattatgggccggtttttggcccattaaacagcatcccaaaacatggttgccttcttcgtctctctctgtgaataatatctaaaaccctaacaaacactatcactcacttcattttcgtgacgacggagcttgaccgctatgtcagatgtaatagcggagcacgcggtggatactagtgttgaaggagatgcaaaggctgcgttaccggttcaatcgacgaaacagttctctgtgtatgaagcgacttcggaagagcttatagaacgatcaatggctcctattaagaaggagttcctttgtcctcctcctccaagccgttccgtgaagcaaaatgatgccgccgatgttagggcgcctcaatcgggtttggttcaggagaagaaatctaaacgacaactgaaacgggaacgccgcgaggtattgattcgaatcacatcggtgcttgtatgtatagcttcgaatctatctatgttttaagaactagtttttttggcaactgaaaccattggatatgagagagagtttagaacaggagggattaatttatgctctttcttcttgcagcaatctacgatcaatctctgtccgcaggttgcgagaacagaagacgttgattcatgtcagtataaagacaagtgccggtttaatcatgatattgaggctttcaaggctcaggtactcactcacttttttgcattttactttgcttatttggttcatgaattgggtgtattgaatatagtataattttgtggtattgattggaactagtttgggtacgag

SEQ ID NO: 63037 - DNA, 1186 bp, Arabidopsis thaliana landsberg
actactttttcttgttacttttgacattttcagaaaaaaatggaagaatcttgttttaattactttttgacatttcagaaaagaagaagaagatattcttccaattttttcgactgatacatataaagaaaaatgataatttcttccttttatttcttttattagagttaatcagtcacactctaagacccataagataatgtatatttaattttattagatgtcaatcacaaacgaaatgacattttgggctgtcaaaaagaagaagatgaaatgacattttggaataaattacaaaaattgtaacctataagagctaagtcaaaatagtgaaaaagttgagacagtagtaaagactgacaacagataagtttagggttattacgtgtattttgagaaattggagggtctttttgatagttaaattaattaaaaggtatgagcagatgttgcaatttatactttttaaaacatttctcttccgtgtgaaagtgattcccccactctctctctaactggtccctcaagctcccaccaccttccccacatttcttccccattctctctctaaaaccatttcttttttctcagctacaaaaatcgaaactttccgacgagttttgaacattaggacttcattcggcaagaagcattaccgtagtatggtatgttgaagctccatctctgtttttttctttcatcgtctgctctgttttcgtagctttcttcttgtttttttttataccatgtttgctactttggttccgtaattcacaagcaagggttttcagatccttagctggggattttgtgaaagtttggttcttcattggaagagctgattttcgggtgtaccatctgcattttggtatcacgcgttttgtactgtactcaaaatggggttttggagctgtgtagggtttttaatttagggtttccattttcggaactttttattaacttgcaatttcaatgagaatccttggctttcgcagcttcggtgattacttgttttcgattgtttttattattggaggttgctaatgtctttaatgaagtgtaaatgggagattagtgttgaaagatgttctttttgacttaagttctggcttgaccaagtcgatcatggcattttgctttgatttaaaaaaaaatcaaaatcgcagcgctgtcttgatcaacaatt

SEQ ID NO: 63038 - DNA, 625 bp, Arabidopsis thaliana landsberg
  unsure (1)..(625): unsure at all n locations
ctgatatttctaatatctttaaccatcgtctgtcctcccccctattgaaagccctctgatcaacgtgttaaatgtagcaaagttccatctaatcgcatctgttttcatatcattgaaagtgtcaagagctgaatccaacattccaacatcacaatacccagctatcaacaagttgtatgtttccacattaggcaagtaaccttttctctccatctctataaagaaccgttgagcaactctcattttccctagcgcacaataccctttaaccaaagtgttacaagctacaacatcgactttacctcctttgctttccactctctccaaaacctcgagtgcctcagacacacggccttcattgcagagaacctccatcaccttagttaccgtcacaacatccggaacaaaacccaaactaaaacatttctccaacaacaccattgactgaatcaacttctgctcattgcagtacgcagaaatcaaaatggtgaaagttacatcatttggntccttcatttcactcattaaactcctagctctcccgactttcccaatcttacanagagcatgnaagcaagtgttataaaccacagcgtttggagccacaccacttgtcttcatgatc

SEQ ID NO: 63039 - DNA, 250 bp, Arabidopsis thaliana landsberg
  unsure (1)..(250): unsure at all n locations
aaaaaaaaaaaaaaaaaaaaaaaaaaaaaaaaaaaaaaaaaaaaaaaaaaaaaaaaaaaaaaaaaaaaaaataaaaaaaataaaaataaaaaaaaggaatcgagtcaaacaaaaaaaaaaaaaaaaanaaaaaaaaaaaaaaaaaaanaaaaanaannaaaaaaaantaaaaaaaaaaaaaaatattattataaataaaaaaaaaaaaaaatgaaaaataaaaaaaaaaaaaaaaaaaaaaaanaaaaaa

SEQ ID NO: 63040 - DNA, 1367 bp, Arabidopsis thaliana landsberg
atgcttcttttaacttcagacaacctatcttcttccagtgttaacttcttctcccattcatgtaggtcttctctctgcttgtagaacactgcctcatgtgcttctcgtctaagaaacataagcaaaagagaaaatgagaggtcagatctgcatatcaacaaacaaggaacagaacgaacaagtaaaaagtgatcgttcatactctgtaactagagaaagatgctccctttggtgcaccttttcacgggtctccacttcctttagtttgcgttctaactcagaactctttctattcatcactgaaaacttttcttcagcaatggccctttctctatccacctctaaagctttttccttcataccaattaccaaagcatttgcttcctctaactttgcctcagaagtagacttcaccacagagtgttctcgttgccaatacttcaaatcattctcaagctgaaaatacagaaatagcataaacatcaaacacaaagcttgcctcaacagaacaacatgaattgaaaaatgagatacctcagcaacaaattgcttctcatcaatcaaagcttttctaagattctcttctcttttgtcagcttcatttaaagtaattgcatttgacgtcttctcacgtttaagcatctgcatagcttcatcataagcttgttgaagttcgttatttgttgaagtccactgcttcttctcaataagcaatagccccatattatgttggtaatcaaacaactaacacaaaaattaaaacacgatctcaattaacaacactcacactttaagattcagtaacacaataatgtaaaaatcgaaactttatttatttacctctttttcaagcttcaagattttctctataagagcatcacgatcttttctttctagagaagcttcatcaagcaagccaacctctttgaacttgtgccaatcatcatcctctcggagaagcaccctttgtggaggaggtgtaatgatttcgtcggaaaaagctatggcctttcccttccggtctgtccccggccaacgattcctttgcggagtgaacatttccgttcgaaccctagagacccagatgcatcaaatgaagaggggacgagaaaccaacaccattttcacaactttcgactcgtgaaatcaaattgctcaaatttgaaagctttcttcgtgggtttgtgacacgcgccgtcgtgaacaattctctcctccgctacaaaactactctgtaatcgtcactctccaacccccaaaactcttcggtgctacttgcaagttgcaaacgacgttagctcctggaaaatataattgggcctattgggcttcttatattatccactttaattattggtccattttgg

SEQ ID NO: 63041 - DNA, 2058 bp, Arabidopsis thaliana landsberg
aactatggttgtattgttatgcacgcaaaaatcaactttagttttatggtttttaaactaagccatattgtgtaaatctaaatggtccgaaataattagagtgtgttcaaaattgttttttgtccttttattgtttcattattatttaggaatagggatgttacgatgggtcaagctggtccatgccttggtttggttcgatctggttcttgattgattttggccagcggataccaagtgaaccatcaattgcaaaatgttactacctgtctatgtcaatatctctgttcaggctcgggccagcttgcttttgcatgattttggtccaccacaccatggtcttatttaagggttgatagagcttgtatgatcagtacctttaaggtgtgattctcgaagaattgttgagatgatttactttctttcatgcattgctgcttggtttgcttatttgtttttttcaattagttatctcaaaaatatctctaaaatttataaccttgtgagaagctaaggttattgtctcacgaagcaagcagtgttcgacctagatggatggtaatcgtttctatcttgtggctctattccaatggtttactatttttcctaaataccactttgttttcaatccgaaatttataccacgttacaaaaaaaactttcatagagacttagagagtgtgttgtatgataaacccttcgtggattttttttttttttttaattattattttaaaactctacgtaaacaattttaatcgccatttctgagaaaactcaaaagcaataaccgatgtaattgataaaataaaaataaaaaataacattaaaaagattgaaaatacagaggagatgcagggaaaagagctgacgacacgtaggctagagccgcaactactcgagaaagagcattgtcgtgtcgctttcgttaaatactactgtactatctttttctctgcccgtaaggttggttcagaggctactacatttctcaggccttttttttttggttctatataaaacgtgaacttaatttcatgagaaattaaatatttccgacaatctcaaaaattacccatgcaacttgctgattataatattttacgaggaagaaaatagatatcgaaatgctttcaaacattaattacgtacacaattcaatgacgtacggctattataagaatctagatgcataactatatagtaatatgtagatacgaaaaaatgcgaagtatttaatactttgggcccctcttcccaaaatgttcatgtgaatttcgtgattattcatgcatactcatcaatagacaatatgtaatgtccattctataaaatactacattttaatcttcgagctatagaagtatttcaagaatcatcaagataaagagaacaattaagaactcaatcaaattaaggaaaaaaaataaacagtttgcagtgattcactaaattgataattcaaatcttgtgtgggttcaaacttcaaatattgggccggggggtattaaagaggtttgttgcatttatatttcgtttattcaaaaaacaaaaatagtaaacaatcacatgacttttccagtgccctttcctaaattcgtaaggcttggcttcaagatggtcatggcccatagatgtatgcatatacacaatcatacatatactatataatgtattggtgtcccctcatgcaaagattttgtttgtcacaaaattccagagctcttttacaagatttatgccaaaagataaatggggacctttcatgagagatcttctccatgattttctaattatactctactttataatatatcatgataaacaaatctttgtgacacattcaagtattcaacagtctgatacttggtagagaagtagaaaatttagaaggtaagaaagaaagaacatggtaaaagcaattctaaccattcacgtcatgagttatatgatctagctaacgttctctaactgtgtattaacgaccataactacgatgacgcgtctcagatatgaaaatggtacggctttaggatcccgtggtccatcgaatcttga

SEQ ID NO: 63042 - DNA, 616 bp, Arabidopsis thaliana landsberg
tttattgaggagcacgcgtcaaaaatgtgaggccgaacttaatcgcgtgatcactagcctgcccaacgaatgagaagaattgaaacgcacggccacggacagccaatccgtatgcagaggaaagtagtaagatgcgaattagtgcgattgtgattcccgctttaattcttctgacgggatgcacatctaaaaaccatggaactttctcagtggtcaataaggcaggtgagccaatcgtaaggcttgaaatcaggatttgcgggcagttatctacgtttttagcaatcaaacctggcgcggcggtaaagggtaaatacgaagtaagaggagactgcgattttacgatcacgggccaattcaagtcgggccgcggtataaataaaacggacggctatgttacgagcggttttgactacgaccatgaaattgaagtcgacaaagcgggcgtcgtttttaaaaatttgaaagtaaaatagtatttgatttcgatgagcggatccgggtgcggattaagcggttgtttccgtcgcagaagaggaaaaagtgagttcttctaaagaaacaaaaatgtatgcctatcttggcattcgagattttcaatgcgatccggatgaca

SEQ ID NO: 63043 - DNA, 771 bp, Arabidopsis thaliana landsberg
ggtacataatgcaagttgtgcacaggacatctatatcaaatccgaacccaatgcagatacataaaaggaacatttattcataattgctccctaagttacgtaattaattaatattaactaattccaaaaaagtaaaaggtgttgtttttgtttggttagaaaataccaatggttctctttgttgtttctttatcatgacatgaaggacccatcttccataataattattcttaatagtaatgttatttaactttttatattgcacattattctatgttgtttgcttcttgtggacaaaaaaacgacaaagatatacccactaataagggtacatgaaacatcaaagccgttttaagatttaaatatttttctaacaaactattaactatatgacaaacatatttgattaagagggagtatggaaagatgtaaagggagagtagaatgtagctgagtctttacattttgtcatgttccccaaatttgcgtacctacgaatattcagttattcacgataccttatgccaagacttaactaaattaattttaggacaatggttggttgatggtggtgattgattagctcgattcggtggtgtgaaatttgtgttaggattttggctgcatcattttggatataacgcaatggttcgtcttctcaacgaatattaagtattattttgcgaattgccccattcaaacatgatttttatattcctacagctcaaaaactattttcgacaaacaagtctcgagtctatgtttttgaaa

SEQ ID NO: 63044 - DNA, 297 bp, Arabidopsis thaliana landsberg
  unsure (1)..(297): unsure at all n locations
gcaagccacacgcaccactaattctttttttagatgttgaacgaagctagcttgtcgacatgtgagtccgtatagcgactcccggaatcggttgatctttatctgggacannnnnnnnnnnnnnnnnnnnnnnnngcctgggatcagggtcacgatcgggggcatggggcgcttaaggggaagattcgagatcggagcgacctatgcttagaatgtaatgcgcatggtctgagcggagctgcgctattaggacagaagctattagctctagcacgggcgatgccgcatcgactctat

SEQ ID NO: 63045 - DNA, 499 bp, Arabidopsis thaliana landsberg
  unsure (1)..(499): unsure at all n locations
tgtacccacaacacccccaccatatcctttgttgtcaactatacccccaaacaccatcctttttacacccgtatcctttttccctccctttttaaccgttagtaaccccgtttgaaaaacctcctttaaccatctttcaaacgcaccgttttgaatcccgtaaagctcctttactaacttgtcctccacgctaaacctaactccgcctccttcttacctcttaggaaaaatctccctgaaagctgctnnnnnnnnnnnnnnnnnnnnnnnnnnnnnnnnnnnnnnnnnnnnnnnnnnnnnnntttgaatccggtttagaaagttgcttgaagaggagaactctgtctcctcctctcctgtaaaatcgcttgaaattggactgatctcaccttctacttcttcgtcttcagcttttatgttcaggtcgaggtaagagctattgaaactcgattgcctagagcacactttcttcttattcaaaacccattctcgatcgata

SEQ ID NO: 63046 - DNA, 1208 bp, Arabidopsis thaliana landsberg
cgtagctatacttgctgtactgttggaggctgcgtttaacttgttatcataggtgtattttgatgaaagattgggcacatttagttggatagtctagaaaactgcaaagggtcttatgctaattattctcttacttttgaattcagaatcaaaagctcaggatcatgcaaggagtccaggtacagaaaattatactgagaagcgatcaaggcgtaagagggatgatcatggtactggagacaagcatcacgataacagtgatgacgttggtgacagggttctcacttctggagatgactacattaaagatggaaagcataagggggagaaaagcagagataaatatcgggaagacaaagaagaagacatcaaacagaaaggtgacaagcagagagatgaccgacctactaaagaacatctgaggtctgatgaaaagctcactcgagatgagagtaaaaagaaatctaaatttcaggataatgaccatggtcatgagcctgacagtgaacttgatggatatcatgaacgtgaacgcaatcgggactatgatagagaaagtgaccgaaatgaacgggaccgcgaaagaactagggatcgtgatcgtgattatgagcgagatagggaccgtgatcgagatagggatcgggaacgtgatcgcgatcgacgggattatgagcatgatcgttaccatgaccgggattgggaccgtgataggagtagagatcgtgaccgggatcatgagagggacaggactcatgacagagaaaaagatcgtagtcgtgactattatcatgatgggaaacggagtaaaagcgaccgtgaaagggataatgatcgtgatgtgtcgcgtctagatgatcaaagtggtcggtataaggataggagggacggtaggaggtctccagattatcaggattatcaggacgtaatcacgggctcaaggagtagcagagtagagcctgatggtgatatgacaagaccagagcgtcaactttccagttcagtggttcaagaagaaaatgggtatgatttttcttaagcagtttagtgtagtggttggtgctctttgtacttggaaacgttttgggtgctggctttggaaatttaatgtttttagttgggggactatttttattctaaatgggagattttgggcttgctgcccgggattttcagaattttattatttttgtgggtaaggccttttt

SEQ ID NO: 63047 - DNA, 893 bp, Arabidopsis thaliana landsberg
ttttggttaataggacaaggcagataagataacgaaagaagacgagaagatcacaccggaaaagataccggttactgatgatctgaaaacagctttggaggaggaaaatactccgaccaaagaggcaaaatctccggcaacagagacaaagtattcggtaacagagaaaagagctccggctgacgagaagataacaccggaaatgatgccggttactgaagatctgaaaacagttttggaggaggaggcaaaacctcctgcaacagagacaaaagctatggttgatgatcagaaggtgaagaacgaagtggccgttcgtgaagagaaaatcattgacctcgtgactgtgaaagagaccgaaacagaggcgaaaacagagtaggtgggaaaagaataaacacagtgaaacagccttgaaacgctagtttctgcgttcttgatagcaaaatgcttgtttttgtttagattatatttttcctcgatagataaacgcaaacgctgtattctttatatgaattgaaaacttcaaatttcctattgaccgatccgtcaacccaaaagaatgtcaatgtaagaggctacgaagaacgtgtttttccgttttcgttttctgcgattgcgtttcaaagagaatgcatgcgtaaatcggtgcccgttacaacactttcgaaagttttggtttggactttaacgggccgatacgggccgtattataaaaaatttgtaaaataagcaacagtttaatggaccgaacttcgtcgatcgagatctaacgggcgagtaagaaccgggtcggaaatccggatccggattctgagcattaaattgtgatacaaatagctcgacaaaccttttaattgcagcaatttaagaggccaccgaactcgtcgcgc

SEQ ID NO: 63048 - DNA, 812 bp, Arabidopsis thaliana landsberg
taaatccaaggaagaaatatccatgtgcaaaacacactgctcaattctttgtagccatcctttcctactataatgttctaccagcgcttgcatgatctgagatgaaacaaaaaaatcataaaataaaatacaacggcactcttgaggaaatcttataatttcacaaaagatacctctggaggaagagatccgagcatatcccttaaaatataaggctccaaaagctccaaaaatgtatctagtcatcaagagaaattattatatctcattagacacaaggaattaattgtcatcaatagatttaaacaaagatcaaagtaccaaactgaggtggaaaaggaaagcagtttccaaagaacgtttatatcttacttactaacctcaaggaatcaaaatattatactcagcattgcaatttatccatatgaaagtattatgctgtttcatttagcaaactatacaattactctaaaccatttacagaagaactaaactaaaagtaatggagaacatacatgcaaacacacagcacaatacgtatgtgtatgtattatagaaatcggcatgcataagaaaaacaccaacccaaaggagataccaaaataagatatttcaagatcggtggaccaaagctctctaaggattttaaaaaataaagatacagaatcagacaacctatagaaaagtagttactatcctatcgtagtaacatcttttaaacaattattatatagttggaatgatactgacccctgttccttaataaaatgtagctcaaaaaaaaggaagttgatggtaagacatctaaatgt

SEQ ID NO: 63049 - DNA, 1669 bp, Arabidopsis thaliana landsberg
cattattccattaaaaaaatataaccaatagttttccaaatgggaactcttgattattctatcaaaacaatcaatagtgatattatcagcagtaacaaaataacaaatatatcttgtaattattagtttttactcaaaaactaaaagagttaaagttaataactcttgaaattaggaaaagaaaaaaaaactcttgaaagttggtataaataagatttgaataactgagtttgactcggatgtgattggtctatcccggtttggtttattaaagtctccttcacttcaatttctgtttggttttatttaccggatttgagaaaccagaactgaggccgaccaaccggtaacgatgtcgccgccgccgcaacgtatcggcttgccatggcctgagcttaacgatggtttggcatacaaggatgccatctcttcttctgaatcaggtaagaaattcaaaaaatttgatcttttgttgttgttttggttcttttttgaaatgtgtggaatttgttgaatacagagttaacgacggtgtcagaattctacttcaccaaatacaagagttcagctccattgctagggttcttactcttcttcttcctctactcttcgtctacaataatatcgttcttactttccattctctttaatcatctttcgttcctaggtggattcaacgaatccaaaacggacaggtttgttcttcatacaaacatttctctcttgattctatagaatttgaaattcatttctcgtgtatgacgttttgcagatacaaattgacggtgaagttgtaaaagatcccaacacacttcttaggttcagctaacaattcctacaattgatttgaacacttataaaatgtttagcttttgtaaaggtgtctcatttttttttgtttctcaggagtggttcgaaattagtttacagtaggcttccttggaaggaacctgacacgccatactcgcttgaagttttgtatgaagatgatgatttggtaacttcctgctctgaacaaaacatatagaaaatcttgttgtgatgtttaaagctccaaatgaaatttggtattgtactatcattttgttctcaacttgtagtgatgtgtgtatacttggtggattttcacataatgcagatcgctttaaacaagccttctggacttcaagtattgcccggaggacttttccagcaacggactgtgttgacgcagctgcagtggtgttttggtaaaaatgactcttacatcggatcgcgtgaatcaccacatcctgtccctgtacatcgactgggtagaggaacttcaggttagtctatagacgtgttttgctttccttttcattaaaccagctatgatgttagtattctccactgctttataaatgttgtactcttcactggacttatcagttcgtatcgcaaaagcatctctataatgatctctctctactgttaagatatgttgttttcaacatttatttcaggtatacttctctgtgcaaagaccaagctggcaaaaacgaaacttgcagcgtattttgctgagggaacatctcttgtcggctccgggtgagttcaaacatgatctcttgtttactttttgacccagatcattcttgaaaagatccttagtattacatattggattttggatttaggctcttcattc

SEQ ID NO: 63050 - DNA, 493 bp, Arabidopsis thaliana landsberg
  unsure (1)..(493): unsure at all n locations
cgttttgtcccctcgttggagtaatctctggtcgcttgtttctgttttggatttggatttccaagattttaaaggtgaacacgacatgggggaattcatagatagctttatggaatatcacgaagagttaggcttaaagttgaaaagcttcaatatgttttatgatgctaatgagctctttcataagcaatttgtgaggaggctaaataaagtggttaggcgtggagtttgtgatctgaatattcagaatatggtggatgttgatgtagcattagttaggatgcctccctcgctttattcatgtgctactntagtgaatttgattctctactgtgttgtctttgatcatccaagatcaaaatctgtttctttacctagtgtgaagaaaatgtattttgagggggtcaagtttgatggcgattctgtcctggagactctcatatcatgttggcctggtcttgaggagtaaaccgtgattccgcatccggaggat

SEQ ID NO: 63051 - DNA, 260 bp, Arabidopsis thaliana landsberg
tctcatccattgatctccagctcgttcctgttgcaacgccgctatcagaccagatggaaccattctctgccaggtcttggactcttcttgctatgtctcacttgcattgtacatcatagaattaggacatagcatttgactgttgctttgttttagcacggagaagctgagtggcgctcaacgcatcatgcctggcaataaacgcataccctgatgggaagcttaacggaaagtccaaattttgatatcgagataccata

SEQ ID NO: 63052 - DNA, 649 bp, Arabidopsis thaliana landsberg
  unsure (1)..(649): unsure at all n locations
aaaaaaaaaaaaaaaaaaaaaaaaaaaaaaaaaaaaaataaaaaaaaaaaaaaaaaaaaaaaaaaaaaaataaaaaaaaaaaaaaaaaaaaaaggtatacgatncaaaaaaaaaaaaaaaaaaannaaaaaaanaaaataaaaaaaaaataaaaaaaaaaaaaaaaaaattaaaaaaaaaaaaaaaaaatataaaaataaaaaaaaaaaaaaataaaaaaaaaaaaaaataaaaaaaaaaaaaaaaaaaaaaaaaaaaataaaaaaataaaaaaaaaaaaaaaaaaaaaagaaaaaaaaatataaaaaaaaaaaaaaaaaaaaaaaaaaaaataaaaaaaaaaaaaaaaaaaaaaaataaaaaaaaaaaaaataaaaaaaaaaaaaaataaaaaataaaaaaaagatataaaaaaataaaaaaaaaataaaaaaaaaaaaaaaataaaaaatatataaaaagaagaaaaaaaataaaataacaaaaaaaaaataaaaataaataataaaaaaaaaaaataaaataaaaatagaaaaaaaaataaaaaaaaataataaaataaaaaataagataaaatatatataaaaaaaaataaaagaaaataaaataaaaaataaataataaaaaaaataaaaaaaaaatgaaaaaa

SEQ ID NO: 63053 - DNA, 1506 bp, Arabidopsis thaliana landsberg
tgcattgagagtacaaaattagtctgctttactgctattgttcttaccattcttttttccatgaaatttgactattagagtacttggtgtaatgttggagtaatgtttacagttgaacattgtttgggttgattttctgtttttttcttttcagattaattgagtctcgagatgttgtatttgaatgtggtcctcactgtgggtgtgggccaaaatgtgtcaaccgaacttctcagaagcgtctaagattcaatcttgaggtatgtattggttaagacttggtaaggaagaaccacttgccactaaagttgaaacgaagtacacttggatttaatcatatagtccactatcctttatatggtaataattaaaatgcataatccagtgtgtgtcatttgatgtccttccaaatctgagcttaatcacaatctgaagcttgtgttttggtctgtggcctcaaacaggttttccgctctgcaaagaagggttgggcagttagatcatgggagtacataccagctggttcaccagtatgtgagtacataggagttgtcaggagaactgctgatgtggatactatctctgacaatgaatacatatttgagattgactgccaacagacaatgcaaggtcttggtggaagacaggtaacatagagatgcttaatttactatgtgattattattgaatcaagcatataagtttttgaggtatatctccttgtttttcttcgccaacagagaagactaagagatgttgctgtaccaatgaataatggagtcagtcagagcagtgaagatgagaatgcgccagagttctgcattgatgctggttcaacaggaaactttgctaggtttataaatcacagttgtgaaccaaacctatttgttcagtgcgtcctgagttctcaccaggatataaggcttgcccgtgtggttcttttcgcagctgacaacatttccccaatgcaggtactgagagaaactcatctgtgagggtgactcattcgaacattccctttataaaataaatcttactacattctctgtctcaattgtaggagctcacttacgactatggatatgcgcttgatagcgttcatggaccggatgggaaggtgaagcagctcgcttgctactgtggagcgctaaattgtaggaaacgcctttactaacaaaggctattggtgaacttattttttggtcactctattttggggagtacatagatagcaactatctcccaagtggaagaacccttcacattttatttaagggactttagcttcttctgcagcgtacaattagtgctgcctttttcggcattgttgtttcctgaattctattgttgccattggcatcttatctatcgggtcaacaatattaatcatctccttttcttatttgctgtgttaacctaaagatttgatgtgactggcttatgatagatattagatacagtagacgtagcatatcgtttgtcaaaacaaaattgatttcttaatca

SEQ ID NO: 63054 - DNA, 698 bp, Arabidopsis thaliana landsberg
tacacgcgacgacttctggattttggcccgtttaatctgtctctcttattaaattcatcatgcatttgaatgcccatttgttttattgactttttgctgttgagtttctgacatttttttaatcccacgatagaagttattagaatcacatcattgaaaagtaagtttccaataatttacgatacttttacctaaacatttactctattttttagtttttttaaaaaaaattattataaaattttgaaagtcaactatagtatttttaccaaaacgcattgaacaatagcatatgaattagaacatattcaaattctcaaatagattgttttagtgatttagtccaatgtattagaacaaaatttaatgatgtttcatttctaaaccttttatcttacaaattggataaccaatcaatgacttttacttataaaataatatggctggtaaacaaaataacaaataaacataaatatccaattccaaattaataagtcgatgccggattttgacaaccaaaataacggtgtaagattgttatagtgcttgtacacatgattgatggtcgtatatgaaagcaatacttcgtataattaaaaaaacttacatgtgtgactatgtgatgacgttttttcgtgtagttgactcatgaattttttaaaaatactaattgtaaaacaaaattatttattattttt

SEQ ID NO: 63055 - DNA, 590 bp, Arabidopsis thaliana landsberg
  unsure (1)..(590): unsure at all n locations
ccatctgccttttattatttctaaatcacaattttctgtcgggagtttgataaacatatgttgtgtttacactttaccctttgctaacgaccacagtagtatcgtagtaattattacaaaagcattcactagtctcatggtttgaaaacatttctcattatagtaatctttttgttaattaccaagaaaattctgagcttaatctcacaatttcattggtttgaggattatagcagagttaaaatagtttcccaaaccgtgctctacaaacgtataaagtttattaacttaatgtgcagtgtctatatatgaaaatatttatttagttgcaggggatacaattattgcatctaattcttagagatgtctaaagattataaactaggagttatatatggaatcgcactttctcagttaagctcttctggatgttactattctttagaacgtgtttgaattgtgttacctacttaccgagatccactagaatgtcattaaagacaagactagtttggtattcaagcgaagtgcacatttactaagagagatngcaagtcaatgcattcgaattatacccaataatgaactgg

SEQ ID NO: 63056 - DNA, 571 bp, Arabidopsis thaliana landsberg
  unsure (1)..(571): unsure at all n locations
acacgtacctcattatccaataaacaaacaaaatccatttttttaagtttatngtgtcgcacacaatcacaatcttccatgcgtcagcaaaaccaaaatcgtgaggcctataatttcccttcatctccaaaatcatttctcctcaaatttcttctttagaagaataaaaatcttctctctaatctctccactctttcataaatattttcctaattcttctaccttggtgtctgattctagcaccaaaccattttctcctaccaaaatctgggtttcgatcaatggtagacctttatattcctacttgtctaatcgtgtaagttctgaacccaatcagacaaattttatttcttcaatcnnnnnnnnnnnnnnnnnnnnaaccaatttcgatcaaaaccaactaggtttgaatcaattgtagatcttttgattcctacttgtcttattgaatccaagctttgtctcttcttaaggttgtaataaaattgggttttgtaataaaaccaatttcgatcaacatcaattgggtttggatcaattttagagctttttgattcctacttgtaatttt

SEQ ID NO: 63057 - DNA, 691 bp, Arabidopsis thaliana landsberg
tttcatttctttgcacgcctccattaggcactttatttattatcttctgtaactctctctttgctttaattcatgagatttggggaccgtgttcagggtttttttggtgggtttctctgttttttttttcctttttcagacctttcgttatctctatgtggtcacttaaggcctctgcaatttcaattcattagtttagttttgaaaaaaaatctgggtgtgttcattagctagctcctctttgttcactcattggctctctatgatttgacatttaagattattgctgcatttcattttgctaaatcgaatctgcactcatgcttcagctactgttctttgtttcccagtaaatttaagtttttgagatctgaaactataagaaattttccgattttggttctcattagttgatagatctcttatctcactcgaagcttcttcttttttcgatctttagggttcttctcatcccctggttaataatgggtccaatctcgattcttgttcactttaattttattttcacaatatctccaattacgcagatgctttttgacaattttgctccataaaagtgtcttcttttttagctgcattaaatttataggtctctctatctgtactggtatagggttcatgattgagtctacaaaaacatactgaatgacctaaaagcttttaactttcg

SEQ ID NO: 63058 - DNA, 1184 bp, Arabidopsis thaliana landsberg
tattcacaagactgaaaagcttagccgtcctagtcacctcagttcaactggggacatgccattgatatttcagatcccaatcatcattttactgagcaaaagtcctaaatcaaaaggctcaaaatgtaaacaatcatatttattcacaccatctaactaataaaaacaatttaaatatggtaccaaatcttgcaatccaaaacttgatatcgattccaagataaatgctgtacatgtccgtccaattaatacaacttaatattttactatgatttccactttgcgaatgtaagtaaccttatatatttatgtcattgattccgtttgctggcttttaatgtagattcttagtgtactctgtttggtttctcaataacattattccatttaactcgagtttcagatgtttctattaaataagtaatgaaagcagctctaattctcccaaaattcacaagtatagaaagatagaaagatagaaacagagttattgcatggaagctgaaaatcatacagcatggtggatataaccaatgagacacaaaacaatcacggcatgtgttatagaacaacacttatcatctgtattaacataaagcaaaagttcctatacgacatagtccaaagttacagaccataagcacaccttatgatttgttgtaccctctaaaacacaggatgatgacaagaagcaaatttgcccaaatttactgagggaaaaacgagggcttaacgctctcatatctcaaacaaaaacttctcaaacagtttcatgtgttcagattggagggcaatggcaacggataagctgccatcattagtaggacttggtagcacaaaagacaaaccctcgtatggaattccaccaggtcccataaatataggacgaccccaaccaaagtctgcatcataaataggtaatctaacccagcttgtgattcccaaatttgggcacttgtaggtatgtgcaccgcggacaagggctgacagatcaggctgcatctccaggtagtcaagagctgacctcagatagttatcatccatacgaaccaagaaatcatgaatctgtcctgcagcataccatgttggcttagataacaaatcccctgcaacagccaatggtgttgcagtgaatatcacattcccaaagtaaccaggaggcagctccggacgtagtctagacc

SEQ ID NO: 63059 - DNA, 574 bp, Arabidopsis thaliana landsberg
acgtgtttggacagaaatgcagcaagctaggcatcacttttttctctaaaagttcgcaaatgattctaatatttttttgtacatattgaacgcttcttgatattggattcctcatgactatgacagggtgcttgattcccaattgcttgatgtggaaacaccaactttttatatcggacggagccttgttaaatctggagtctcagttcttgtctacaggtaaaaatcaaggtcggtttgttaaactactacttgtcttcatgatccaatggtggatgtgtttcttgcacgaacagcggagaccaatattctatgatcccgttgacaggacgtataaccttagtgactagatcggccatacaattgggactgtgaacaagtgtaccacatcgagtctggtttgctggccaacatgtaaacagtcaacattctgtaatgggacatgtaaagaaaaaacgcgtacagaactaacacattgtgtgctgtgccctatgttggaggatggactctagtctatggaaatgtcttgtccttcgcaccattgctatgagctttacacgaggacccattctca

SEQ ID NO: 63060 - DNA, 724 bp, Arabidopsis thaliana landsberg
tttttggccgttatgacaatgcttgtgtgtttacagttgtggatttgaagcatacaatctggcagttttgggaatttctaaacacaacgaaagacagacatttttaatataaaaaaatctatatcaatgttcaattgaatagctaagcctactttgaaaacatatattaatatagttgccgaataaaagtttggataatagtcatatatattgctaaaatatcaatttctcttcatatgaataaactttttctgaaaaagtattataattttctagtatacatgacgttgcttctacaagcttaataaaccctagcttggaaatatctctattgaatttgtcgagttgttgattattattttattgtgtgatgaacattcgcactttacattgattgtcttatgtcatggagattcttatttcttatgtttggtattttaaaaattactcttgatcgttcatttcctttcttaacaaaactaaccaaattggctacgttgagatcgagttgctttatttgcccacatctgattttttattgtatgtaatgaagagattcatataacacacaattaattcggttcttcggttctccaccatcacattcattgtatatttgtttgcaatttgcttttttaaattaattctttataatttgtttcgtttcttaacaattaccacccaatatattggataagttaagagttgccttgcccatgtgttc

SEQ ID NO: 63061 - DNA, 755 bp, Arabidopsis thaliana landsberg
ttattttatttaatatgaatacaaccatattataaaaaaaactgagtcggactacaccaatacgtttcatgcatattcaaagaaataaatattctattactgatgaatacaaatatttgttacagtagaaaaaaaaaaagccaatattctccttgggattagtgctgtaaaagaatgacccttctcttcccttgtcccctataaatatctttctatcgaccatcttccttctcacaatttcaacttccctctttctctatattacgcttttgcccctcactccctctttcaacaattagggtttcgtctgctctacatgaccctctctgtattcttccacagctttcttgaactgcaaaacttcttcagatttgttttttttttttgatatctcttacgcataaaatagtgattttcttcacatctctgttcgattgatttgcggttcaataaagctgtgggaagatacagacagagtcaaatgattttctaaatttcgttcatatatatgaaagcgtgattccataatcagatctgatcacagaatctttcgtttacgtgtttttgttttgatctctttgttattttttatgactaccaactatattggtagctaaattcaagattctaatctctaaataagttctttaaaaaaaaattcattgtttaaaaaccctaacttttgtctatgagtttaatcagtgtttatgaatataatacatacaaaaatgtttttgaaatgggatctataaatt

SEQ ID NO: 63062 - DNA, 503 bp, Arabidopsis thaliana landsberg
gatcttaggaagcattaatacatacttaccttttatatgaaatacaaagtgattattctacctatcccctgatgtggagatgcttagagtctcattttacaccataggaaacagaacaagaggtcatttatctatgataacataggttttggatcaagcagggaaccaaacccaagtctgaacacactgctgtctcctgatagaactgaggattcaaaatttcccgtgtgctaaatttctccagccttgtgagtattcccatgtatcatttcatggtcaccattgttgttcatatgccaagcacactgagcttagaaaaacctcgtatccctgtatccaagaaactgaacccataaaaaatattaccacattaacattatagacaaacactaaactcatgggtgactgatcacactctatcttaccttggacttgcttggcttccatacatcaccccagctaactgtaacctcttggtgggtgtgtctaggtttcgagatttt

SEQ ID NO: 63063 - DNA, 525 bp, Arabidopsis thaliana landsberg
  unsure (1)..(525): unsure at all n locations
accaattcctgtttggtcatgggaatacccataatataattttggcccacagcatccaccaggaatggggcgcggatgatcttgattaattgtccgttattcatttcgggtaccagcaccctttcataattccgtaaaatgtctcctaagtttttaggaaatgggcgtaggtatcgcaggtgggcatgtgccacggcctgtccttcggcgagtaattcattgaccgcgctcttaatcgctccnnnnnnnnnnnnnnnnnnnnnnnnnnnnnnnnnnnnnnnnnnnnnnnnnngatctattatttgcaggggtatatcatcggctattttgtccactttttcctggcggatctttaccatgagctggggatttttcgggtaatactttacatttccggtgatattctgcttttccaggccaccaatacgatgttccaacccggctgtgccggggatagcccaggggcgcaccaggttttcatcacgctggtagggctgaaattccgtctcgccatcttgtaacgct

SEQ ID NO: 63064 - DNA, 552 bp, Arabidopsis thaliana landsberg
tactgattctttcccattgtcccatgatctgaatgttcattatatccatgaagctcgtggattctataatgttcgtagtgttgctttcgaatctacgattttgattacttacagtttttcttgggtgtgtctcattcctctttttcctgcagagcgctgctgccaaaaatcgtgtgtatctgactcggactgggctctcatcatgtgccacggtatcatctgtgctcatagcattgatcaatggttcaccgctcctttttgattttcttcaagcaatattggtgttgtggtggaactctcctcttactttaggacccttttctgttaattgtttatgcttgccgatctgtttttactgtattccacttttgtgtgctctacgcgtctgatagatatgtatagttctcactctcaattacaatagatgataagttggcggctgatagccatgtgggcttccattaatttctcctttcctgttgtcctagagacaagacgcttggagtctccagctactacagagcttgagtggttcaatagtacctgtatcat

SEQ ID NO: 63065 - DNA, 669 bp, Arabidopsis thaliana landsberg
gcactctcgtgaacactccctgcctggtgtttaggattttgttttcttgatcttctactagggaaaagtattgttcttcttttttatctgtgttcaaaaaactctggagcagtcacctttgtatcttaaacagagttgataaagctaatttacatcttttgcaagaaatgcagattggtaaaaggatcgagagactaaagaaagggaaggctaaggattcacaatccaaagtcaaggtagaaaatttggctagagaaactactgacttctcataatctagtctgctactgatattcacaatgtgtatgtgatattctatgacacaggaggaagctgaaaaatctgctttggaaagaattcatgaagctcttctggaaggaaaacctgcacggtcagttgcattgtccgatctcgagatggaagttgtaaagcatctctgcttgcttacaatgaaacctatgatctacgtggcaaatgttgctgaaactgatcttgctgagccagagaagaatgcttacgttgaagaagtgaagggtctttcttctgatttgcagtccggacatgtagttgtttcagcacaggtctggatcattgtctatttacatcgtatgctttgactttttcacgcatgtattttacttgaaatgttcttccactacttgacaaaat

SEQ ID NO: 63066 - DNA, 446 bp, Arabidopsis thaliana landsberg
ggccttttctgtaactctccttcccagattctttaagcactataacttctccagttttgtccgccagctcaacacatatgtaagtcctaatctctatatatactaatatataacaaaactttatatatatatatgtatatatatatatatatatatatgtttgtatttctgtgtgattctcactaatttgaggagatctatctactaattcacaataaaatcgtgaccactacaactattgggtaaaatatttgatttctgtggatttttccctatggtgcagtaaaaattttaatgtagttcttgagactgggcttttggtgggtgttttcgatacatcatcagagtggtaagttagttgcaattataatatatatgatggcttgaagcattcgtgagtatatatatataaatgcaagtggggatcactgttttccgaatttttt

SEQ ID NO: 63067 - DNA, 1204 bp, Arabidopsis thaliana landsberg
agtcatcaaaagatgtcatgattgcccagttcatgcaatattgtcacatgtaatattcaggcttcaatacgccaatgtaagataggttgcggtattgttctgcaaaatccatgccatagcccacgacaaattcatctggacactgcacatattcagaagatacaactcatgttcaacacaaagccatgaaatatatattcttaattcaggctagttcctaacaccaacaaatacttttgtttaccatggtttagctaagaaaaggcataacagggcaaataagaacggaaagcataatgtcatggtctcacctattctataaatagctgtatactctggttaaggtggcttaaacattccaaaggccttagacagacgtataatgataatacatatattgaacagagagaaacaagaaacagcttacttcaaaaccactgtagaatttcccctttccaaccagcttataatgaacctttcttctcgatggcttgtcgaggagagtgcaaaccgaaacagatgacgccttttttgctttcatgtgctcaatcaggcagctaagtgtattgccagtatccacaatgtcctcgacctttaagaaaacacataactagtgaatataaaaagtagtgaaatttcgaatgcttaacagtaaaataattaccaagacattatcaaatgagaatgtgaagcatcagtgattcagtgtggtctcctttctaatatattcatcacatttttgcatatcacaagtgttcttcaaacgttaaaactcagaaaccaacacatcaattttaagctgtaaagactcaaacttcatgaaattcaaatgaatactaaaactcaattgctaaagaaactgaatcaaaactgatgcaaaacacatattacccaaatccagatccatcacgcataaagagatggagattaccaagacaacgtgcttgttcgtgatgtcaagctttaagtcaaatgatactctgggaactccactggatacagtaccagagccgtaagactcagctctaatgaaatctatagctattggcaagtcaattcgcctaacgagatcggccaagaagaggcaagcaccagtggctacgccgacaaaaataggagtttcctccgagtcaccggagaaatcagaagtaatatcgattccaagctgattcacccggtgcgcaattacttcatcgctgaagag

SEQ ID NO: 63068 - DNA, 110 bp, Arabidopsis thaliana landsberg
tgatgtaaacatacttttttttgggtgaataaaaaataacactatttttgatccaaacaactatgaaggtcctaacaattgggattacgacatcttcatatctttggact

SEQ ID NO: 63069 - DNA, 375 bp, Arabidopsis thaliana landsberg
ggaagtatcagaagaggtacgtctttgtgtaagcttggtatggttttcggatgacctattagatggagaaaacctgatcgagcaatgtgaagtggaagagcattgcaaagattcctctgaggactaacttgtgtgcttagctaatagatgacaacgatcctaatgcaaaacccaaagggagacaaaagtagctgatgcaggggctgataataatttattcaatcttaagttaatttttttcttcacatgtattggctaaatcttctggttaactgatctatatattttcacttcgtaacagactcgaaatcctcatttatatatctaaaaaataatgaatatgataatgctaagcagtaggcacactaaagattt

SEQ ID NO: 63070 - DNA, 939 bp, Arabidopsis thaliana landsberg
tctgaaaatttgtgtactcttctttctcataaagtttcccatgatcccattcctcgtcatataggaataggcaattagctagtatgtttctttttctctttgtgtaaataaaaaatatgtgagttttaatcaatagaatcgtcatttcccagtgtctgagtttttttcttttcaataatcgaaaactaaggttgccaagtctacaagagattgattagattcctcggtgctgtatgattcaagaaaaaaaaagatgaatacattgacgagcatacttgggtcctttgggagaaagagttcgagtagaacaactgcttcgagtacaggaccaaacctctcccaggaactagtagataaggtcttttcggaatttccaaatctgtctttggttctctctacttttgctgctatttcccaagtctttctttatataactcagatgtttgcaggtaattcatgtgagtttggacctaagtgatgttaggacaataaagaaggtgttcagtaaagttattaagatcccaggtttgctgtttactcttttttgtttttcttgctagtcatttgatgagtggaacggtttagcagatacagtaccccagtgtagttcacatatagttctaactggcctccttctattgatttcttgtttaggtgtctattcggtagctcgagatggggactgccagattaccgtgactgggacaatggatccagaaacgttacacaacaagctgagaacttacaggcctatgatacagaaggttgtgctgacgaagaagcacgattcagatgaatatgatgaccgtgagaaatcgaagaaaggaaaggaaaagtttgttttggatgacgagtttcttcctacggaagacgcgcttcttcctaaggaagacacaaacagtgaaaagctttcaccaacatctaattgggaaccatcag

SEQ ID NO: 63071 - DNA, 1957 bp, Arabidopsis thaliana landsberg
aactcactgaaactgatcagtatgttcaattctaatgccttcagggttattttcataaaaataaacaatgctttgaggtagttccattttcctctttcggaacgcagctgctatgacctgaaatatttgcacaacgggacttccttggctcttcttataacggtatctattagtcccacacaagaatattacaatagctatagccatagagacagtgcagattccataagcccaagatcttcccacttcatcttgcatgtaaactaaaacagtcacagccaacaatgtccccatactaataaagaagaagaacctgcatgtgccaattaaaattttatttgaaaaagggaacactataacaatgttataattccatgcatgaaaataaactctaaacctaacctgttgaagaagaaagccatgtgagctttctctttaggatctttgtcatcaaactggtcagacccaaatccagagatactagatttaagaccaccagttccaagggctataaggtaaagcgaaacataaagaattgtcatttggaaggcggtcgcgggtatgcaagcttctccatgatggcatgttggtggacgtagctctggcagcttagttgctaccgctagagcaccagttccctgtatacaagatattaaaaccgtctccaagactccaactaagttaacgaccttagcagatttgatagcgaacattttgtttgattttttctaagtgaatttttttaatagagctctaattgataatttgcttataatagtagttttagaatcggagatcttggagaaaaatacaggttatttattctcttagacgcatctactactagatggtaaaaccaactaatcacaatgacctttttaaaactatatataagattttagatagagtcttaccagagcttgaatggttgagaaaatgccgatggttttgaaacggccgaggaaggagtcagcgagaaaaccaccgagcaagcataggaggaaggaagtgcccatgaaatcagtgacaatgttggcagaggttgaacttgggagatgcattgtctccatcaaatatgttaccaaattcactgctattcccattgttgatagcctctccacaacttctatccctgcaatatatgtttcatttttaatgtgtcaacatttgtagttttgtacatatgttctaagttaattggtgagtccatttcatacatataagtagaataatccttaactagtaagcagccataagctgattaacaagtttgattgtgttaaggtcaattaatacgaaaatatcatagacgtttcattctcatggctattaattgggcccacaaaatgaagtatataagtattgataaacataaatgaatattcatgataagttatggatgtaacattcaatctttttgtcctttaaaaagtaaggaagtgaaggagatatattatcagttttaaacttagaagcaacaaaactaaattttggattatccggactaattttaattaagacaactggtactttttgtaagagaatattaaggaacaaaacaagggtttggaggtcggcattttctgctccctaagtagacacgtgaatacagatataaatccagttttcgtttttctctttctaatcaatattgtttttcagaatgattaaattttaaaaaagaaaaaaaaatgttattatgattggataagcgagatggggagccatgtggcgtgttccttttctctttatctttctttcaatcagcgagattcagaacaacgacatttcatatttttatatacaaatatatttatttcaatcatatcatgcatgtgtgagtgtgactgatttgaaaatgagtctcttttgtttctcaccatgtattcacaaaattatacaaacttatgggaatttaaaactttataccccttgaaactacacccctctttggatc

SEQ ID NO: 63072 - DNA, 584 bp, Arabidopsis thaliana landsberg
  unsure (1)..(584): unsure at all n locations
aacgtttactagctacatttgaaaaaatttcttactcaaagtaagacttcaacttttattacaaaatataatgcttagttaaggaatagtcaacaaatgaatgttaaaaaaaatgataattgtgaaagcttcagaataacacgacgtaacattcgaaattaataatgatattttaggggactaaaaggtttatgtttcttaaaacaaatctcttggatttgtatttgatttcctgaagttattttaaagtttgagatctaaacctcgggattttattcacgaaagttgcaaaatattacatcaagtcgtgttttttattactatcttaaatcttaatcactactgttacagaaatatcttatgttcatggcgcacatcttttaattaccacggtggttcatgaagacacaaacacaaatgatgtcaaagttgtttccactcttaactataattaaggctaggggaaaaaacagaggttttaaataggattgaaaaataatactggaaaagttagttcaaagtggatgttaataattatttggaactgtttagccataatngcaaatgctatacactagctagac

SEQ ID NO: 63073 - DNA, 2153 bp, Arabidopsis thaliana landsberg
agctgcagatcattctcagtcttcgtttgcattgtcttattttatacgttcctcagacgtattggcgtaccacggttcgtctccaacatacttgtaagttaagaaaaacgtctacaaatgtcaatttcttgtatcgcaagtagcaaacacttggtttcttgtattgcaagtaacaattttttttattttttttgaactaggctggtttgattcttggacctcagctgcttgatcttctggagtattcatcagaccgattatcgttagacatccctggaaacgtagcgttggaaggtgtggccaggcttgggttggtaatgttcacgttcttaatgggcgtgaagaccaacaagagagcggtgtatcaaatcggtaaacgtccgatagtaatcgcggtttcgtcctttttcgtgactatgatcagcgggttagccttcagaaacttccgtctcgacaaggtcgaccctctttatatgcctctgaggctagccccaacagaacgctccgtgattgtttcgattcaagcagtaacgctgttaccggtcataacccacctcgtatatgagctcaagatgtcaaactccgagctcggccgcattgccatatctacagccgccgtcagcgatttccttggatttctcactctggtatgcatctcctacgtaggaacatacaggtatgtaaggcgtcgattaatttaggaatctaattggtgcattctcatacaaaactacttacctcattaaatatacttttgtagtaatcaaagtctacaaatccggagacttaaagcaatatatataatgctctaaaactggttaaaagtttgatcaacgaaaagttaccgttttattgtctataaagcaatactaattggtatctacacaatagacggcaccggagtgtttgattagtaatgtatatctactatctaacgaacattatttgcttaatagtttgaaacggtcatgcaggtatgtatcgcccggaatttccaaccgcgacatagtggcattgatcatcttagtccttgtgatcctattcatcttcaagccaatggcacaacgaatagtggacatgaccccagaaggcaagcccgtaccgaaagtctacttatacgtaacaatcctgaccgcaatcgccgcgagtatatacttaagtgttttcaaccaaatgtacattctaggagctttattggtggggttggcaatcccagacggtccgcctctgggatctgcgttagaggcaaggttcgagagcttggttacaaacatatttttccctatttcaatcgcggtcatggcgatgaaagctgacgttgtaagagcattgtattcgttcgatgacatttcctttaacatacttctactgggtcttacagtggtagtgaaatggactgcctcttttgtaccttgcttgatcttctgcgagttacctactagagaatctgttatcatcgccactatcatgaactataagggttttgtcgacttatgcttcttcgatgtcgccttaagaagaagggtaaaataatcttcatctaacctacactctacatgtatatatattgcatcatatggttttgaattaatggttgaatgttttttgttttctttaacagaatttgtcgcgagcaacgtacacggtcatgattatttacgtgctattgaacgcggggattttgcctacgattataaaagcactatatgatccaaagaggaagtatattggatatgtcaagagagacattatgcatcttaaaacaaactcagatctcaagattctaacttgtttgcacaagcctgacaacatctcaggtgcgatctcgctacttgaattgctttcctcgccgctaaacaacgataacaaagacagaggagtcattgctgtcacggcgttacacctagtgaaactcgcaggacgtacgtttcccatcttgatacctcatgacaagcggtctaaaccgcggttgcttcaaaactcttacatacaaacaatgatgctcgcgttcaccgagtttcaacaagagaattgggaatctaccactgttagttccttcacagcttattctcatgagaacctaatggatcaagacatttgcaatcttgctttagaccacctcacatcgatgatcattgtcccatctggacgaa

SEQ ID NO: 63074 - DNA, 432 bp, Arabidopsis thaliana landsberg
tgagagatcgacctcgtgatacatgaccacaccagtctggtgatgtgtgtatgctaatagggattgtattctgtacacaagcagatcacattctttcttctagagagatcacttctatcggaggatcatggagattccgcgttgcttcacctggcggtctgtctcgcaatatatggaaatgcatgcgtattatacccagatgcctcatcgggtatgatatcctgtctgtactgacgcaccatttttccaatgtcggagtggtcgccatcccgtcttttgtatcgggtctgcacaaatggtgttgcccgaggagcagagccgtatgcgagaaagggagagctgggatgaactagctcggccgatgaaaccgctgctttggtggggaaggagtgcctgcgaccacctgatggtagcaatatataccgatcgttg

SEQ ID NO: 63075 - DNA, 456 bp, Arabidopsis thaliana landsberg
actgcgccgttagcgtctcctcgctgtgcgtgtccggatcaggccggtggatctgatacaggttgatgtgttcggcctgcaggcggcggagcgagttctcgacctcggtcatgatccagcgacgtgagttgccgcgctggttcgggtcatcacccatcgggccgttcaccttggtcgcgaggacgatgccgtcgcggtgtcccttgagcgccttgccgacgatctcctcggactccccggctgagtaccggtcggcggtgtcgacgaagttgatcccggcgtcgagcgccttgtggatgatccggacgcagtcatcgtggtcggggttcccgcccgctccgaacatcatcgcaccgagcgcgtaggggctgaccttgatcccggtctggccgagagtgcggtactgcatgtggttcctcccgaggttccggtgccgtaccctgaattaaacggaac

SEQ ID NO: 63076 - DNA, 608 bp, Arabidopsis thaliana landsberg
  unsure (1)..(608): unsure at all n locations
aaaaaaaaaaaaaatagaaaaaaaaataaaaaaaaaaaaaaaaaaaaaaaaaaaagaaaaaaaaaagaaaaaaataaaaaaaaaaaaaaaaaaaaaaaatgaactgaaggaaacaaaaaaaaaaaaaaaaaaaaaaaaaaaaaaaaaaaaaaaaaaaaaaaaaaaaaaaaaaaaaataaaaaaaaaaagaagaaaaaaaagaaaaaaaaaaaaaaaaataaaaaagaaaaaaaaaaaaaaaataaaaaaaaaaaataaaaaaaaaaaaagaaaaaaaaaaaaaaaaaaaaagaaaaaaaaaaaaaaaaaaaaaaaagaaaaaagaaaaataaaaaaaaaaaaaaaaaaaaaaaaataataaaaaaaaaaaaaaaaaaaagaaaaaaagaaaaaaaaaaaaaaaaaaaaaaaaaaaaaaaaaaaaagatataaataagaaaaaaatataataaaagaaagaaaaaataaagaaaaaaaagataaaaaaaagaaaaaaaaangaaaaaaaaaataaataaaataaaaattaataaaaaaaaaagaagaaaatagaaataaaagaaaaaaaaaagaaaaaaaaagaagaaaaataaaaaaagaaaaaaaaa

SEQ ID NO: 63077 - DNA, 414 bp, Arabidopsis thaliana landsberg
aatctatcggatgatatacccactaccataaggacgctttcttagcttggtatatggatcctgcaggaatacttattgaataggatatcttctgtctataaagaaattaggcattggaagactatattccagattcccattagtttatagtctttgacactaatctactggatctgataaggttgctatattctgtgattgatcggggatggactcaatgctcggaaaaaatatgactctagctcggatgattactcgaccctggacaccctttaactcttagcgggattcatggaactaacttctcttttcccactagactatacccgttacaatgccatgatcggatattagtaaacctgctgtggaacaatggaattgggggtggtattaaaatatctgacgtgttttaca

SEQ ID NO: 63078 - DNA, 601 bp, Arabidopsis thaliana landsberg
ttttccttgtttctatgataacaacaaaaccaaaaaccaaaaaccaaaaacctcaaaatctttttacttcaccactttaaaaaagactcttctcttgtgtcaaagctctccatctgagaccaagttcttgttctttgaagaatcacttcctgagaaaagctcttttatcaaaccaaatcctattggataagcttcctccgacagatctcctccatagtcgtgattcacactgttaacagaatagttcagaggcaacaaggcaacacaagaagaaaagagaaattttattattgatttgatgaaacagaagaagacgatacaaatcaaatcaaatgatatattaaaaagaggtgtataaaggttcagacttgggaagtttgtcacagtctgaagaaatccatccaatcctctgcttctcattgtcatagatcaccattatcccttggaaagatatgtctatcacacacatagacacgagatattgttgtcaagttatgaacaaaagacacctgagaaaaacttaatatatatatacgtacctccaatgatattgtagccctcgagaccgattcagttccattcagaatacccaaacatactc

SEQ ID NO: 63079 - DNA, 195 bp, Arabidopsis thaliana landsberg
caaaagacaaccaaggagccagccgcaaacgaaccccgcacgcaaccacaagctgcgaattaaattcccccaaccccccgaccggcgaggagacccataaacaagaggagcccaggaagactgccaccactgacacgggctatccgaccaagcgagcaaacccctgaacacctggggaaaagaacgccaaaaaaa

SEQ ID NO: 63080 - DNA, 1491 bp, Arabidopsis thaliana landsberg
tctgcaacaaggcaaaggactcttcacttccgaccaagttctcttcaccgatggtcgctcaaagcccacttttaacgattgggccaagaattctgttgctttcaacaaggctttcgtaaccgctatgaccaaactcggccgcgttggcgttaagactagacgcaacggtaacattcgtcgtgactgtggtgcctttaactgattatcctttttgggttttgttttcgagatttgttctttgacatgttatgagtttttgttttgttgtcttctgtttgtttctgcttcttgtatttttgaaaaacacattaacgaatctataccgttgttttatttctcgtgactgtaatattaataatcttatttctattaaacttgtttaataaatccaatctgagcatcaaaatcaagacaaaccaagacatatatacacaaaacctaaagatgttcaaaacttaaaactctgtaaaggaagaatctgatctatctagagttagtagcttatctgaatctgcaggcgatcttctcaagctttgtaggccaatcttcccctagtatcgatgggtttaacgccatagctacttgaaaatctaccagagaagatgctgatgaagcgttactagaccttgaagctgctagttcaagacacggtttgatcaatctcttcaagaaaacatctagccctgcgtttaacgagttagcaaacccaaccgaaacctctaatccttcctccaagtcatcttcgagtttcttctttaaagaaaccgaatcaggaagctcaccagaggagtaacaacacgtgtctatacgatgttgtttctttataacatctctaagattaacaccaaaaggagcttcaataggttgacttctccaacatggaatcaattggtcaacttcttcaacattttccattgaccattgttgcctaccactagaagaaacaacctcagtgactagactcttccctttgctaatattaccatctttattaagcctccgttgagtccttcctttacgaggagatctaggaagttctttgcacaaagattgaaaagctccatttagttgcttcttcttcttgttatctgactctacaccattctttatgaatggaggtagtgtctttgagagacatatattcttaagaatccctctaagcaaagcgttgtgtagacttatattctccctcttcaccgtcacaatgattagcttatcgaaatcagatttgctgattttcaagctcaagaattttgataagagattaaggtaactctctgttttggcccgaccaatcctcttctcaatctgagattttaactctgaaatgtctgttctaacgacatgatgctgactcgttggcatttgggtcccctttaaaaaaaaaacacagttcacacaaaaacaatgaatctggattcgtataagtcaaatcatgatagaaaaaggtcaacccaagttgcgatttaccaaaaaatgtcgaattgagat

SEQ ID NO: 63081 - DNA, 1608 bp, Arabidopsis thaliana landsberg
  unsure (1)..(1608): unsure at all n locations
ttggggtctattagcgattcataacttatgtgcttttgaatccagagtcatggtaaatgtctggcgtttctttgtggagcgttgcattgtgatcttgttgtagacacagctcggcttaagtccaagtgtaatcctgcagctgctgcaaaaaaccggcacttatgtgaggtacatatttttttagttttgattcggtcaatatcatatgacaagtttggactctaatactcaaagaaaccttgtagcttctgagaattgcaaagaacatttcactgaaagatttgaacacttctgaacatattgtcttcgttctgtttcttgtgttcccgtgcttatctgctctggtgtggttgcattgcagagtttggctaatagttgttttccggtaaataaaggtccatcagccaaccgtcttcacggtattagaaccttcctgaattttactatcttatttcaacagtttttgcttgtattgatccataaagattcaccactacttttggggtttaaactttacaattgtagacttcttcgtggggggttttaatgatccatagagattcaccacccttttttgggggttttaacttttaaaactgcagatttcttctnnnnnnnnnnnnnnnnnnnnnnnacatgttcaggaggatcaaagcccttatctcaaaaaccaaaggtaacataataaaccctttttttgtaaatgatattatatcatatcatatctcatttaatctcagtcatatgttttgcagaagaggagtatagtgtacattattttctccatcatcgttttggtagtgcttcttctctattacagctttgtctatttgttccgaaggtaacaacaacattaaaatactgtttcagatttccttacaactctaaaaccgaaaaagcccctcatgaactcattgttcttacgttttactaatctgtagaggattaaagagaagatctcaagatttgaagcgtattagacacaatggtctgaagaagaaacccttctaaccatatcaagctttagctttaatggcggctgagagagagtacattttttttctttgcaagatgattacaattaggatcagattagtgcattttgcaacatcccttacaattatatcactacttacaccaatattgttacttagaattcaatagtgtttactgcaactagagcggtacaatcgcatttaacatttctaaaacatttcaaaggttcaacttaattgcatttttcatatttggtaggatcattcttaattatgtggttgagacttttgagtcttgatcaaccatgattatctcgatcattttatcaattgggccgtttgatgaaaggccttttgggccaaattacaaaacagatatctttggaagaaccaaaacgacaacgtgggatagacgttagagatgacgtgaagaaaaaaaaggagataagtggaacctactttttcccagtataagtccaatatcactcaaagtcaagacactaatcgaatcatagccctgtctcttgtaatctcaacttgaacgataaacaaagaaacaaaggggataaattcaaaggccttaaaaatagggtaaataaaataatgacgttga

SEQ ID NO: 63082 - DNA, 1559 bp, Arabidopsis thaliana landsberg
aaagacaaacggctttggctcattctgtctcgtttagacaacaaaccagaagtccccaacatgatttaccgctgctctcgttggctatcccaatccatgatgaaatcaaaggagctttctcttctttctgcaactccttaacgaaacccaagaagctcaaatttcctcatgctcgttgatttttttcctactttattcttttgcctttttgtagattttgaaaacagattgaaaaatggtttttgatgcatgagctaatgagaaaaaggtgttttacctttatttgttttcataacatagtttctaggactaattaagtccagaactaattatggaaatgtcaaattgaaatttcgaaatctttatatggtcgtctctaaatagtaattgatcattgtcattttaagcactatatcctttagaaatttttaattcttttgaaagatttggtgttacacaaatttcatttaccacaagcagtggagatacgtgtgaaggcagatgcagtaacaaatcaatttgcagtacataaatggtataggtattgtataatacaatgtccagattataacaataagtactaggatttaataccattaatctaaataccttaattaacaaaaacaaattgtatcgtacgtagaaagaaaatatcttctatagtctctatataaacagctctttggttctaaccaaaatacttggaaacagttaagtttttctctttctcatcagcacaaagccatgttggatcattcttcttcttcttctcaaatggtttctcttctttatctctcatcatcattattgtatccatgatgacattacacatcctcaacaaatcatcatgacttggttcctttttttcttgcagacttgcattctaaggcttgatactcagactagtggatgggacaaatctatgcataagatttttaaaggcattcatggtattttttttttctcatttttatttaaatcttgcgcattagacaaatgttgttatgttttgtaatgattttgaacagatgtaacatacacaatcgatgcgacgaaaggattagcttatctctcaggcaagatcagccctgagattattctgaggattcgtaaagctaagaaacatgctcaattaatccacatggattatggtcacgttactcctcctcctcaaaactttctgccaccgtggcaacaatattcgccgatgtatcaacaggtgtcggcgccaatgtctccgatgtctcagtatatgaactaccaacaatttccgtatactgaacaacaacaacctcctgcgacgtatccgtattattattatccttattacgtaccggaaatgtggtattcttcgccgccgcagttaccgacgcgagacggcgttaccggcgagccacagtgtcggattttgtgaagatgatttggtttcaaacgacgtcagtttgaagattccgcgttttttttttttttatacagccgcgttgtagtattacaattggtacgtattgatttggttgaagtgatttttgtacgcttatacgatttttttaaaaaattat

SEQ ID NO: 63083 - DNA, 500 bp, Arabidopsis thaliana landsberg
acgcttgatttatcttagatcataagtctccggaaaaagacacaaaaaacattaaattaaattaaactaaaataatctagaaaaaaaaaaacaaatcataggcatcgagatcttgagaaccaaaaaacaccataaacaaaaaaatagaagatctaagagtctcaacaacatgcaatatggatccgatctataaacataacctaagatacatacacacaaatgcatatgcatacatatatgtgtagagagagaaagatcttttttgataatagagatcttacttttggagacacagtgaaaccctaattcacaatgatctttggtttatgcccatttttgcctttgaagaacagaagatctgagacaatgataaagagaagtaaaagggttggttgctccggaaaaaccgaccggttacccgagaaccggtgttattttgggataatctcaaaccggggaagagctagctaggtattaagaacactggaagtttgttgttg

SEQ ID NO: 63084 - DNA, 768 bp, Arabidopsis thaliana landsberg
ccgcggtttccgtggatggcggcgaaatctaccacgccaatgacttgcgcgtgggcctgttcacttcgacggaaggtttctagtatgcgacgcgttgtgattaccgggatgggtatcgtgtcctgtctgggcaacgatgccgacaccgtttccgcttccctgcgcgaagggcgctccggaatcagtttccgggaagcctacaaagagctgggcatgcgcagccacattgctggcgcaccggatatcgatctggaagccctgatcgaccgcaagcagcgccgcttcatgggcgacgcggcggcctacgcctatctgtccatgcagcaggccatcgacgattccggcctgacggaaaatgaagtgagcaacgagcgtaccggcctgattgtcggctccggcggccactcttcccagaatcaggtggacgccgccgacaccgctcgtcagcgcggcgtcaagcgggtgggcccctatatggtcacgcgggtgatggccagcaccacctcggcctgcctggcgacgccattccgcatcaagggggtcaactactccatcgcctcggcctgtgccaccagcgctcattgcatcggcaacgccatggagcagattcagcttggcaaacaggacgtggtcttcgccggcggcggcgaggaagaacactggaccctgagctgtctgttcgacggcatgggtgcactctccaccaagtacaacgacacgccggaaaaagctttccgtccttacgatgcgagccgcgatggtttcgtc

SEQ ID NO: 63085 - DNA, 469 bp, Arabidopsis thaliana landsberg
tatgacactaaattaactcagcgcaggaagcaagattttattaaattcattgattctcgaccgatgctaataaaataatataatcgattatagcaaaaacaataagatacatacgactcgataatcttttccaaaaaaagaagagaatcgataatcttactaacgcccctaatgagtcaatgacccgaccctcatcattggaaatgtcttgaaaatgtgaatttaaaggaatatgaattttaaagaatcagaaaactttctatcttcacatgccttgaaataaacgtgagaaatggtcataacaaaaatagcatattgtgatagtcattcaatcaacatggacagaaacaggtgactgtgtcttggtcaccataaattgttgaatagtgtagagaactgcttaaatttgcctggagagaatcgatactaattcgctatttactgaccctcagtttgtcttcgttaacac

SEQ ID NO: 63086 - DNA, 1521 bp, Arabidopsis thaliana landsberg
attagttcttactaaattaggtgtgcgataactattgtcaaaaataaatagtatacgaaaatgtgaaagaatgagaaaagattgcgtaaaatagttatagttttggattttgtgatttcacctcttctctgtcgaacctttaaagagaaaataaacaaattcttttacctttttctttgtttgttagcaacggcaaaagagagaagtaggaaaattcatttttcatttcgtctttttttttcttctgaattcattgagaaacttggatccaaattattgattcaaaaccaatcatcttttacacatttacaaattccaacatttgagctaggaacggtgtttttttgtgtgtccatgaggtaaaaaggagtaatagaacgtttgcataaaaggtaattttgtaaatgaattgtgcatttgattgtggcaggaaaaaaatctcttaatcaccaaatgacaataatacaaaatcaagaggattctatctttagtttgatttgttgttgaatccatttagctaaatgtttttgtttctgttttctaaaggagtttcttcagaaaagagaatatgtcaatgcctccctcctcaacgaatgaccaagagactccttccgtgtcttctcctcggctgaggtatcgaattgctttcaatactttttgactatttgctttgctatctttatctttgtataattgagggcttttgggtgcagggacgataataaaacaatgacgtctgagatggatgatccagagaaagcagcggttacaatcacacgtctcatcgaacagcttcatgccaagaaatcatcggcgcaagagaaagagcttagcaccgctcggcttcttggtttagccaagggtaaaaaggaatgtagaaagatcattagccagaatgtgaacgccatgcctgcctttatatcacttcttaggagtggaaccctcttggcaaaactcaattccgcttcagtcctaaccgttctatgcaaagacaaaaacgttcgttctaagatactgataggcggatgtatcccaccgctgctatcacttttgaagtctgactctgtggatgcaaaaagagttgtagccgaggccatatatgaagtttccttgtgtggaatggatggtgataatgtaggtactaaaatatttgtcacggaaggcgtggtaccgagtttgtgggatcaattaaagacggggaaaaaacaggacaagacagtggaaggacatttggttggagctttgagaaatctttgcggtgataaagacgggttttgggcattaacacttgaagatggcggagtagatatcatcttaaagcttctccagtctagtaacccggtatctcaatcaaacgcagcttctctcttagctcgtcttatcaggatttttaccagcagtatctcaaaagttgaagagtcaggtgctgtgcaagttctggttcagcttctaggtgaagaaaatagtgttttcgtacgtgccagtatagtcaacgctctagaagccatcacatcaaagtca

SEQ ID NO: 63087 - DNA, 672 bp, Arabidopsis thaliana landsberg
cattaaactcagtgtaaatgaggagacaaaaaaactagattcctttttttctctgtttttttattgcttctttagttgttgttttttggagaaagaattttctttagtcgttcttacactgaaacatgactattatatctcatgaaagatgtaaataaaggtgggtgcaagacgaaatgagcgtggttcatacgatgatacgaataaacaaatctttgattttttttattgacatccacaaatcttttttgtttctttttcgcaacaaacaagtgtttgattaagatacatttttcttagatattatctttatatcaaatcaaagatataggaaataaacttcttatcttattagtttctaactagacgcgtggtgctttttaaagatattttcttgttcaatattatttaagatattatgttcatgtatacacactatataattgtaatatttttaacgagcaaatttatatgtaccttaattgtaaaatatatatgagtgaatcacttaaaagtcatatataattatttattcaattttattgtgccacataaatttttagttacgcaaatcactaaatatcattgctttagttttttttttccaaatcttttgagccaatctttgtagataattggcttgattttacaaaaaaatacgaataagcgact

SEQ ID NO: 63088 - DNA, 1174 bp, Arabidopsis thaliana landsberg
acatgttctacgtacctgcactcattttttcatttggcgatgttacattttgacgattctacagaagaagaggaacgaaaacataatgttttaaaacttactgttgtgtaaacatggtggtttgaagaatctctgagctgttgaggtgagcatcgtatagcttgtggtcgtatagcaaagaagatagatccaccagttgttcttctacagtctgttcttataattataagtaataacagacacaaaaacagattgtgtaagcaaaaaatccatatggtagataactgaaatcatagagagtttgattatcacttacgtctagatatttctctaatctttcgactagctcgtgtgggaaaggctccggcaatgttgttgtctttttgtagaacttctcgacccatagctccgttttggttttgttctttttatctttaactggctcgccaagtggagtcttgaggtattcagatgcaaagttttgtactgcctgcacattaatagcaacaaccacaattgattaatacgctgcagaggaaactaaaatttttactagttgcagctggcgtacctccgatgtttcacggattttgcgtagagcagaatcaacccgagcataaatagtattcctctgcaaatataaaataccatatctcacaagattcagaaggatttcaaagctagtttatattcagaaatcattatgattggactcaccagtgcaacatcttgaagcatttgactgatcagggagacgtttgagaacggtccaaacgggtgacaaccggctgcccaaagccaattggtgataggtctttcatgcgcatgagaggtcttttcatatggtgcacttacaccgcctaaagcagaagctatacctgcaagtatatgtcgctgtacctgtgatgggacagcatgctgtctctctgtttcagaaacataactgcaaaaacaagtgattaaaatcgatatgataacaggatagcaggtttatcattgcttttaacttctattgttgttgtgttttgctcacctcaaaggtattttctcgtttagatgctgaagcacaatgacaacatcactgctcgcccacacgaggctctcatcttccatcatgagcattggatccacatcggcttatgagagtataacctatatagtgatcaaagatttg

SEQ ID NO: 63089 - DNA, 1315 bp, Arabidopsis thaliana landsberg
  unsure (1)..(1315): unsure at all n locations
cccaactggttttttcggggggtcatacagggttaaataaattaacaaagaaaccaaaaaaaaaacatgcgaccagtctatttatttgctgtgaagaaattaacaatttgatgatccaaaagtcatttctaggtttagacagttttcaaaatattttcgcaatttgaaaataattgaagtcagattgataagcttttttttttttttgataagccttcaaattacaatattaatttcctgatctgtcttaataaggtgaattgtaattttgaaaatttaatatatgaaatcttagcaatcagtgtttttttaattatttttttttgtcacaactcacaagcaatcagtggttacaaagaagaaatctcaaatataattgtgaattacaatatatacatgattgttgactaatagagtgtaatcaaattggttcttcccacttgttaacacaatacttttgcacaatttataattacaaatattaaatactggccccttttgttcctttttcacaacctttatgcgtgaaaccaatgtatctaacagagaaagccttcaatggccccaacaaacaatcaaacaagatactatatgaataaagaatgatctaaaccggtcaaaccaaaattcggtctgaaccggtataagcaaatgatcataacccgccaaaagaaacttttcaacggaaactaaagacgttgaaagctccaaggaacaacaacttaaccggaaacaacataacaacgatcaacggcatatgttgagacgccacaaggcggctaaacctctgcaacgactttcttcctgtctgcatcatcccagagaaatcctgaccgttgatttggccgttactgaccgcaatccctgagcttccactttctctagccaccagaattggccaccaaagactccggcgatgctccctttttgctctccttatctgattcacttcctttcttattacactcctaaccgctttcagatacgagttcatatcatggtctctttggattgttccgctggacccataagccgatctgtcgctgagaatgtcgagaggatgcggggtgttcaagaaaaccgtctgcgcggctcttaacnnnnnnnnnnnnnnnnnnnnnnnnnnnnnnnnnncaaaatcactagttagaaggtataaaccgctttcggaaggaagaagttcatgcccgggggagaatgtctcatctggttgaagaatcagaagctcgcccatcggagaatacaacatactctgcaaggaaaatgtcattaaccacaagaattctgcagcatagctagcgatttataaggggat

SEQ ID NO: 63090 - DNA, 738 bp, Arabidopsis thaliana landsberg
tcttgagtcttcttaagttaataaatttattgtgggacaaactaaaccaagatagatttttgtgttcatatgagcttgttaaagtagaaatctaaaattgaaaataagatggttcattaagtttaattgtgcaagaaatcgaaaagaagaaaatattcagattgtcaccacgattaaagtggttctttgactggtctcatacaaagcaaaaaaagaagaagagagagttaacacaagaagcaactcctaaagataacttcccttcttctcattatacaaatctatataaatctattttaatgacaaccctaaacatatgggctaataagttatttctatgacaatgagtttttattttggacaaacttctatgacaatgattaagtgttccaataactgcagtttgtttgaccaagattttgattccaatttttaatttttattcgatatgcaattattaaaatccgactcaaccccaaattacgacccaaattcaactaacaaacacgaatgggatggagattgatttttttttttagtgaattaggatggggattgattttctgtctggaaatggaataggttgttgggaacgaaaaagcaatctactaaatactctctattgtaccttcccttgatacaaaagttaaactctaagttaatgaaattgtagttaggccaaagttttttttctgtttaagggcaaattataattatttattaattgtttatcaaaaa

SEQ ID NO: 63091 - DNA, 726 bp, Arabidopsis thaliana landsberg
ctgtcaactcgcgcatgacgcgggctcatggtccagagattgatcggcgtctagttcgaggggggcgaggccaagcttggcgaaaagcaggctgtccttgtcttcgccgggattgtcggcggtcagcaatgtgtcgccgacaaaaatggaattggcacccgcgaaaaaacacaaggcctgcatttcatcggtcatttcggtgcgcccggcagaaagacggacgaacgacttcggcatcatgatacgtgcgacggcgatcgtgcgcacgaaatcgatgggatcgatgcgttctgcgttttccagtggcgtgccgggaattgcgatcagcatgttgatcggaacgctctcggggtgctcttctaggttggcgagcgtcacgagcatgtcggcgcgatcttcgcgctcttcgcccatgccgatgatgccgcccgagcagaccttcatgcccgcgtcgcgcacgcgcgccaatgtttcgagccggtcggcgtacgtgcgcgtcgtgatgatcttgtcgtaataggattccgacgtatcgacgttgtgattgtaatagtcgaggcccgcgtcacgcagccggacgatatcatcgtccgagagcatgcctagcgtcatgcacgtctccatgccgagcgctttgacgccctcgaccatcgcgacgaccggatccatgtcgcgcgccttgggctgcgccaagcagcgcccatgcagttacgcgtcgcgccttgc

SEQ ID NO: 63092 - DNA, 713 bp, Arabidopsis thaliana landsberg
actttgaatactcagacactctctaaagttggtgtttggcttttcaatgtatggtggtactcatggtggaagggtgcggaagacaacactctcagcctaaatattgagtaaaaagagaccagttggatgcaggaagcctactagcctagcaacatgaaccaagcatgagtagagtttgccgcagaaagacaggatgatggagatgaccagatcaactgactgtaaactttcaacgacacagaccgatatcatttcaaaacccgacaatgatccaaatttacctaagtttacatcttgaatcaattttctgatactatgagatatacctgaactaccaaggtgaacatctgatgttttcaagatgattttgaaatgggatagagatactcatcacctttagcttttactcatggtttgtatcttcatcatgaagttttgtaaaatcaaagcagatagataaaaagtgagagtttgctaatagcaatacacaaacgagagtcaagagatacacacaataccagttcaaacacatgggactggatttcacttattaaagaagttaacttggttaaaccagaactcttatcacgtggtctgagagcacacaaggaccttactcaagcctgtaaaggtaaaggaaaccaaagacacaagacatctattagcaaacgcaaattatgtgtcaacccgagtatcatacaagaatgtgatgt

SEQ ID NO: 63093 - DNA, 748 bp, Arabidopsis thaliana landsberg
ggcaataaacgaaaccacaaccacgtagtacagtgtttgcttaacactcccaaacaaaatgcagtggcaaatgtctgcgtataatactcagaataacaaaaaaaaggatcactaaattgctaagtgatatcaattctcttaatgagatcagacatcaaataaaaactaaagagtacctctaagcagtcaataagactctcagtacaatgacttaaatgatttgaacaggcccataatttcttcggcgtaagaggttgctgatgtgggattcttgttagatgatttttagtttgctaatgtggctagctttacaagtcttagcttcttttattagtagtagatttaacatttcattcaaaaattaataataataattataatgtaatatataatggtttattgtttatctaacaagtgtttattagtttgagttaaaattctatatgacctacgttaatttgacaagtttagctacattagtcatcaatattttgcattctcagagcattaaacaacatacaatatatattgtagaagcattgatttgcattctaagaaatcttagaagatatatcttcatttaaatatcaaaaatattttctggatataacaatagaaattttacatagttattaacttattataaattcacgatgcatttacatatatcttttgcagtgaatagatatatatacaaaaagaaaagaaatgaaagaatatgaaaatatacttagacaacaataatatt

SEQ ID NO: 63094 - DNA, 390 bp, Arabidopsis thaliana landsberg
  unsure (1)..(390): unsure at all n locations
cggcagaaactcgtgaagcggagggtctcacagacggattggtaccggtgatcctataaaaatacaaaggcttacagcgtgtggaacgctgtaactcatatgatcgggacgacccaacacatttaccactcatnnnnnnnnnnnnnnnnnnnnnnnnngaacgttggatatgaagcacgatgtccatagaggctttacttggctctgtggtgaccgccactataatctctataactgatacactactatctgatcctaagaacttaaaaaccacaccaaagacaacacttaacatttggatacatacaatctaaacgatcaacaacatgccatcaagtgcggaggaagagccaccatatgctatgacctacaaagccccgatacttgagc

SEQ ID NO: 63095 - DNA, 1527 bp, Arabidopsis thaliana landsberg
aatagcacgaaggtgcgtgaagggcagtggacaaagcaatgaaaatttgttttgccgtgagctctctttaataaacgacttctccttccactgagcttttcttagatcttccctaaatctttgtgtttgttattattgttgttaataatgaatggcgtcttttaccaattctgaaggattaaatatggttcctttaggtataatggcattgacgcaatattgattgtggtatatcctgatcatttggctttttttctatgttatttgatcctggaaatgcctcacacatttgttctatcttctttttcattatttacgaattgggtttcctctgaatttacgatgaggtttgttggtggaatataaagttgttggagcgagatggattgtttggagtgcaatgatgttttcttttctcagatttggtttttctaactgaaattgatgattgttctgttttattattcgattaagaccgtctccaatattaatccctattttttcgttggagatgctcttgcttcttcctgttttagttgtcaaaagtcttatgattgttaatcatttgattaaagacattcgcatacaattctgttatcaataatgagaaggaaaatgtgatgatttaacatacggaacaattatggttgctgtcattacttatacgagttcgatgttgagaattgttggtggataatttgtgttgccttcttgatttcctgcgttgaaacaaaaaggttgccacattttgctggatgaagaattgttggttctgtgtgatgttgtttatgtgatcttcaggtgtgatcttacatgagagactaaaaagagagcaacgggtttggtttgagtttgtttaggtcaaaccatcagagagacattacgagatatcgtatcatacccttgggccaattctgcaatatgcgttggagttttgttaatcttgatcatacctttcatatgcctattatcggctttattgacttagttgtatcacttggtcctatactccttgttccctttctctgataagtctatgacttcgctgttatgatcattgcgtttggtttttgtcgtccctgtttgtaaatttgccaagattgaaaatgtaatttcgaagaaccaaaattgtatcacaaggcaaatattttatatacttctaactctcccaaaatatcgaacattatcttaatatctttactatgtcaacttttggcaaaactttattagaaatctgaaaataaaactcacaagattaattatttttcagaaaagagaaactaatatataggacttacctatattaattgtttagagatattcatactccatttacttgaacttttttattaagtgttcagattatgttccatctcttgtattttattgcttttttctctacacataagaacctttcagtttccatttatgaagatttataaaatggtacagatactttagtaaaatgttgtatcattataaaagagaagtacaaatttatatagaccataatcttcagtattttaa

SEQ ID NO: 63096 - DNA, 658 bp, Arabidopsis thaliana landsberg
tctatctgatatcaaattgtaattcgatagatatgaagttgttagccaggactaacatggtcgatcataggtattttagtatgaaatactcaggaaaacaaaaggtaagttttagataaatagggaggttaggttaaattaagatcatttacgccatgggcaattggcatttgatccagagcttatccataggataagtgccataaatatcttttaacggcttccttgattatgggtatggttggtggtcgctattgggtaataagattattcttcttgtaagatcccctgcgctacactttgttgaagcaagtcctttgcaaaatgatcaatggtggtggagatagcctcgtgaacattttgattctccagcacctggctgtatcggacattgaattcctgcccggtcccccctttattggaaaagttttgcaataaaggttctaatctatccattgatctggcaaatttagctgcattggtttgcttggcctcaaattcttaccagatggctataaatgcttctgcctgtgtctttggaagtaaaccgaatattcttgaggcggcagatctttcttctgccgtattatcatgatccttaagagtatcaagaaggaatgtggcacccgcatcgatttctaccagatcatgaacgagc

SEQ ID NO: 63097 - DNA, 1860 bp, Arabidopsis thaliana landsberg
agaacaatgtaaatcatatatgaatcaaaacatttgtcatttttaattgaacgattaatgttaaataggtgtggaaggaagaagatataattgcaataccgcgacgccacaatcgtggaagataaggcggaggaggcgggaccaagggaagagtcactcttagtccattccctcactttcgtaacaacgattttctcaaaatcaggacaaatcctatcataataattcaacgataataggttgtccaaagggaacaatgactttgtatcatcatcgtcatcgcctccgtatcctcccgctccaggtaagtcttttcggccagccgataccggccaagccacgagaactccgagtatgacgacgactgagaccacggccaacttcattattttgctttcttgatatctctctcaatttgattggctttgatgaatttgtttgatgagaggtgtgttgtgtagtaatttatatatacaattgggtttggaaactaatgtgatgcttttacgtgggaggcacaactttaagatttgaatattcgagtgacttgcctgcatgtcgtatataatgtttatgatatataaatttttttttgatcaaatgatataatgatataataatactagtataattttaaaaaaccttttttacaagagaaaaaatgatataatgatctttacattactgaaatcagggttttgacttatttggattagattaattgtaaaatttatttgtcaacttccattgatttaattttgtttgttttttggtcggttatgtgagactgttattattttattttgttgtctacaattaacatacgtatatttatactggatgatgtgacattaaggtatgttttcgagtaatccgtaaagaaaaatgtgttatatcgaaattaagaattttcttgcacaatcatattattgggttcaataatcattattttgtatagagactattttctctattcggctaacccaagcactacatcgaccactatgcctgggcctattgaccacactacaataaaatcgcacactacatgaaacttgggtcgaacatctaattttctctaattaaattagttttactttgcttaaaagtttttgtttctttcagttatacaatttaaaatttgtttgttatctctagttcttcaatttgattaatgatgtggcataactcgacaacggctaaattcatcaacggctcctttttgactctagcatatttaggagccttaattattgaataatttaatcaccctctaattagtataacaatccaatgctaatttttttctggcattacacaattaaatgcttttaccagtataatgacatgtgttatacaatatctatcaatttcaattttgtccaaaattataagtagcttttttatttttctataacaatttatcacttttggccacataaggcttttctttctctgtattcttacacctcattctttattgccttgttttacagacacgttcccaagtttaagggacaaaacagagccattttaggactcttaacatttataagtcctcttactaaatagataagcacaaatactgtttcattggttctgttttgcttcttcatcatcatcgtatctccaccgtttgtttgttgttgttctgtttctttaacaggaaaaaaaacagagagaaaaatctgtctcttcactaacacaaatccattttctcttcttcttgtagagagacagagaaaacagagttgtcctctaacttctttcgatcgattcaaaaactctaatgagtatttgattttgtgttcgattcttagatcgtaaaaaatggtgtcttctcctcagagattcggttta

SEQ ID NO: 63098 - DNA, 1697 bp, Arabidopsis thaliana landsberg
cgtttatgtgaaccgcaatggatgaacttttggtcatgttcttgtactatgacactgttatggaagctattgaagctctgggaataaaaaccaatttttataggcaaatatcaaatcaactggctggttcaagttttggcaacactagtatacataacttacacattgaatccaagagctcatgaacagcaaaagagtttcttgcatatatattttaagagacaacaacgtatatgtgtgtatatatcaaaccagttctcgtctttcattcattacctctcttcctttctaggagcattaggattacccatcatatccatcatcattttctcaggtgaatcttcccagttcgtaaacgttttcaagtcgatctgcagataaaacaaaggtgtcaaatttgaaaacctttgcgcatgtcataatagatgtcatgctcttttggtgtttttcttttacctttcgacgttggttagtgaaaagctcttctcttttctggtatttttgttgaatttccctagccttgtttccacctaacccccatgcttcaatatctagaaccaaagcctctactggtaaataaccctgtagaaatcatatttagcaagagatgttattaagatccaagagcacaaaatttgacatgcatgatatactcattttgttcctttatggtgttgtggctttacctggtttgggaaaagagagcctgactggtaagttttatcaactgcatgatgacggactgtgattttagcaaagtcttcatcaatgaaaattctctcatttccaagtgttcccccgaatccaattccaacaggcttgggatgtgcgtggtacactccgccagcagggtgcagatggctatacgcaaagtttatctccttacttgatgattgttaacacataagtatgaaagactgcactactggaaaagcgagtgtgccgaaaaatgttcgatatttgcgataccagaagatgagaatgcgtgaaagactggacttatggagaacaagttcccagagcttccataaaatgcatctctgttctcaaaaccttgctgcaagattgcaccaatgacccacttcctctcgcttgaagtagcctcatgttcgactttacaacttgcagaaattatcactagtataggagcatgatacccttcaacgttgggccgcagtcgattcatgcctttcccgtgataatatgagctgaaagagagacgaacataacttagctgctctgtagaaacagaatgttcaataaacaaacagatgttcacatgaatgacaatttaaaatcaaattcaaaacacttgaaaagataaacaagttgctcagatataaggcagtgagataccggtatagaagatgttcatttggttcaccgctattgccgggaaaacatgagctcaaaatctcctcgcttattgtacttttgctcgtcaaagaaatcgcccatgcccttccacatgttagaagggtgttttcgcttgtcttggacgcagaatcatctacagcagtggactttgaaggtccagatccatcctgcaattcataaattcaaacttcacatatctcagcattcttttaaaacttcaaacccattgtatacttaaccacccaaacaatggtactaagatagactctttaaaaaatataagcaatgaaacaacttcgcaagtaaaaaaagaatcctgg

SEQ ID NO: 63099 - DNA, 1064 bp, Arabidopsis thaliana landsberg
tagtctccgatgtcagttaccaacagatgatcttgacgcgcttgtaacggtaagatccgacgaggatctaaagaatcttatggaggaatacgatctcgctacaacaacgcaagttaagattcacgtctttctttctccgcttaaatcaacgagaacaacagcaaactcgtctcctccaccttcaacgacgtcatcttcttcttcaaaatcacgctctcgttctcctccatcgccttcaactccggaaacatgtcctagttgcgtagagagatctatacgtaacaatggatgttacgttcatagaagtccaagtcataaccaattatacttcatcaacaattgaaacaatctctctaaacattgtaagaatatagaagtcttgaattctcggaattatatttaataacgtgaggatcagtttcatatatattagcccaaaaaagtgagtctaatagatgtaaaagatcatcatgatgttgatgatgatgctagattttttttttttttttccttttgtgattggtgaaagagtgtccttgggaatttttagtgttaccagtacacaatttctttcttccatgaaaatccaatgaatatgagccatgtgtttttcctctcttcttgaactgtacgtttcagatattttttttgttatgaaccaatttggtttagtatggtttaagatttacgcaaccggtttaaaactaactaaaaagcgcaattgaaattctgtttttaaccgggttttagtctttcagtcattcttcttcctctatatgatatctctgagtttccgatgatgatggcgttgattctaatcctacttgtgcttatagttgttatgttttgtttctaccattttcttatcaaacttcgccgctttcggagttgaaatccggcgaaagctttgcggaagaatgcttatcggcgcttttcttcgaaactagctcctcaaaggtcaaagccttgtgctccaaatcagagaggtgtttgatggtccaatccacagttttaactttgctttatgcggcaggtgaactcttttggaaacggtggccttttgt

SEQ ID NO: 63100 - DNA, 2334 bp, Arabidopsis thaliana landsberg
ccgagaacgacggctcaggaatttgggtccaaaatgtgtctgtgtttaagtgacatgcatacgtcatcatatgcacgtgttccaacttttggtctaaactgggacacatgagcgtttcaattgcactctgtgttaccgttttgcactcattgtggttaccgttttgcactcattgtggttacagctaggttgtgtgaccaaacttaataagattctctagcgatcagagaatatggtccggtttgcagtggtaaaagataagcagggtttacttgaaattgattgtggttttaggacaaatcagtttgaaatcattcgtttgagcttctaaccgcttatttcaagtccaagtatccaattcaatattggtaaccgaattaaaggttcgtttttaaccgccatcactagtatgtgatctaccgctagtatgtaatgtatttgacctctatgaaattggaatcgttcatacttaacaaatttctaggaaaaaaggttaaaactattttcttgtatatgcttcaatcgtcttgaagattacataatccaacgcactaaaggctaataaatttttgaaactgaagtccaatcatcgttatctacttcagccgaccttaggtcccaactagagaaacttctcaatctctgattctctgatacacatacgcagaggtctacttatacacattgtatacaagcagctaataattagtcataaattgtgaaacgtttaaaagaaaagtaaaacagtttattataagatatatagtgaaatttggcagtatggcaagaattcactcattgatataaaaccccaatgtcattgttattgaattacaagaattcttatgaaatttaataattatatttttgttatatgaaattctgttattgtgatatcctgacagtgtatataaataatgcttaaaagaatgaactagatatctcactgccatgcaaattatatagtggtccaccatgaatctgtatataagcatattacatatctaagatgctttattttaacaaaaaaaaacatgtactctttaatttggtccatccttcatctaagaccaaccattttagctgtcaatctatttgcctactataatatgtacagtatttatggagctcaattgggatcattttacgaagaaaatttaaaggaaacccctaaatttttaaaagtttgggtcttaacatttactgatgcacatcacatactatatataatggaatttgccctataccaaatgtaatgtataagttggttctcagtaattttgaactattgtttcgaatgatatataaccaaagatccatatgtagtgtgtaatgaaaatgtaattttcttacattagtattttctattgaatggagtcaaagatatcgttaagaatgatcgtatgcatcatcaagattcaggactagacctttttaaaaatgatctctaagtaagtagatacatgtggtacacattttgattatgtatatgtgtatcagtgtatgtatatgttttaatttattatctactattagtatgggtgattaatgaaaatcatagcatctttctttccgtcagaaaacatgtggataagagtgtctatagtctacacactacacaaattgctctttatacctaactaaaaccctagggattggagcgtatatatatatagatatcatttcttgctcagcctcaaccatatgttatattatacacttttagttttagataacgagagaaaataaattataactgttcatcatctcggttcttatcattttcctcaacctacgtgacaaagaactcactcgatctgtctaaacccaacgacttcgtcaagcttaccagtttttctgtgtaagattaatcatctttttttcttgcagtaatataatttgaaacctttgttttcctctttggatcctcagatcttcctattgattcaattgtaatctatttcgatttgagaatcactttcctttgatcttttttaagtatatatacacaaaatatctagtaaattaaattaatatgcagttcgagtaatatacgttttcttgatcttaataggtttttgttatttactctattgaagttgctttcatctaattaaagtgatcacgcttcccaaaaatccacaaaacattccgaatttgaacactttgtgatgacaatattgattctgaacatctggcttttgttttttagatcgataatatatataaagaatcaatggaaatgagattgacagaggacatgggaatataaaaagaagatcagaaaagttccttgtccttgatgacgcaacgatggaataatccgaggatcgt

SEQ ID NO: 63101 - DNA, 1255 bp, Arabidopsis thaliana landsberg
  unsure (1)..(1255): unsure at all n locations
ggcggatggctctcgtcctggatatacttggtttcttgtctcaatcacaattgtggtggttacagaaaattcaatcgtcttagtattcaatcatttatttgagttcatacttatacgttctcagaaaaagtgtttttggttcatttattctaagttgggcatgatgagtttgtcaattttcttcctcagacaatctgttatgttatacaaatagaggtttgttatttcttgtagtctaacaagtaccaattaatatactatctcttgcaggtaatgagggccgtgagtatgttctgcggcgtattcttcgtcgagcagttcgctatggaaaggagatcctaaaagctgaagaaggatttttcaacgggtaggaaattatgtttgattttcgttgcatgttttgtttgaatattgtttcaaatactgtttcgttgtagctggaacgtttatttctgtcttgtatctttataaatgagcatattttttgacacatgttttatctcgggctttcatattacctgtaggcttgtaagttctgtcattcgggtgatgggcgatgtctttacagagttgaaggaacatgagaaaaagatcacagatataattaaagaagaggaagcaagcttttgcaagaccttggcaaaggtaagggctggatttaatttccgtcaaagctttgaacctcttatcttattttgttttgggttcttctggctcgtcgcactgaagtaaaagagacagttcacagcttcaatcagtggcatgtgatatttctgtatagattgtttccaatttcatcattgttcagttttaatgatggttagacataattatagtattttctatagggaatcttttttctgaaagatgaattggctttacctggtcgttcctcccttttttatgtgaataggtggtgagtataagaacagttagactgattataaattttcacggcagggaattgagaaatttcggaaagctggacaggcggttcaggggaatacactgagtggagatgtacgtatcgaattatttttgtgatgtatgttaggtgttgcagtattttcatctgggatgtttgaattccatctcaacatgttgtcttctctttgcaggatgcttttatcttatgggatacatatggtttcccgttagatttaactcaggtacgtaagtcattcatacttatttctgaatgttcgngttattttctaacttttattctcggggctcagttgatggctgaagaaag

SEQ ID NO: 63102 - DNA, 448 bp, Arabidopsis thaliana landsberg
aacctcaccattcttaaagttgcttcttatggctatgcttctcttacctgtcccatctttttctatcaaacacttcccatgtgtagatctcatcttcctcctttggatattatgctctccaatagtccaattgctatacaatcatgtaaattaggaactgtcattcatttgtcaatgccccccaaaacaaaaatatttttatgggaatcacgaaatgttataattggggccatttatcccaataagtttatcgcatttggagacaatgggctcatatgttcggccccacaaatgacaactctttgatactcaacaatgccctacttttttgtgacaatacagtgtggtaggcctactaagatagtcccccatttctcaccatatgacatctttcatacatcacaattcacacaattttttatttttttttgaggaggggggggggggg

SEQ ID NO: 63103 - DNA, 2131 bp, Arabidopsis thaliana landsberg
gtatacggagattccgattttatcaaattctgtgtactcaatgcacgatataccatattcccacttcccatcgaaattcttcttctccatcaaaacattaatcccttcggttgctccagcattccttttacaggatgcaaacccaagtttctgtcaaattaggattaataaatcaagtttagtgggaatcaattgttcgcaagtccaaaaagggtattcctatttcttgaagtagttgagagatgaatacatggttaatatatgttctcaactagtaagctagtttggaaagcatagccatatatatcagtagatagttaactgccacacctcatacttctaaaggaacttatccatcatgatatagaacatgttcttcaagcccaactaacatgagaccatttgcaatcaacaccagatgctctcttctttatctctataagtgatacatttaatgttttgaatctatttgcagtgtgtcagttataaacataagaacaagcataccttattataccgtaagccaatcccagcaagggccaagagggtaacatctgtagcagccacaacgttactgtaatatcacaattatatacacaaaattcagatagttctgatttattataatgaacaactcacaagggtacaagtgactaacctaacttgccgaacggttgctccttttcttccatgatcgtaaaaccagttaaagacacctttgtcataagccaatttccaaattacaccatgaccaccaggtttactaactggaacaaagggctttgatactatccattgaccatcttcagcactgacagctgggacgagaggctagcgaacaaaaaccattctattaactgtgagtacaatactcaagatacagttgttccagaaaaaggtaacagaaatcaaaagaaaatatatgttccctgatacctgttcaaagagtcggaaatttgattgacctctgccaaaccatttaagcctttcacaaagcgaacttacatgctcatggttgttctttgcagcacttgtcataatggcaacaggtgtgacacattgctttccataaagtttgaagtaaaggaactctctagcctagccaattccgggaaaaaaggataaataacattttctaatgacatgaacaaatacagtttcgtacctcaaagtttcctttcatacatttaaatgtagacaaacccacccagagtcaccaagaaatgagtgcacatgtacctgaagatctctaataagtccctccaacaaagttcgtccacagtgagcaagcattgctgcaggaaggcattctccagtttctgaatcaatcaaacctagtctgtctgcagcacctcctaggggatatatttcacctaggtctggcaatccctaatatgtacaacaacttataatccagaaaccatacacaacaactttgcttaatttcaaaaccaataacacaaacctaacctcaattccccacagagccgcctgtgaagcataatcttcctcctgagtgagatcaagaacactaggagtatgcatttctaaatactggcaacccaatgattcttcaacaagttgtgatcggttagtattacgtctcttagatgactgatgaagaagctcaagaaccataacctgatatctgacacacaatcatccatgtctcagcagtgaatatattcaaaatcaataatcaaaactttcaaggcatctctcatctaatttctatactaaaaggagaattaagaattggtacccaatgattcctccaatgcagtcgtagaactgttcaatttcttccagaaacgtcaagaattttctaaaatgagcaatctcctctgaatctaaaactgtacccatctctcttctacctttatagccgctactattcacatcgaatctctcaatcatctccaccaatgcgtaaagtgcgttcttcactgagcttctcactgtatactcctcctcttcttctccaaatgcttcctcataattcatacatagagcgtgttcttgccccgccgcgataacacacttaacgagaaacatctcattcgaattcaaaccaagataaccaaaaaccttaaataaaccgcctcgattctcgctgaagaatcgacgaact

SEQ ID NO: 63104 - DNA, 387 bp, Arabidopsis thaliana landsberg
  unsure (1)..(387): unsure at all n locations
gagnnnnnnnnnnnnnnnnnnnnnnnnnnnnnnnnnnnnnnnnnnnnnnnnnnnnnnnnnnnnnnnnnnnnnnnnnnnnnnnnnnnnnnnnnnnnnnnnnnnnnnnnnnnnnnnnnnnnnnnnnnnnnnnnnnnnnnnnnnnnnnnnnnnnnnnnnnnnnnnnnnnnnnnnnnnnnnnnnnnnnnnnnnnnnnnnnnnnnnnnnnnnnnnnnnnnnnnnnnnnnnnnnnnnnnnnnnnnnnnnnnnnnnnnnnnnnnnnnnnnnnnnnnnnnnnnnnnnnnnnnnnnnnnnnnnnnntagccttcaaaaagctaatggagaagttccatcggctcagttctttcgtcagatggctctctgagggcatacccaaatggtatcacatgc

SEQ ID NO: 63105 - DNA, 211 bp, Arabidopsis thaliana landsberg
gcgttctgcgcttgctgctcgagccgggcgacccggtcggcgaggctcattttttattcctgcgcatgcagcggcacgacaaatagtacgttttttttttatttaatatttttattatattattatattttattatttataaattttattttttttattttttatttttttattttattttatttatttttttatttttttatatattttt

SEQ ID NO: 63106 - DNA, 1813 bp, Arabidopsis thaliana landsberg
gaaacagcaatatgctctataaagttataaatatgtacatttatgccactcaataaagtcaatcaactatgaaaaagaacaaaattcgaattctacagtatactataaaaggtacattaccctaaagtaattgactttatatatattatgtcattactttggacattatagaagattaacatatatcttagtcctaatatatatgttaatcaggtctcattgtaacaggttaacatatacactagaacataagcaatctatctactattaccatcaatcacaattcgaaagataaccttgttcatatgtgaaactctcagtaacttacatttcttcttaagcaagatcccaactttattccaactacattcctttaacaaaaaccaaaccaattccacaacaaataaagatgaaactgttttgcaatcacaaacttacttatgaatcaactggctctaggatccatcccttgctgccaaacataaacaagctcatcccaaccagtactcgccattaaaccttcaacaagaacactcatatcgatcccaacagcaaactctgtatgatgatcatacctaccaaccaaagcatcttccaccatatagtcccaaagacaaacactcatatcataagagcaagaagctatcaaactcctcctatgcggcgagaatttcaccttcctcaccgcatatccatgaccattaagcacagccaaaggaactctataactcctaacatcccaaaccttaactgtcttatccactgaagaagtagctaaaatacaatcatcatacttattccaatcacaagacaaaatctcaaaatcatgagcagggatgatcatagttgatccaggttctctaacatcccaaatccttaaagtacaatctccagaagcagaagcaaacacatcaccatgtttaggattccaaactgcttgataaacgcaataagcatgttccttaaaagtccttacactcgccggacgatccatagcccaaagcttaaccgtatcatcccacgaagaagtgagaaacgaatcgcgccgcgtgggattgtaatccacagattgaacctcacgcgcgtgctcttggaatgatctaatcggattagaaggaggaggaagagctgtgtcgtaaatcttcactgagccgtcaccaattgcggcgatgagcacagagtcatgagattctgaccaacatacgtcgtatacagcgtcggctgtatcgtacgagacggattcagttacgcctggagctccaggagcgagctcgaggacatggattcggccgtttccgagaattccgaagttctgagctgtagcgacggcgaggcgtgactcgtagaatggactgaatttcacagagtagccattgaacggagctttgaacaccggcatagcttcttcttcttctccggtgagtgattgaatcaaaagaagagtcttctcgaagattcaattcaacgatctgatcggataacgccgattttgctcatcgcagaattaattttcccccaattgggcctattgggctggagcctagcccatttgtgtaggttgtgttaaaacgatgtcgtttggcatttcaagttagggttttttgggggtttggttcaagcttcatcgtcgtctctctgtctcttcaatttcattcgttttctgagataaaagtgagagagaaatctaaattcgagaggagaagttttaatttttctgagttagattcaatggaagagatcacggaaggagttaacaacatgaacttggctgttgatacccagaagaagaatcggattcaagtttccaacacta

SEQ ID NO: 63107 - DNA, 2306 bp, Arabidopsis thaliana landsberg
agatattaaatatgaaatatttagataatttaaactttaaacactcttaccagttgtatcttactctagcgttgttcatagtattcacgctacgaaaaaaatatcttgctcttttgaaacttatgattttagctatctgtaataaaatatatatatataaagatatgactatcaaaacgataatacatataaaaatttcaaaaaagaagaatggttacctcttccccaaaggctgtgaactgtctgttggtttaagcacactctaatcctaaaagtctagtctcgtcgttgtacatagcaatttctatggtaaaagaagaaaagaaaatgatcaaagatcagtaagaatggtaagcttacttatcaataacaatgttaaaagcctacttccgtcattcgtagtttgacccctcttattttcagttgtcacgatctacctccgataaccaacctccaaattttccaaagtttccacatccccattcacaagtgtaacacaatcatccacagttgttttaatgtcagtgtgtccacaaaaccaagattttagccaattacacatctgttaagagaagaaaaggaaaagttggagaagaattgagaagaagcaattgaacctaaactcagagattcagacagaaaatagcgacaagaagcaatagagattcagacagaaaattgtaaacctaaaatcgccgaaaaagaaacaaagacaaatctagaagcttaatactaattgaaacaacatcaagaaataattgaaaaaaaattgtttaattgaaaaaacatcaagaaatttggttattatagtacacttccacagctaattgaaacaacatcaagaaataattgaaaaaaaaatgaactatacttaatacttagaatttttatttaaatatattcgagcatttgtttaagatttcttttcggtattcgaaagttctcaatctttggttaggatacataatctgactttcactataattcaaattcggatatgtaaaaaagctataggaaccaacataaatctagggaaaacatagcggagttatatgttgggctgtaaaaccttaatgggcttcaagtaggcccatatatccataacacaatagaatttgagtttaaagttcacgtccagatttgaagacacagcttcgtcaaaagtgggctcgttctgtctgcttaggtccctgcagagatttcgaaatcgctacttccaatttctccagaaactttctttctcggcaaaattcccggaaaaagccactcgatcagcaggtaaatactaaagcttcctccacgaattattcgccgtctatttctaaaatttttcatgttccttcgatctaaatggggttaattcgattgtgtccttgtcagtgtttagtctctcttaggtttttgatgttctgtaacagggaagcattctcttttggtcaaattttatatctttttagtctctcttctcgttcagctgaaactagttcttcaagtttctggtagcttctattcattggtccacttggaagaattctattgttttatattccttcaaatttgtgaccgttgggaaaatcttgtaagattgtatttgtaaagttcactactttggttgatacccaaaacaaaagttcactacttttggtcattctttgtttcaagctcttaaaaagtgtaacactttatttggattggtgtaatggtaacagatggtcaggaaggaagatgtggatttctattgcggattttcaaggaaagagcttcagagtttatgcaagaagtataatttgcctgccaatagatcaagttccgatatggctgaatcattggcttcttacttcgaggtagtttttttttttggtttcagaaaactaagtatggctcaggaggaaaaaaacttgttgcttgaagataatctgaaatcattaatatgcaacttcatgccttgttgctctataaatttaatatcgtcacatgtcctgttgtttctcctaatgattttctttgtttggaacctaatcatgtgttgttgtatctatctaacaattgcagaaaaataatttgaacccggtaggttttggggtccctgggaatcaagatagttcagcgacaacttctagagcaccagcgattagaacatggaatgtgaaaagaggttttcgtgaatttatttctgtttcttatagatttctcttgtctcattttgttataccatttatgaagactggttaaacctccttgcagattcttatggtaacaaattggatgaacatagagaggattttgttcaaggtgcagtggctaga

SEQ ID NO: 63108 - DNA, 600 bp, Arabidopsis thaliana landsberg
gtctacgcctacaatttcgataatattttttgtaaccaagttccaaaatgtgttacatgtttttataacttattagaaaatagatttttaagtaatttatttaccttaactcatcaatgagcataagaaatctgcaggtttactatatcatttgtaccaggtaggaaacattttaggcccacgagagctaatatgtcaagcctatttgaccaatgatataaatggttcgaaatgcagttttggttagtgcctgctgaatatactcaaaataccatcgcgtaacacattgtagaacatgatcttctcgcatttcggatccaaaataatatagacaaaaaaaaaaactggagaagatttgtcttcattccagttaataaacttacagaaaacttaaataatacgaatacccttgaccatagttgagtttagttaaccgaaccagacttaaactggaatatatgtctcatggatctttaacactgatatcaagatagattactacagttttcgaatctatagaactatagaagagaagtacaattatttgtaagaggctaattatctcgacattccggtcgtggtcttcacattaaaaagaaa

SEQ ID NO: 63109 - DNA, 607 bp, Arabidopsis thaliana landsberg
  unsure (1)..(607): unsure at all n locations
gtgctcagtgattttttgactggagattccaaacgatgtgaccaaggttggcctttccaacacaatatgggagaaaccatggagactttcgccatcgtatagcgtaggaacatgtttatcctagcgtctcgtaggccaagactagcgtattaaccagccaattaatgagaaaattagcacattcgtacacatcgagattggatagtccaagtctcatgcagatcccgaccttatcgataagggattatcgtcacgtgcagggctgcggataccttacaatctccgggatctgatgtggtccgattcctctgcaaatcccagaaccatgatttccaggatggtcccctcatgggggcgctgtacagtaacgagaagcatacctcaaagctcgttctacctccgagngggggtttttgacgcagagaagaggttcttctcaaggaattcattcttacaccagaagcagcatgcctccgcggcacctttcaacacaccccaatcgcaacagcgcaatacctctacgatgtgagtgtgatctatgatctatttgagatattttggagtccgcgacactctaacattttctaatcaggtactatacaatcag

SEQ ID NO: 63110 - DNA, 2017 bp, Arabidopsis thaliana landsberg
gggccgactccgaatcaaaaaaaaccctagcggctcgtaagccattcactcttcaaataacctattcattgttttatcgtttcattttgtttatatttgacccttttattgtgctgtttgccttaatacttttaaaatctttgttatctttttttttccgccaaaaatctgtgtatcttccttgcagcttcgcattccaagaagtacatacagtttaacattctaaaataattattgggcttttgattaaggcccatactatcgacgtcctttttcctctctatgcaaaccacttttttattgataaaactatttattttcttttactcaagtgtgtctgtgtaaagttaatgtacaaatacagaaatgaataaaccaataataactcatccaaattaaaataaaccggcctcagttcagttctacgcggtctagtctggtttgggtttaaccaaagagttgctgaatcacagcctcagcgtctccattgtattgtgatagcagttgaattgcatcagacctcggcatcgccagaaattcctgaaaccatctctctcgtcactatactatacaatataagcaaaatccgaaaaacataaacaattattgatccaaaactcgtaaggatcttgaaaaacgtaccattactttaagaattgcactttcttcccacaaagcttctcttggcgaagtctgagtcatcatcatcaagctgctgcttccaccatcttctgatgtcatggtgcttgaagacgtcgtcgtgacttgagaagacaagtttgtgttgctatctttctttgattttgatttaatagcaccaatcaaatcggtgttcacttctttcaaagaatctatcttcaggagattattgaaccggtctttacacatctgaagcttaaaccactcggtatgcgtgtgaagcatcgctttgattattttcattaacttcggttcttcgatcccgagcctattaccgacagaaaccttaaaaaagaatggcaaaaacaaacaccagttgtgtgttccatctttcatctgagacaaaaccagaagaagagatcaaaactaaaaacattgttacctgtagcgtatttgccagatcattcaaaggcaaatctttcccaggtgcggttccgtcgggttggagtaaaactaacaaagtctccttcaatgtcttcagtaaagactggtcattggcggctaagggacctaagtgagagcatgcgacctttagggctccattgtgatcaccagcactcaccagcttcagaaattcgacctgtacatttataaatatatataaacaagttcctccgttactgtgcaaaacgaagaagttacaacaatatctcttggggggaatataccgagagctttaagttgttcttgcaccattacctgcttaaggtggaaaagtaaacccggattttgtgtgaaaaaatctggatccatggtgctgatttcggaaaatgcttctgctgccattcctctgctaaccaattccttcagtgccaacgctatctcatacttgtcctctatagggtttgtgcctgactcggaattggcaaatgaaatacgaggaagacaatccatttcagcagtacgcccacaccatcttttgcgtttattcccctcactattcatatgggatctaattctaagaagagctcttgtattttcacattgatttgaccagctagtgctgcaatcttcacaaacactggttggttcactgccataacgtgtgccaacgtcacctccttcttcgcaagacatttcagtgtcatatgtgagtgagccatcgagcatgctcttgttgctataattctcaatatctgaatgttgacttgtgttgagatctatttccgaagaacaatctcttgataagctgcggcccacctccgattggttgcgtttggcaggaatcgtgatcatttgcatctctgattgaagattaaaacgatcagaaattgatgaatgctaaaaaagaaaaagtggtagaataatgaataggatc

SEQ ID NO: 63111 - DNA, 718 bp, Arabidopsis thaliana landsberg
aattttatcaaggggccgaaaacctgttgtttttttatgggggcccgccccccatgttccccgggggggccgcacctttgacaacgatcgtgcgtgttgcccgattgcgctggatcattttcacccatgtcgaggcggataaatgtggggcaatgaacctctggttggcggcggcccttcgcgcgcaggttgtccatggggcgaccgcctgcaatgtctcattgggcgatcttgccgacagaccgccgcgcgtgctggcagacggcgaggtgatcgaacttggtggacgcagggttcgctatctcgacacgcctcatgtgccgcatggctgggacgcgggcatgatgtttgaggaggaaaccaagaccctcctgtgtagcgatcttttcacgcatttgggcgatcccgcccccgtgacgaccgaggatattctggtaccggccatggccgccgaagacgcctttcaatcaacctcgctcacaccggcgatcaagccgacgctggcgcggctggccgccttgaatccggcgacactcgccatcatgcacggttcgtcctacagcggcgattgcgccgccgcccttgaagcgttgggaggcttttacgacaggcgtctcgcagcatctcttgagcgctgatcaaaccaattgtgcacgtatttaatgacactgacagacggggaccctacggtctcggcctgaaggggcatcagccctga

SEQ ID NO: 63112 - DNA, 1313 bp, Arabidopsis thaliana landsberg
  unsure (1)..(1313): unsure at all n locations
gcgctagggtataatacttttgagagtagaaacatacttaagcttatatgttctcagaaggaaaaaaaacaaaacttatcataataaaacatacaattattataaagaaaacaccttttgtcatcataaacgcatatcttagcaaaatcaaatgttctaaacatgtctttgcattatttgagatttattgttttttaaaaagtaacagttaacggcaaggatgacgacagttacattgaaaaggtcctcccggggttgaaggtatgcacataaattttcctttcggatgtttcttcgaacacagagactcacactctttctgaagacaacggtctttgtttacaatgctccaacaccaatcttggcttttttgctccacatttccaaccactcctgttatagtaataggtttggaatataaatcttagtttatgctccaatacttttaaaacaatagatgcagtttgaaacatttatatatgtaacacaaatggaaaagaaatgttgatgacaaaacaaaaaaagcaacaaaaatatggttaatcaattgagatcacaataatcttcataatgtattaagcctattaaatttttctaaactaaggaattaatcaagatgtgaagaaatttcaaagtatatttacgctggtaatttcctaggttcagtccaaaaaatttgaactcatttgtctagttaattaggtctgactgatatggatttaattaaaagagctgagttcgatattatcgaattctaaacttcaaattatttgctacaagttatataacatagttattgatattttgaaaattaatatagtattacaaactcttttcttcggaaaaagatacatgtaagaaattaagaaaatattaaatgaatacaaacctagtataagaaccgtgaagataataagaacagtaaacgagagttgaaaggatttgatcatcctaaatgatagaaatgaattgatagtactttgaaagttaaaaaagaaaaccaattgtagttatatataataaggtacatgtatctcacattcaaacacatatatctattttaagatatgtactactttgtactccgaattaaaagatctaccttgactcaggttccaggtttcttgcttatatgataagtaaaagtgttaaactcttatttcttttttttattaaaaggttgtaagccaaaaggctcgataataacatgtgatattatttatcatcgaanacttgaagcagtacaaagataaaacaacttggtattagaaaagtggaaaganaataaaaataatataaaataatagatatac

SEQ ID NO: 63113 - DNA, 992 bp, Arabidopsis thaliana landsberg
  unsure (1)..(992): unsure at all n locations
gaaatattgtacactgtaaacctgaacccacatgcgtcagcctcaaagaaaatacagctctaaggatccagatcattacttaataagtgttatgttcatatttagaggacatgaaacaaaacacagagaaactagttttcatggagctttgtctgagatgattcctaaatttttagaacccctgagtcctacactcaaactctcccttactcttcttttctcaacaccatattttaagttttccctcattgaccttatcactattttatcgtaagtcttcccactgtatttccccaccacttcccactgtattcccccaccactgaggtaaactttatgctttcccgcctcttaaagtaccagtaatttggttgttctactttatttgttagtcctacttttgttcgtactggagtataacagtgcccaaatgaactcaggtactcccaaaaagctcttttgatgaactgaaatggcttcttatttcaccaattaaaacacacctctccaaatacagaaaatttatcctgaattgcagcttgcagtttgtcttctgcttcatcttcagaaatttctagcaagaaataaaatcatggtctcaagattaacagaaattcaggaacagttaaggttaatagtcatgctttttacaacttaggagccattatgcagaagatttattgcgaatnnnnnnnnnnnnnnnnnnaatagtctttcccacatttggcaaactaagttcggttcgcactccttccccaccgacagaaggtccccatgaaaaagggccagcagttaaatcgataaatgcccacctgagaggaattgctcacaaaatcatgaaacatacagcttcgtcaatttattggcatgcataagatgtgctctaagccagaatgacaaggttaaatatatgtacacacatgaattgagagcttcagaatagcaacctgccctttccgatccagatatcagtcagacattctgcgttaaga

SEQ ID NO: 63114 - DNA, 1486 bp, Arabidopsis thaliana landsberg
caaataacatttttatgctaaggggtgttcaaacaaacgttgctgttttagtgatgtacatcattgatctcagaaggggaatctattatcagaaatgctacgatccagactgccgaggtgtgtatactattcctactcattgtctttgcaaacaatctgaaagcagaatcttgttcctaaaataccaactccgtctgcagattatcggtcgccaatacgtccagttccagatagttaccttcctgaagatatggtttaccatcaaggagatacacagaatctctgcgacaacctttactctgaaggagaatgtcacgttgataacgaatgcgatccagatagtgctgctagtagaggttcatggtggcttgaagcagttaaagtcgcagatgatcttgaaagcaaaccaaagacacttgaacctcttacctgggttagttgacttattgttattgacttaagactctgtctaatttctcgagaatattaaaagaaaaagctttggctcacaggaaaattacgaggaagatgaagactggtgggtagcagctgcagaagagtcactaaaacaaatcgcatctctaagtccttccccaaaatgcccttgatttagacatctacctaagtcaagaccaatctgggtttgtcttcttcccttttctctatttaaaaccaccatcgttccctaaatcaatgaatctctcaaaattcaatggctgcattaccagtattcataccagcagagtcatttccatcgatcctctcacatgaaaccttgatcaatcactttcggaccaatctttcgaaacattcatcaacaatcacaagccctgtccggcaaaactacaccgtttcatcaccttcctctctcctcctcatgccttcttggtcatcttcttcttctctcccttacatgggcgtcaagctcgtgacctatttccctcataactcttctcagaacttacctggcatccatggatcctacacactcttcagctccactacaggccaaaccttagctacaatggatggtactgttttaaccctttaccgtacttcctctgtttcaggcttaggatccaaaatcctagctagagacgatagtcaagtgctgatcatggttggttccggtgctctcgcaccacacctgatcaaatcccatctagctgcgaaaccaagcttgagaagagtgatcatatggaacagaactccacaaagggctcaggagttagctgaaaccctctccaaggatcctcaacacaaggagatttcattcgatagccacgattcgctagatcaaatcattcctctaggagatattataagctgtgcaacaaactcaactgttccattggtcaaaggtgagttcttgaaacccggaactcaccttgaccttgttggatcgtttagccatgaaatgaaggaatgtgacgacaatgcgatacagagagggagtgtgtttgtcgataatgacactgcgcgttag

SEQ ID NO: 63115 - DNA, 428 bp, Arabidopsis thaliana landsberg
cataccgagaagatcaatggtaaccatcaatacattcaaagttatcatgaccgacaaaactggattggcaagtgggatcaatgttacaataaacacactaaagaaaaaatgagttattcacttcacgcctgaaagaataaccaaccttcctagtgccaaaccaatatccatgacagcagatggaccgaatcgtaaggtattgctcaaagtacacataccaaacgctgtatgggaacaaatcgctgatttcggtaaggttcgatacttgatagacataactcaaagctttgatgtatatcagactaatcacaataagtgtgtttactactgccaaagaaatcataatgtacctgagtcacgagaactgtatgataattcttgaatcgagatgcggtaatcgctgtttcaccgtcaactgtttacaagac

SEQ ID NO: 63116 - DNA, 381 bp, Arabidopsis thaliana landsberg
acttgtacgagaaggtcgacacacgcctgccgatgccgtcataatcatagcgcgtgtacagattatccgtttccaatacatacctaagttctccactgaaagggtcgtacacataagccgtcgaactcccatcttgaggctggaaacggaaatcgtcgccataaatcgccactccacccgttttattcaataaccctacttccaaagtatgcccagtcgttatatctgatcccttaatcagttgtgtcagcatagaccaagcccctgctttccgagtgctgtcagaagacagcaccgacgtagccttttgtgtaccgcctatggtaatttattactgaccactaaaggaccctgtttacactggcttctcccttacatatg

SEQ ID NO: 63117 - DNA, 755 bp, Arabidopsis thaliana landsberg
aaaaaattgcccatctagatcgatgaaataaaagtgaaaaattgagtttagttgagatcatctccttcgtatctctgacattcccatcaatattttattttaatgagttgcagaggataaaagagtcattttgtgagagaaaaagtatttaatcgtataaatatattgaaatatgtcatcttaaacaataccacaaataataatatggttttcccataattgatctgagataacatgatattaacatatcacaccatgtttgtaaattggatgacgtaagactttaaatctatatagctccaaataagtttcatttctgttatatatcttcaccactgtaacataaaccaaattttacccggttaagaaaaaaggaaaaaaaaatattaaacatattttttgtaaactagttttacccaaaatgcacttttgagatcatattagccaataaaaggggttattgtggatttgagcattttttagcccaaaattgaaaatgcatttagctaatagactttgaaaatatgtacttttatagagggaaaatgacgaatttgtccttacttttctctgttttttttcgatgttctttttcttcatcctttttttccccttgaattgcttttgttcttccttcatgattttttctttttttttcctcacaaaaattaaatagtttttaatgagagaaaactaaactgtaagaaaaaatagtatataaaaagaaagggtttttatagatatgggcatatttc

SEQ ID NO: 63118 - DNA, 1101 bp, Arabidopsis thaliana landsberg
tagtcagtggtcactatattctactttgttcaattaaactataaatggcttccaagattttggcaagcatctttttttggtcaattggagtaactaaatatgataaaatctaataacattatttgaatttaattaaatatctaagattataaagtctcagaatatatattttttaagccaggctggaatacatcaacttgttcacacatgcatgcacgtaatcttccgcaatagtgatgtttagggtgagagtagagagaacggcttgcttccatgtcttttagtataccgcttgattactcccacatacgtggattgaagcatttcaatcttattgcaatgcctaagtcttaaccattacgctaatcaatgcaccttgtcattttacttgaatttttattacttaagacgtactatgcagttttaggtttatttatccatcaaattatatatatacatacataacatttattttcaataattgtaaatgtttaagactgagggtttacttctttttgattgtttgtgttgtgagtaagcagagtgttgatggaggaatatggaaagcacataactagaattgctgtgtcattgttcgaagctatagcacaaacactgaacctagaactatccggtaaccggagatcagaatacttatcggaatcgacagggctaataagggtttaccggtatccacaaagctccgaggaagcagccagagaagctctaggaatggaagttcacacagacagttcggttatctcaatattaagagaagatgaaagtggtgggcttgagatcatgaaaggtgaagaatggttctgtgtaaagcctgttgctaatactcttatcgtcaatcttggagatatgatgcaggtaaataaagtatatccatgagtttagctcaattatttttatcattttgattgatgaaatctgaaattgtatatacaggccataagcgatgatgagtacaagagtgtgacacatagagtgaagaagaggaataggaagacagagagacactcagtgtgttattttgtgtttccaaagagagattgcgtgataaagtcatcaaactataagccattcacttactca

SEQ ID NO: 63119 - DNA, 1393 bp, Arabidopsis thaliana landsberg
gttacatcctctggtccagtctctctgtaatcaaaacacacaaaagatgatgaaactgaaataaattaaaacaaaacacaaagatgtaaaagaagaggaaactaattaaaaacctaagagtgtaagtgtaaggagagaggatcccagatgggtctctggcagcccagcctgttgttttcctctctgcctccattattcccattttttgatgattctttcttctttcttatcttgatctgctgctttcacgcttttgctgtttatgtgtgtgtattactatatatatatagagaaagttggaaacgtaacgtatgcgtatgtgtgatgaaataattggtgtttctgcatagcacacatttgatggctataattgagtgtaaatttgtgtatattattgacaaaattagtcaaaagcttaaaatcttttttagtcgttgaaagatccttctagaaaaagacattttttttcttcttcttttcatacgatggctcatggctgtgtagtttattagaattttaggtgaaaaaaatattagaagccaacaaaacttaaatgaaatttatttgcattcataattcattttaccagtttataacaacaacgtaatccaaaaagtaaaatgagaaagaatggaatttgtgtactttgaaaggaagaaaaaccactattgacgtggacacgtcggctaaaggagggtccacgggggttggtgaacaaacaatgtggggtctaatcgtgtgtttgctttggtttaaaatcatggttggccacgtgttgattcttgacctctctctgacatgaaactgtagcattgacggcccagatcagctgcgagaatacttcccacaaccatggaaattttacggcccagatcaacaaagaatcgatttgctctttactatttcgaagaacaaagagtgacagttatgaataatagaaaagaaggacaaagagtgtgtgaatggcttcacattaaaacaaaagcccattatgaatgacccattcacatttcacacccagtttgaaaaatcgaccgtccaattaagtaacattcaaaaacccaaaagataaacctctaattcacgaatcacaacagcagcatgagccgtttcatcacgacgttatctcagagtttcttggaaataatttgttgtagcggacttgtggctgtaaatggggccaatgcttaaatttacttgtctcgtctcttctacacgtcttctcttccgaccacacccttcattcaattcaacgtctcctctctggctctctctctcaaatatataaacaccaataatgtctccaatttgagatttttaactgaacccaagtcatgacgaagcttctagagattaatcatattcaaaccctttgttttgccaaggggttttt

SEQ ID NO: 63120 - DNA, 456 bp, Arabidopsis thaliana landsberg
aacagggtctgacataagctcttcaccagatttagaggatgacctaaggataacatggaggaggataatggtttgtcctttagagactagatgatcagcagcccatttgagagcatgttggcttcctttattgttatccactgctacagcgactaacccagaattcgtacctttcttcttcgagcttcccttttgagccttcatcgattacaatgcttaagaaccctagattgcaaaatccccgcatttaacgatatcaacctctcgattcactaatccatcttctcggagaatctcattctcaatactaaagaaatctgcggtcttcctaaattaggggttttgagaaatcctctttctccaaattagaaaacttcgattcagtggtgcactgaagaacaacaatggataattttaacctcacattctctctctctctctctctctttctctctt

SEQ ID NO: 63121 - DNA, 538 bp, Arabidopsis thaliana landsberg
tggccaaaaaatcggactgaatactcgaaccgtaattattccgaaattggacttgaattcgaatcggaaaattcaaattcaccttataggatcttaaacatttctactcaaaaaaccgaatccgattctgataaccgatgatttagatttgttttactaatttctaaatttttatacctaatataattttatctgaactcgattcgcctatccaaatatctacccttatatggcatggcatgaaacatcatctctgaagaatatagtaatgccatgaaggaaaattggcaaataaaaatataaaatatacatgaaattctttttttaaaaaagttttgtttttgcttatagtaataaaatataaattaatttataattagaaaaaagaaagaagaaggtacggcggtggatattggcccttgccgcaaaagcaaaagctatcgccaccaccgtgtcataaatctcagatctctctctctctctctctctctctctatgacgggccctcttcgctatcgcgatgacaatggccgcatct

SEQ ID NO: 63122 - DNA, 388 bp, Arabidopsis thaliana landsberg
  unsure (1)..(388): unsure at all n locations
accgatcagcccataacggtacagataataattttgtgttcgtcctcccaacataaaatgacaggaacactgggactgtgtctgagacttcacttctataaactttattgtgtcatatatatatatccaaatagttcactgaaactcaaagcaaattacattatgatcaagagtgaatagaagaatcttctctttacaaaaataaattcagaagaatcttgaggtttaaccacaatttgtggctaagctatatcagtnnnnnnnnnnnnnnnnnnnnnnnnnncattaaaatacaaattttttaaactaagaaagaacagccactagcgttttatgaagttctatttctccatgttaaattatcttctgacaacgtcgagctgcaaag

SEQ ID NO: 63123 - DNA, 410 bp, Arabidopsis thaliana landsberg
  unsure (1)..(410): unsure at all n locations
aaaaaaaaaaaaaaaaaaaaaaaaaaaaaaaaaaaaaaaaaaaaaaanaaaanaaaaaaaaaaaaaaaaagaaaaaaaaaaaaaagaaaaaagaaaaaaaaaaaanaaaaaaaaaaaaaaaaaaaaaaaaaaaaaaaaaaaaaaaaaaaaaaaaaaagaaaaaagnaaaaaaaaaaacaaaaaaacaaaaaaaaaaaaaaaaaaaaaggaaaaaaaaaacaaaaaacaaaaaaaccaaanaaaagacaaacaaaaaaaaaaaaaacaaaaaaaaaaaagcaaagaaagcaaaaaaaaaaaacaaacaaaaagaaaaaaaaacaaaaaaaacaaaaacagnagaaagacaacaaaacaaaaaacgaaaaaacaaaaaaaacaaaacaaaaaacaaaaaacaaaaaaaaaaa

SEQ ID NO: 63124 - DNA, 2748 bp, Arabidopsis thaliana landsberg
  unsure (1)..(2748): unsure at all n locations
tgtttggtcaaaatgggtcactgtgaaacagaagcaacttctttaagaagctcttgtgagagctcgtctggattatactcaaccccaaagcacctcacaatctccatcttcggatttatcaagtacctatacacaaaaacatatcaacatttagcatctttttcttacgaacatatcaagatttgatttgagatgatgaacccttacatgttgtgagaagtatcaacgagataatcttctccgtcctcttgaaccttcttgaagtagacacgatactcttgtgccatttgcctcattgcacttgcagtcccggttagtcctagtattctactatcaaactctgcataaagatacaagcaaccaaacgtcagagggtttagcaaaatagctggaacacaagggcacgaagtaaaaccgagacctttcaagtatgcgtggagatgagaaggtgtgtctcgttgagggtcaagagtgacaaagacaggcagaatcttctcgttatgtttagactctgttgtttccatcaagacaagacatcattactaaaagaagatcatatattataacaagaaagatctgaaactaatgaaatggctggagctttgtataagtaactcaacctagtttatcaacagctttggacatcatctttagttgctcaggtccaacatccggggaaaaagagtatccaaagtagagtagaacccatttaccacaaaagtcattctctgtgactatcttgttttctgtgctcacaagcgtaaacggacctccgataatcggacctttgacagttgtattagaaccgcagccacaaccgctattgctgcttgcttgacctgcaaaagtagaagcatgaaacatctcagcttcatcactccaatgtgtcaaaaaaccatcatcaaagtctatagtacctctaggaactgctctcctttcgtcgttgtaatgaagaaagccgacgaatccggcaaaaccaagtagaatcgcaggctgaaaatgcagacaaaaaagggaacataagtcccaaatgaacgatccaattcaagaacacaagtgaaggcaacaagagtttttaggatctatacaacagcataacgagcacgagaacgagaaggagcttgagttcctcctcctgtgggaaaaagaggtttcacatctggaatttcatggccctgtcttgttgatttacagtaattgactgattgaattcgtttcgatggtccacacctaaaaaaaaaatcaacgctaagattcaatataatgttttaagatcaacaatttcgatactttagaagataaaccaaacaagaaacattcacaagaccatcaaaattccaacaaagagagacttttttcgcagatagagtaacaattgttctacttaaaaaacccagataaagtaaaatcccctaagcaacttaaaattagggtttataaggggtttaaggataagaagactaaccttcggagaaaactggcagcttgattcttgcaggacagaacaagacggcgacaaggaagcattgaatttggttcttcttctctgtttatttgataaattatttcagtttcatccaaaagaaaacttattccgtactatagaatctttttttcttggtgaagagccaaaaccaaaacaaaataaaaaaagtttttgtttttttcttggtggccaagctcatttccgtgtgttttaatgtttttatttgtttaattttgtgtaaagtaattaaattatctatgggttgacttactaataaattattgggcttcataattgacacacaaaaaattattgagctttatatacaacaatttgagttttattgggctttaattcaacaatttgagtatattttgtgtcgaaaatctgcaatgagattatgttntcttgttgggtgagtagtgtgatttatccatcggtcctagtcaaaaccatcattttagtcctcacttgcgactatataaaatttacaattatattgatcaaaataggaaatgagaaagaaaaanaattgatactaataatgagggacatgaagagaaggggaaaacttttgagttggtcaacaaaacaaaattccggtccgaaagagaccaactgaagttacgcaaatcaaccacagccacttgctgccactccatgcaaaaaccctgatttccgcgttgtctctcttctcttctctctcgacactccctccaccaccacacatttccttctcgccgttattccgatggacgggccaccgctacctccgacctctacctccacctccacctccattaatgacaatgaaaacaagaccggtaatgatccttctacgtggcatcgtcccaccagcagcctccctcaattcccttcctctgcctcccaagtttcttcacctccacaacatttacgtaatcgttctttgaatctctccccacacgtatcaccttcttcgccgcctcctcctgatccaatcccagagatcgagacctacgtagtgcatgttccaagggatcaggtctattggatccctcccccggataatgcaaggatcgtcgaaagacgcaggaatagcgatccggggagaaataataaaagtttttgttctaaacgatgcatttggttattcatctctgtgatcgtcatcggattcatcatctgcgcgatcgcactaatcgttggttttatattcaagcccagaacctccggttttcaacgttaagaaactagagaaatctcgccatttcgagatcatg

SEQ ID NO: 63125 - DNA, 772 bp, Arabidopsis thaliana landsberg
atctttctagtttagtcgtgcagccggttttatttatgattttaattattcaaattgcatttttctttcggataacttgtttttctactctatcgagagattcagatagttgatttaaaaaataatttagacgacttttggaatatgcagctgagcaataataataatataattgatccaagcatcattaatcatgcaagatgtaatactcaaaactattttgaaagaagtaaactcttttcaccatcaccaaagtaccgtccgtacattcaggttaggagttttttttaataaagaatccatgattgtataagaataatgaaatagtaataaacataaacaaaaaatcactctgatttcaacaatagttaatcactgtaaaatatccgatattcagttttatcatcatatatgcattttgaggactagtatgcgattctgctttgtgttttccgtaacaaataaattcaataagtagatacttcagcttatataaagattaccaaatatcgaaagcttttgaagaacattcttgtcaataccctaaaaacaaaggtaagatcaataataacatgtctttaaaatttattgtctatattctcaactgtttttgaggggaaaaatagagttcatcgtaatcttgatgagggttcactgatgtcatatttggtatgcaagaataaattgttttgtttttttttccaaatgtacaaatgtcaaaagaaaggagagaattttttctcccaagttaaattaaagaaggggtactttt

SEQ ID NO: 63126 - DNA, 745 bp, Arabidopsis thaliana landsberg
gaacattacctttaaaacaatacaaaaatcataatctttttagtaaactaaaaattgtcgaattatatgtttaaaacatcatttttttagtgaaatttggtttacatgatgactcccttaaaagaaattgtttagctagggtacactttcaattattctgcctaaaaccatttctttatcaatcaaactataataacaaaatttgctgtagtttacgttcgatttcaaattatatggccaactcctacaggtgatccgaaaagacattcaatttattgatatgtgttattactatatcttaatcttaacttttattaacttttaatgttcttcaagtttataatcttcattgtgtaaagacaggaatcaagtactcgagttgacaaatgaatcgcataagttagtgaatatctttggtcctttaaatccgatccgatcatcatttacatatgacagaaaactattttcgcaattaactaaaggactgtgattgtagaacaggatttagttgtttgattagatatgaaaataatcatacaaagatagtcagtgcatatggcagcaaagattgcaaaatttaaaagtcttcaaagaaccaaggatcttttcatttacccgagggcagtgcataaaccctagttttttacacgaaaaacaattaacacgctaaacattgctttggaatcaaaatcataaccatataattctcaaattatagcgaataatccttaccaaaaagaaattt

SEQ ID NO: 63127 - DNA, 670 bp, Arabidopsis thaliana landsberg
tctctcaccgacgacaccgaagacgaagaagaccgtacagtacatttcttacacttgtctttctttctaaacaactcacttactctcactctcacacaatatctgttgcgcttctacaggaaaatcactcacattgcgaggaaaaaagattatttgactcaaggaaacaaaagatacttcggaaatttcttttgttttcctctcaggtaaattttgttgtttgttaatttcttttccttggaaaaaaatttgttttttattttttgatcaatgattcgatttttcttgaaaagatttgattttgttgatgatttggtaatcaaatatgagtaatatggagtcttgatgcagaaagatgatttcttttttggctttttttggggtgcagtgatgaaattacaaaacccagataagaaaaccctaagagaaggctttagtcaggaatctagtgtagtggctttagattctggagttttagctatgagtggtttgaaatgcgatgggaaattcccggtcaaggatgtattaatggaagaaggtggtgataaagtgaggaagattcaagtttctgggggaaatatatcacttgttgttgattttagtggagctaggactagttctaacaaattctttgagtctaatgctagttgggtcaatgagaatctggtta

SEQ ID NO: 63128 - DNA, 443 bp, Arabidopsis thaliana landsberg
aagccaaaaattatcagagtggtggtcttaaacctctgggtttgacgaataataattggtttatgtcaaaaagagatataataattggtcttgcatgttggtatggtcaactttgtgactaaaaaaaagaaagagccttaaacgagaaaatggaatgagttggccaacaagagagttcacaaaagagtggggagacatgcaatcattcggatttgaagacagcccatgtttttactgacaagcaaacacattggagtgaagtcgagtttttataatttatgataaacataaagtaaattatgagtggtgttttttttttttcaaaaaagaaccaaactcttttacacttaatgatttggaaaaggacgagactttttattaaattttgaactaaaaactttgagggccttgaaaatcagaaaaccacggtttttttttaaatt

SEQ ID NO: 63129 - DNA, 1364 bp, Arabidopsis thaliana landsberg
atcagatcagctcagcttgaccagtcaagtctgttcttttctacaaaaaaattcagttaatcacggttccatatggctggccgagcctgaaccttaaaaagccaaggtccatttcgaaccagccattataggagtatatgactgaccctgccagggcctgaccagataagcctatcacaacatccttactactgagatggataaggacatagtaattatgtactacccaaaacctatccatcccaatgcctactaaaaaatcagatactaatagcccaaaaacaaaccttggttctgcataagaacatctcggggattatctgcaggcctgtttctgcaccaaaacttggttgtgtgatcattgctaccactgcagataatagggttaaaaatcattatctgaagcatttagttattcaagagcacagggaaccacaacacatcatagaataaaactgtaaggaactcatagcaccagactattgaaattgctacctgcaaagaagatatccaataggatgccatgcaagatcccaaacactgttatcatgagcatttgggatttcaatctgcgggttttcatgcctgggaattaagaaaagttttcataattagatacacctcaaacaaaaaccacaaaatataaggtaaagtaagatgctactagcctactagtatgtagatgcatcatgactgaatataaaatgtagagaagaaacatgatttaaaaaacccttataagtgattaaaacaatcgcagcatgaacgaataaataaaacagcatactgctgcacaacagtacctaccccacaatccaatgacaaatggagccgtcagagctcccactgacaaaatattcttcatggcagggatgccacgccaaagcttaaaaagagttaagacaacttttaattagaaatagttgcaaattagaaatatcgaagaaacaaattgaaaactcgcatccatgggataatgtctcatatgtcgacaagtaaagcatgggtacaatgataatctttcaaaggcatatactctagagtcctagtcaatgtacagaaaagtaatttgatgcggccagtttgtctgatttcacgtgtttaaaacatgatcattatagaatttgacagcttacatgttacatctttcgtgtgcccacgaaaggattgaagctccttcatagtccttatatcgtacagctgcagattacatgcataagtgtcatacaaatgcttccataatgcaaggaaaaaatcttatttacaaatcaatatccccccccccccccaaaagaaagtgagaattaccctaatattctgatctttcgaggccgtaaaaagcccattgccattttggttccact

SEQ ID NO: 63130 - DNA, 395 bp, Arabidopsis thaliana landsberg
  unsure (1)..(395): unsure at all n locations
tnnnnnnnnnnnnnnnnnnnnnnnnnnnnnnnnnnnnnnnnnnnnnnnnnnnnnnnnnnnnnnnnnnnnnnnnnnnnnnnnnnnnnnnnnnnnnnnnnnnnnnnnnnnnnnnnnnnnnnnnnnnnnnnnnnnnnnnnnnnnnnnnnnnnnnnnnnnnnnnnnnnnnnnnnnnnnnnnnnnnnnnnnnnnnnnnnnnnnnnnnnnnnnnnnnnnnnnnnnnnnnnnnnnnnnnnnnnnnnnnnnnnnnnnnnnnnnnnnnnnnnnnnnnnnnnnnnnnnnnnnnnnnnnnnnaaatatactttctgtatatatcatgacgtggaaaccttaaaattgaaaaagctataaaaaaaacatttgaagaacgtcttgttcggaatcttttcatgaagtga

SEQ ID NO: 63131 - DNA, 561 bp, Arabidopsis thaliana landsberg
tattgagactatggtatcacatcacacaaatatatgcgatttgcccatgtatgatgtctatactttatgtttacatttgccgacaaatagttcgtggtatatataaaacaatattttaacagtattttgcttgttgattttttttaatcttttgacttgttgatagatatagtccggaaattaaagaaatattaagaaactttcataaaaaaagatcgaactttagtaggttaccacatcaaatgtcgttttcatgattgattgaatgctgtgtactgtcttctccaagccctcgtgccacatgttcttatagaaactgtcggtgcccttatattattctttttcctagtaaatattgttttaattttcaagactatagaatagaaaaacgtttaaattttcgcttatgtatagcttacattacttttggtctttggaaatacccaatttacaactatatatataccactaactaagttcatataaaacaaataaaaaaaaattgcttctgtttttactagcagatcgagctggagcgcttggccacgtgattagagattt

SEQ ID NO: 63132 - DNA, 586 bp, Arabidopsis thaliana landsberg
tcggaaattaaacaaagagacagaatactaaagctgtattcatggtttggctttgaaatggggctcgatgtgggaacaggcctgggactgttgatgatcggtgccgccaaaaaattagataccggaatatcatatggtattgacatttttaacacttatgatcttgcggataatagcatagaacatgccatggtaaatacacaattggaaaatgtatcctcaaaaacgacaatattaaaaggatctatattactgactgatttccccgataattattatgatgtgatcattcccaacctttgccttcacaatatttacaatatgaaagaaagggaacaggcctgcagagaaatgtacccgattatgaagcctgaggcagtagccatcatctgggattttaaacataccggcgagcacagaaaagtctttaactctttaaggattaacaccaaaataaaggggactatctatttggacacattagctcctttgaccattattaccgctgcaaaaaccattgggcaacatagatttgacgtaacaactgcatgatagcatgcgatgatatcctataatgaaaaaccct

SEQ ID NO: 63133 - DNA, 264 bp, Arabidopsis thaliana landsberg
cgttcccaagcacaaggtttgtccacacgtgacatggtcgccctctctggtgctcacaccattggacgagcccaatgtgttacattcagaaaccgaatctacaacgcaagcaatatcgacacctctttcggcatctctaaacggaggaactgtcctgccaccagtggctccggagacaacaagaaagccaatcttgacgtccgctctcccgataggttcgaccacggcttgtacaagcaacttctgagcaaaaaaggtttgctt

SEQ ID NO: 63134 - DNA, 1191 bp, Arabidopsis thaliana landsberg
cttctgagcaaaaaaggtttgcttacgtcagaccaagtcctctttaataatggtcctaccgactcgctcgtcatagcttacagccacaatctcaatgccttctaccgcgactttgcaagggcaatgattaagatgggagacatcagccccctcaccggatccaatggtcagatccgccaaaactgtcggaggcccaactgaatgattctcttttatattatcccaagcccattgagctcaataatcacctcttcgtcaactgttttttcatgtgcattccccttcttcgtcaactgttaaaatacatcttcattatataaaaaacaataaacacgtaaaagtttgtgactatgcagttttccattataaattactgtctatattctcttcttatttttttttttttttttttctcttcttactttggctgattgaaagaaataaaacttttaaatttagttgagtagatgatttgttataaactctatgctacgatttttcaaatattattatttttacccaatcaagcatatgagtagataaaatatcattaaaaaaaaaaatggtgagcaaactatcataaaaatatatgatggcaaaatgtgagccgtcggatgaaaagtgaataggcgaatgagaggacaagtgtaaaaagtcataaggtagacaaggacacagaggaacaagtggcctctgctcttctgcctcaattaaaaaattatttttatttttgatgtgcgtggaccgccaatgacgtttaacttcgttttcatctcttcttcttcttcttcttccgtcttctcctccatttttgttggtaaacccagaaagaaataaggaagagaaggggcctttaggggcggatagagagatctacacgtctttctactagatctcggattcattcccagaatcctctttcctcaccggtgattgtcttgatcatatatgttttgttttctccttgcgaattgttgattacatgttgaaatttagggttctctgattgccgatctatgctttttctctttaatatagaggtaatgcggtaatgggggagaattatataacctgaatgatcggttctggtttagggctttagtggtttgagaatttgtgtgtgtgttctgattgatgattgcgttttgactcgtgatcgatacatataattgagtttagatttgatcgata

SEQ ID NO: 63135 - DNA, 1201 bp, Arabidopsis thaliana landsberg
ttttttgcggtactcgttacgcttctgctccagcatttcctgttttttacgaagagtctccttcaaccgctcaagagtgtctgcttttttctgctgaagcggcgtaaccttgggaccactggtggtcaccaccacaggcttaggctgttcagaggaggatggagctccaccagtttggaaggtagggaccttagcaattgaagatacatggttgcttttcgatgcagcagcaataggaaattggttctgtgctccagaagcagtcatactacgacccttcatagaagcaccactgccagtggacaggccattatcaggtatactatctctatttgcccaccaaagtttgatgaagcggttacccatcacagcatcaggtgccctgagggcagattcagcctcttcacgttttgagaactgcacaaatgctctctcactatttactgggatgtgaatgtcaataactttcccaaatttctgaaaatgggcaagaatgaggtcccttctgttgctctcgtgtggaacataattcacaaatagagtccgcattgccttttgagttggtttccttgtattgttcatcatatcatttgaaatattcgatgaatcaacaacttttgcgacactttcaccaacatggttttgtttaccgtgtcgagatgaattaactgagacctccttcaattgatcttcaggaacagctgatgaatttaatactgcatcagctttctctttggaatttgcttgactattagaacctttcattcttccccaaactgattgacttgtgcttctagagtctctaataccacacccattttcagcggcgtcttggttactgtcatccagtggagccacattctcatcaaccccatgagaattgagtgtagatattgcacctgaagtttcaccagtactattattccacaaaggttgatcaggatcgtaaaagtcagttccaccagcactaggatatgcatccccataacccaaaccatcaacagccattcccccctcgttagtcctcccatgagctcctttaggattcatgaaactggcacccccaaactgagcgggcacttgtttagaagaagctgccagatgaggtgcaccagggactgaaacgggaaggttaaactgtgatagactctgcacaaatggaaaatgaaaaaaaaattactcacttagagaagaatagtgt

SEQ ID NO: 63136 - DNA, 613 bp, Arabidopsis thaliana landsberg
  unsure (1)..(613): unsure at all n locations
aagttcttgttggttccaactgttcatttgttatttctcagtttggtagttagccttattcaattagtttatttctagtttaacaaggatcacgatctttcgtcgtggggatgcggtggggtcaaaaactgaagttagcaagctttggatgatagatcttggaggaagtgagaggctcttgaaaacaggagctatagggcaaactatggatgaaggtagagccataaacctctcactttccgctcttggagacgtgattgcagcgttaaggagaaagaagggacatgtgccttacaggcaagatctcagctttttaattccttttcacacacatatgccattgaagcagcagagacatctatctggcagaaatgaaatagatcttgctttggtcatactactgagttagctttttcttttttgttgcttgcagaaacagcaagctaactcaaattcttaaagattctctaggtaaaggcatatggttgcttagaatattatcttaaaagtcttttgagattaccaacataagttatctaagtttgattgttttcatgagtttaatggatttgtgattaaactntatttaggtactagatcaaaagttctgatg

SEQ ID NO: 63137 - DNA, 625 bp, Arabidopsis thaliana landsberg
gatcaatatatcaagtttctcgattaatgttccatactttgactgtgaaatcatggtttatgcaaagatcgcaacattctctctacggatcagctctaatgtgagccttgcttgtcctcccaactttgattttagtgggcagaatggtacgactaactcttctcgttagtggaagattacaaatgataatttgtcaaggatagttcaagtgaccttgagagtgaaatcatgtttagggttataaatgaagactttgggcaacacacttaacagcaaaatcaagtgataatattttttggttttcaggcaatttcttaaaaagtttaggcaattaataaatgaaaagttttgtatttgtttaagctaactaaaaaagttaggtatttttctatttctatattcacatgaggaggttaccgtattttgagtgcgacacaagagataggttcaaaaaacttacttgtccgtatctaaaacgtcttgcatcctagacaagaacagctttgtgtctccttcgtccaagtggcatctggattttgctttgatggcgctcgacttcaaggtccccttcgctgagcatatcaggaatcaatgaatctatgaatctacgctaagatcttggaca

SEQ ID NO: 63138 - DNA, 390 bp, Arabidopsis thaliana landsberg
tggttgcccatgcctttttagaagaggcagtgaaagggacacatgcgagcaagagacgctccaaagcgacagtcaaaggaaggattctccagctgaagccatttgaattggagcgatgtccagcagccgctgaggaaagttgtctgagcgcatagaagagccgagagcacgccgagaggaacggtattgtaggaggaaaagagagaagatgagatgatgaaagagatctgagcagctagcagtgacatccatataccgaggaagcctccgaatttgacattgagagaatcgacgatgcatgatatgaggaggccgctcgtgagtgcagcgaccaccggagtgccgacgaggtcgaggaggaaggcggcgcaagggacaagagcaattgcg

SEQ ID NO: 63139 - DNA, 1465 bp, Arabidopsis thaliana landsberg
agtacttctttgtatgcttcggatatgttatctctaactcactttgtcttcatatccaagtgacttctttgtcttaattaaagttacttcttttgattctcgtctctcttgatttagttctcatcaattctgattaacttgtatgtatttctcttctcttttagatggattcttcctcaataccggaagacttcaataccaagaatgaaaatcaaactcaagaagcagaagttgattggaggacttctgataataaaggaaaaaggaaggaagttccagggaaaggtgcatatatatagttttaaggcaaagactacaaaaataggaaaacaaggtttacagtgtgggagcattatacaatattcaaggacaataaagtcaagtgcaaatgtcaatattatacagagatttttacttactccgctctacaatatttgtgaaagatttaaggatcttattatcgagaatgaattgtatcgagtagcaaaacaacaagtaacaacagtgaaagtgactttatattgctaagagtcgtcctctacaaaagattgtttgtcctcttttatagccacgagctctaatgctcctattgtcatttaatacgaggcttttcctctaaatacattgattacaatatctgccatcacccctctgttgcttaattacaacgcgaatctcatcctagcatttattggtattagctccagagtttcttacttcttttccaagctcgtctttcgctaacgggccattttgttgctcaattcgaggcctatcatttgagtcgacaaatgttgggcctcaacttgcgatataggcccagttaaaggtagcacagcatttcgggttggatcctgtgcgagatttgacaccaacggtttgcaagccaagtcttgcaagctaaaagttcaaaagacgtaaatgctaagattttctatcaatgaatattaaaaatcatgtgtaatcccatgtatctaggtgatttgacatttcatgtcgttttgcttgcttggatgttaccgcccatttttatttaggccttcccctatttaaacgaatggactcttggaatactacacctttcattgaatcattgtaattcctttctctttaaagaacaaccctctgttctcttcttcattattttctcgttccacattaggttggctagaaatatttgggataattctagttaaccctttcactggacgttctatgtcaaaatccaaattccatcaaaattcaacttattaaatttatgatttatgcaatattggggatgattctagttaaaccttttcattggcttgtggactttacccttgtctgacggtcggttcactatttttggaggtttagagaattgcttaacgattgtacaaatcaccacgtaatattttcaaacattgatcaactgaaaaataatgtgtttcttgaagtctaattggttgtttgagctaacttc

SEQ ID NO: 63140 - DNA, 587 bp, Arabidopsis thaliana landsberg
cctgtgtgtacagaacggccgagctgctacggctagtttatctgcattttttagaaagaactttcaacaaagtttatccaaggctgggtaaaagcacaaattcataatggtttccatgagattttgaaacggtttcatattactcctgttgtagctttgatagaatccttgtcgtctatgtgtctaatcaaaaatcaaaagctagtggcctattatctagtatcattagatatgtgaacagatgaacctcgtatctttaatacaaatggtagccatggtcagagctattgattcatcacttgtcttgacaatttttcagcccgtggggatcagattcgagtcaattataaagaacatgttcatggattatactgtaatttactagaaaatctagtataatttctaataacaagagcagatgagctatttatttcaattatccaacatatgagatgaacgataagcacaacaagcttcaacaatattggggaaagtagtaatgaaaacaaattggcccctttctgatcaataatactccattactcctgatagttgcaaattggattaaagctggttcaataatcata

SEQ ID NO: 63141 - DNA, 1765 bp, Arabidopsis thaliana landsberg
acttccatttgagcaaatgcatacccagagaatatcaaagctatgggttgcacttgcaggacaaacctatcattcataatctaagtagatgacatggaaaacataataaatgatgaaagggtgttctttgcaaagtttttcgatattgaaagtgtaagaaaacggggtatgttctccaatcatattacctgaattccttatggccgagtatgctgtatattgctaagacccatagaataagagctgaaagcttctgattcttagacttgataattccagcaatggagaatggtgtgaaagtgaaaagcatgacaagaaatccctgggtgaagtaccagtgccatgggtgagttccgtaatagtctccaccagacgaaaggaaattaaacttcagaaaattgagaggcacaatgacccacgagccgtacatcagacggtccaacaaacaggtgaaaccgaggaccaaagatctaacaccagaagcaagttagcgcaatgaaatcttcaaaatcaaacattaaaacgaacattcaagagtatagcttagctgcagagttaaacttacccaatcgggatcacctctagaatgatgaatttgaccttattaggtgtcaaaaatagctcgagcatcccaacgtataaccatatgactgcactagttggccttatggcacatgctagggccgctatgaccaaaccccacttccgattcacgggatagtctattgaagaatctctaatacaaggccagtagtacagccccatgatggtaagaacagtctccaaacagtttgaaaaggtacggttcaaacagaagaagatgaaccagtttgccatttgacaaaagagctactaaaaaagttaaggaagcaatccagaataaaatgcaaatacaaaccaagaaagattaagaggaaaccactaacagacttatctaagtatttcattgaagctcaggatatctaatctaacacccttcccgttacatcgacctatcattgcgtagggaaccatcaaatgtagtgtaatgatgggttggctccattattgtagataatgtttgttttttattaaccaaggtttaatcttggttaaattcatagccatatcattcaaaaatgtaaagcaattaacttagtatgctgcatagaaaggatacagaccaagttgcaacatttcctccatataaagcatcagagagtttatacaaatagagatcaccaatagctgaaaatatggattgcataagacgtggggctttgatctgcaaagaaatgaaaaaggttgtaacacataaaccactctatcaacctttctttgaatacggtgaaagctagataaaactatgttcaattgaatcagattttggataaaacttagttcaaaatcaagataactaggttctgcttctaataagaccaaaaaaaatcgagaaacaaaccattatgtagggagtatcaaggccagtaacttgtagaagtttatacaagaatgcgaacaacattggatgcaaatagcttcgtattcctcttttccactcccatgtcatataccatacctgtcattaacatcaatcggcctcacaaattcttactatgcattcattgctcaaatcactgattcttatgaattatcacttcaactatgtgatttaggcttccgagacgaatctagccctcactcagctccaagaatgcagtaacagttacttgcgccgaagtctcagttcaatcagttcccgcggatccggcttcaacaaaaggaa

SEQ ID NO: 63142 - DNA, 452 bp, Arabidopsis thaliana landsberg
atccgatactggctagctctatttcgtctagactgctaaattttaattaatactatgaggtcgagagtaaaccgttacagtagtctacaaattaatttaactcggaattattttaatctattttcaatcggtaattaatcttaatatgttatcacaaatctaaaacatagaagaaaagagacataatcaatccgaatggtggggtagggtgttgaactttattaaacataccattctaagggtatcaactttgaggggctattgaattgttatgtgcccgagagagacaacgacgggtaccacgataaaagaccgctgtcggtccttaatgagaagatccagcgcaaatctacatgaggcgtcctgagctcacaagctacccctttaaaagcgtcttgatcactcatacgagctacctgtgaaacccacaaccaccttctataaaatatctg

SEQ ID NO: 63143 - DNA, 1182 bp, Arabidopsis thaliana landsberg
atttgcatataaaaagaataacctgttcaagacaccaataatacatctctcttgctttaaatgtcttttgcgtcaaaagaaagtcaacaaaatcccaagatttgtcgtgtgaagtttgcgatattgatttcgggatacactaacaacttcttccatctctgcaccagtgcatggatgggagttatatgaatctcactagctagtgctttgttttgggaaaaatatcaaaaacaaataatgttacgtacccatcatcttcttagcttcatgtggagaaagcttggcagcaaaagcgttgaaggctttagtgtaactatatacttttctttcctttgcttcttcttggctgttttctcaagagacgttataaatttgattagcaaacaaccaagtagaacattactccataaaacgttacgcgtttatatgttttagagtatgtgttatacattgatgcatgacatgtacctgatattcaaagatgagagaagattgatgtgtgtcttgatagtttcttctgtattatccggtcgatctcccaaatatataatatagaaatcctttataattaagaatttcaagagtaaaaatatattctccttgcaacataaagttttgttcaatctgatgacaaacaagctggagaaacaaagattgtgtattatcattacctttgcatgttcatctccggctgaaacatatcttggtgatatccaaagaacaaccataacgagaacaagtagatgatgatggcaagaacattttgaccttatcattgtggtattgtgtatatgataagtatgcttattgagtaatgagaagatgacacattctcctctattaatagagagtaagagtaccttatgggtttgattcgttaaagatgttacttttgataaatggagtgaaaacagatttaatttcttttaattaatctaatgtatagcacacatgcggaattgtaatagagcttgataatttgtttttgataaaaattagttcgtatggtgtcttagaaagaaaatagtggtcacttgctatatctaattagttctattttggtgataacatagattaatacacatgtatatgtatagagtagtaataggaacttgagatttgagctaatcataaaattttgattacttgaattccgaattcaagccattgagtttttaccat

SEQ ID NO: 63144 - DNA, 1712 bp, Arabidopsis thaliana landsberg
aagtcttttcttgtcacttatcaagtcaagtgtgtataaaagtttatcttcaagcgtttacgttgtttagaggaagcttcaaaatttcagggtgtttctgctgcagtagttgaggcttacaacattcttccatctctggtgagctttaattgtcaacctttaccttcccggcctctttttgctttgccatttttcacgcgaaattacattatttaattgtttgcattaacttctgattatgcggttaacaattttagggtgacttgatcaagaattagtgaaaaaattaagaaactatttcttcttaattatttgttttctgaaaaaaatggattccacatgtttatagcattcaaattgtttgttctttgacttactccgttatagcaaagttttctaatatagacatcaagctcaatacattatatgttttcaatatgttttcaaacaggacgtggttgttccttctctcatggacaaagacattgagttttcaacgtcaactctgtcaatggtcccagggatacctataaaacccatgcttgcaaagtaattgtgcagatactcacgacatctttgtttgcaagataacgattagaactgctgatcgcatgcctttattgctgcttttcattgcagaattgctaagggggttcaagaattttttaacctctcccaagaaaaggcctttacttgtgaatacaagtaagtttgtctcaagaacttctattaaactactacttgaaactgataaatttctgattattaacggaatgtctgtttctttcaactcacaacccttgaatcttctttgcattctgtagatgtcattaaatgttatgatagagtcgatattgtttccatgagttgtatttgcactctattgatctccactaatcttctctgtttcctgatataccttaatattatgcctaaatatgactttcagatatgatggccagcgcgcccagatccataagttacttgatggtactgtgtgtatcttttctcggaatggggacgaaacaacgtccagatttccggatctggttgatgtcataaaacagttttcttgccctgccgctgagacattcatgttggacgcagaggtaggagaattttcatataattcactttatgcatctttatctattcaaacccacatctagctatgcacaggaaaacgagggaagggaccctttttccggttttcaaattcaacctgtaattgctcatcataaattctcttggtcatacgtggtgtatggtctttttatggttttaggtggttgccactgatagaataaatggaaacaaactcatgtcattccaagagttatcaacaagagagagagggagcaaagatgctttgataactacagaaagtattaaggtattgaacacaatatctatacaacccaattgaatgttagtatggaagttccacatcgttttacaatgagatttatttttctcagtatattcgacgaaagttttccttttcatcctattgtatcctttgaatacaaaattcttagtccattgtcatttttgtagttttcaatatgttcttctagatgtatttcttttcttctaatggctttctgcaggttgaagtctgcgtcttcgtgtttgatattatgttagacaatggagaacagaatgagtcttttactcactatttatattttcatttgcatatatccaaatac

SEQ ID NO: 63145 - DNA, 452 bp, Arabidopsis thaliana landsberg
  unsure (1)..(452): unsure at all n locations
tcagttcaccggcgacatctatcagatcgatacaccttatctggattcacagagtaatggtttgtcgacattgatcgaccggttgcagaaccatgatctttacgcgcacattaccctggagaaaggtgaacgcagcgagctcgccaacctggcgaacgagctcctttagcctggccaagtctttagtctttagtctttagtctttagtccttagtcattaatcaatagtaatggggagattgtggcagaagcaattctnnnnnnnnnnnnnnnnnnnnnnnnnnnnnnnnnnnnnnnttactctcgctatcgaccgaacctgtgtcatttccggacatccggtcatgacgtccaaaaattatcgcgcccacaaatcggttttgataagcttaaaagccgattntgcatcgagtttcggtgtatgcttttgtatcattttagcaaagggcacg

SEQ ID NO: 63146 - DNA, 1165 bp, Arabidopsis thaliana landsberg
  unsure (1)..(1165): unsure at all n locations
ccactccacttcctaagcaaaagaagaactttccgataccgcttatcatctaactgctgactcattgccacagccctaaagatggccgccacagcatcaacaacaactaaagccatctccgcatctccatcctgaacctccggcaacaaccgggacttccgggaattgctatcagagcctcttagcttctccagaaccttaaacgcttcagtatacacattctcatacaaaccccaaacatcgagacaatgaatcatccttagcctctgagattgaacagtgtgaggcttacaagctaattgagcagagaccaattctaaacagtccaaacaaagttcataagcacggaacagatctaatgctgattcacgagcttccttatcagaattcgcgacggagagacgtttcggtaggagagagatcgatttgttgaggaaaggaaggaattgcttagctagggctcgaatcgtggttgctcggtcttgttttttccgggaagtggatagagtagagaaaggtttaaggtaatcggagaaggaagagaagacattatcgccgacgtcgatgagagagagaagacggaggtcgtcgccagaggacgccattgatttcgaaattttgagagttcccgctaattgaagatgcacattttctaggtcttacacagtttcagtcacttctaatttcaaaatctcattcgttgattcacactttacttgtagactgtagttaccatttgcagaatcgtagtgaagaatcctaaaccctctagagatgttctttcgcggtatccactgggctcgtgtatgattttaaaagcccattatgtttttgaaaaaggcccgtttttgtttaagcaggtttgcaccaaagaataatttagctactgcctaaaatcgaaccacaatgtaaaactaaccgaactaaaccgaatcaaaatccgaaaatggtaaaaaaaactgaaccaatgcggattgagattatatggttcacaaattaacaccaatcatttgtttttgtcaagagctttcattctccacttctctttctcaacanaatcagcatccaaaaacctcgacacaaactcccaaaccttagaaacatcctcaaaattcgtcataaaccctcctaacctaacagtcaccactgacaatctcaagctcat

SEQ ID NO: 63147 - DNA, 578 bp, Arabidopsis thaliana landsberg
tgtaatgcatgaaggagacgcgtctaataataataatagtaatgacgtcgatggtactgaacgtgttctatagcttttacgcgacggggctgatcctaattcttgttcacccaagttacgcaccttttttttccgttcgattttgttcaaaatcacaaaaatctcatatttttttgtgtattattaataaatagaagtggtaatacagcagtaatgcttgctgcacaagctggtaaaacaagtatcgttcggtgcttagttgcagctggtgctgacgtaaataaacccaataaacatgacgatactggtaatctctccccctcttcacaccacaccacaacactcaccaccacaacaacaacactcacaacactcacaacaacaacattaatgcagcattgatgtttgcgtgtatgggaggacatgcacaaacagtcgaaacattacttgcatttggagctaatccaacagctagtaatcaagaaggaatgactgcattaatgtgtgctgcatcatcttcaacaacaacaacaacaacatccacaacaacaacaacaacaacatcacgagcgatagta

SEQ ID NO: 63148 - DNA, 1777 bp, Arabidopsis thaliana landsberg
gtccaaattatggtgatcaaggcctgtttagctttggaatttttaatactgtaaaaactctgggagcaaggtttgattcttgggtgaggacaaaccccaagaatattttttttgtcatatgatcattgtaaccagggcacctgaaggttttattttggcattaataaatgcatctgaaaacctttcacgctctctttatggtttcttgaccttagctttgcgatccacactgctgtagtgatcctgctaattttctttgcgcgttttaagtaaacttttttctgattggatttgatgaatgtcgtattcttttagacatcttacttattaccatatgctcacaggtgagtgctgcattaccagctcttgcacaactcattcggttagacgacaaggaactcttggcttacacgtgttgggcgctggtgtatctttctgatggttcaaatgaaaaaatacaagccgtgattgaagccaatgtttgtgcgcgacttattggtctttcgatgtgagtgttcaggactttagctaaccaaaaaaatccagagtcatagattctgatggccgtttgctttctgaacagccaccgttcgcctgcagttatcactcccgctcttcgcaccattggaaatattgtaactggaaacgatagtcaaactcaggtaaatatgcggccagagataaaatttagtattagtatcgctttttaatataatccctgctctttttcctttttgcgctggatattctactgttactgttatctttgtcaactaaaaattctcagagtatttgattatttatcacaagtgagttctcagaacttttgttctttgtgattttcttagcatataattgatcttcaagcgctcccatgcttggtaaatcttctaaggggatcctataacaagaccatcaggaaagaagcttgttggacagtctctaatatcacagctggttgtcagtcacagattcaggttagccaatataccgtctctaaacttctctttttaatcgcagtctaattaagatgttgctctgaatatatgtctgcacttgtttattatctttccataggctgtgtttgatgctgatatatgtcctgcacttgttaatctgctccaaaactctgagggcgaccttaaaaaggaagctgcctgggctatctgcaacgccatagctggaggctcttacaagcaaatcatgtacgtagaacaaaactcaatacaaaaccaggaaccatatagaccatcaaatattcagtagtataaatgtagtcatgaaaagagttcaaacagcagaactaaatcttatgggtctcattccattgaagctattacaacttttcttggtagagttttcagcaggtcctttgatgcgatctgctaatgtcttgacaggtttctagtaaagcaagaatgcatcaaaccgttgtgcgatcttcttacatgctcagatactcaactcgtcatggtttgtttagaagcactcaaaaaaatattaaaggtgggagaagttttcagctcaagacacgctgaaggtatttaccaatgtcctcaaacaaatgtaaacccacatgctcagctaatagaagaggcagagggactggagaaaatcgagggcctgcaatctcatgagaacaatgacatctacgaaactgcggttaagattcttgaaacatactggatggaagaagaagaagaagatcaagaacaacaagacatgatatatttcccagttgacaactttgcaaacatgccgacatcggcagtaactc

SEQ ID NO: 63149 - DNA, 1493 bp, Arabidopsis thaliana landsberg
ggaggaaatctgcgtcgaagcctcctcgaccgccgcgtgttccgtctctagacgcggcggatcagaaacttaggggagggatcgctgaattggcgatgttgaaacgcgcgagaatcgaacgtatgagagctttgaagaaatcaagagcggctaaagctgcgtctgccgcttcttctttaggcaatgtattggccactcttttcaccgctattttcttctttgtcctcgttttccaaggtatgatttgattccacgattgcgtttgcgttttggtgattttaccagttttggttaaatcttatgtgtgtgtgttttattggattttttcaggattgtcaccgagagcagccggtagctccgggaaatctcacttagtagtcgccggcaaagccaatggtggttttgtttcggttcaatatgcgggaaatccgtcggcgagcgaaccggatggaggttataccggaccagttttagcacagagaccaaagtaagttgcttcactatctaatttcactaactggcgtaactgcttatctgaattaatctctaatccggtttgttgtacttacagtttactaaaaccggtgtccggtttggagaatgaaaagaagagttcacagtgaaagcgtaacgaaatggttaagaattggacagttccatactggtttgctcaaaccatttatcggtttagattgtcggtgagacatgtaccgataaactttttgggaaaatcggctgctttctctgcggctgtgaaacgataatattatccgatgtgggtaagaaagtagttttgtgtcagttttttcttgaataaactgagagaagtttacaaataataaaaatcagtgttatattattcaagttatcacgttactcttatctcttcttatatgtacaataatacaaactgagatctttttagtagattgttgcaaaactgtatccaaattttgacgaaattcaaagattcaaaaataaaatacgaaaccaacattattggtatatgatttttgtataattgaaatcacatgtgtaacgatggttgaagttgaaattgaaatttgaaatcaattatattaaaaataacaaatgtatatttgggaacagaatccatgtggatgtatctaaacagtccactgagctatagagagtagagaccacttttttaatgctgtgccaaaattaattgaacatgcgatttcacgtgtgtgtgtgtatgagtgtatttcaaacgtctattatttctgtttcgttgctgtctgcggatggatgcttcgtggcccctttaattaaggcccattaactcccaatctgtttagtctcactctattactccactcagcaagtgaacaaatacaattcgaaacttcgaatagtaacaacaattattgcagattagtttggtagtggattagacaatttagttttgaaggcggattagactgtttattgaggttatcctaagttatataatccaaatcacagtatac

SEQ ID NO: 63150 - DNA, 1268 bp, Arabidopsis thaliana landsberg
aaaaatgagatgcgtgtgtgtaaaataagataaatgtacactaaaaaataaaataaagataaatgtggaaggaaaaaagaagaggaagaagaagaagaagaggaagataacagatgagtgatgagagcttcttcttctctctctctctctctctttctttttctctgtttcgtatttattcgtttacacaaaattcgcttttgaataaaagtgctctgtacctaaagggtattttggggattttaaaagtgtgactgttggagtgcacaaaatcgaattttctttttaaagaaaaaacaaaatgttttgagtggtaacggtcgggaatctgggaccgccatttggagaattcggttgattaaccggtttgatacgacacttttggtcattaaaccggattgagacatgaaattaagggtagataaattgtcattttgatagagggaagatagtgactactcctaaaattcatatccaccagataaaggatacataaaatagtcaggtttgtaatttattcatacatttttattaaccgaacaaacaatggattttaatttatacaattttcatctatttatgttttgaaaggttgttattatttataaacaaaatagaaaatgacattttcacatatcgccaaactttgaagaaaaaatatcggaattagtagtataagagatcaactatcaaatctaacaaaaaaattataatgttttaccaaatgattttaaaattatgaaaattatagtaaaaatgattgaatccaaaaaaaaatacaaaaaatatttattcatacatagtgattacgatcaatacattttttgtagtggtgactttataaatgtgtcagtttggaatagtatccattgtttattctggtcaactttttctttagatagttgagattttggtatttaatattaatgagaaatatttatacacacacgtataactaaacaaaaatatgtgaatttacgaaaagacacgtacgggtatggggttgaggggtgtgtgtgtggctgaaatagactagagaagccttaaggatatgaaatgtccttaaagttgctctaaaagccaccttctctctatcatattctcgttgcctactctctgtcacttatggaattatgatgataagataagagctacagcttatcgtcagttggcgtatcacgagacgaccacccaaaaaagagcaaacacaagcaccaaagcgaacagaaattagaaatgagacgacacttgttgaaatatagtctata

SEQ ID NO: 63151 - DNA, 575 bp, Arabidopsis thaliana landsberg
  unsure (1)..(575): unsure at all n locations
nnnnnnnnnnnnnnnnnnnnnnnnnnnnnnnnnnnnnnnnnnnnnnnnnnnnnnnnnnnnnnnnnnnnnnnnnnnnnnnnnnnnnnnnnnnnnnnnnnnnnnnnnnnnnnnnnnnnnnnnnnnnnnnnnnnnnnnnnnnnnnnntttttcgtgtcttttttgtattgttttgtatttggtcttttgttttgtattttctcttttcctttttttttttcctttttttctttctttttttttcattttttatttctttttttcttttttcttctttcccttttttcctttcttctctttttttttttattctctttatcgtttttttctttttttctttttttcatttttctttttttccttcttcttcttcctcttttcttttttttcttttttttctttctttttttttttttctttttctttattttttttttttttttttctttctccttctttttcctatactttccctttttcctcttttttttctttttcttttcttcttttttctttttttttctctctactttcttatattttttgttttttttttccttcttttctttctttcctta

SEQ ID NO: 63152 - DNA, 256 bp, Arabidopsis thaliana landsberg
aagaaaaagaggagggagagaagggggaaaaaaagggaaaagaggagaggagagggaaaaaaaaaaaaagagggggaacgggggacaagggaagaaaaagggaaaagcagagggaagaagaagaaaggagagggagggagaaaaagaaaaaaagagaggagaaaaaggaaaaggaggaagaaaagacgcaagaacaaggaaaagaagggaagaggcggaaaaagggggaaaaaagggggaagaaagggggaggaag

SEQ ID NO: 63153 - DNA, 351 bp, Arabidopsis thaliana landsberg
  unsure (1)..(351): unsure at all n locations
tcctatcggaagttgtgattttagttaaggcaatgccccacaaaggttgagggctgggtctgtatctgacggatgctaatcatacgaatcacatttcgggatgaattttatctatcaaagatcctatacgggatcctctgatgaggtcccttatgctatcgacagccggagtgacaacaccggctcaccggatacacttttttacaccccgtctttttaccgaaaataaaggccacctggccacaaatgcccaattggctaccnnnnnnnnnnnnnnnnnnnnnnnnnnnnnnnnnnnnnncactatgtgcggactatgctcacttgccgcacatgcctgcactggatctg

SEQ ID NO: 63154 - DNA, 1378 bp, Arabidopsis thaliana landsberg
ggtggtgacgcggatgcggaagatggcggagaagacgaagaagctgagaggaggattcatcgtcagcgccaacgtggtggagaatcgcctcgggaacggagaagacgaactccgagtagagagagggatgattcgaagagtaatcgatcgggaagtagagagagaggaagtagtggtaacggtggtggaagtcgacgagtgagtagatctccgggaagaagatcggagataaaccctaattccagtggcaattctgtgaattcgagtaacaacaatagacctgggaaatttgtatctgttcctgcaacagataaagctttaagcaacaacaatggagatggatctgtgaaacggattactgttaagagaaacgttggaaaagcggcttctccgaggtctcagtcaccggcgagagctgcgagtcagccttctccgtcgaagcttagccggaaaacggagcattctccgtataggaggaatccactgagtgagattgatccaaactctgtagcgtttccactctctcaaggtgataaattgggttctggtaacaacataaggatgatgaatagagacaatgaaaatcaaggattggttaaagaatctggaactttcgtagctcaggtatttgaatctcctaatcaagtacttggtattgttggaatgaattggaataaggaggttttagtgtttgtgtatcgttgtagtgaatgtttataatgtttgtgtgttttcagaagttgaatcctgtgatgaatacaaagacggttacacaagcgccaatccgaagaaccgcgagcccgagtcgtgccatcaaggagcagcaagaggcagtggaagagtgtaagatagtggtttcatctggaactgagttggctaagccacaaattgtgagcaggagcagatctttgaggaaatctcgtgatttcgatttcagtcccgaagcattgctctcaaacaatatcgatatcaacaatgttaacagtaacaatgcaactgcaggatcaacgtttccgtcttatacagctttgcttttagaagatattcagagtttccagagaagagtgttaatgtcagtgcgttaagttcatctatgtccaaggcttgttccattgtcgaagcagttgcagatcttaactctgctacgaatcaacatcaaagaaccgaggtcagtttcacatccgctgcagcgaagaaagcggatttaatggagccgagtttcgagaagtatgtgactgttaagagaggtggttcttcgttggatgacatggaagagcaagaatcttcaggaagcaacagttttacgggaagtagttgcgtggtgcagcgacagggatactcatcgtcgtcttcatgggaaccgaattcagctgagtcg

SEQ ID NO: 63155 - DNA, 468 bp, Arabidopsis thaliana landsberg
aaaccggagtaccgtcggttggcgtagtgtaccagttaaatgttagtacccggaactgttgaggtcgcggtaaaggttgccgtttcgccggggtttaccccttgagcaggcggtaccacacttacatcaggtgccgggttgagagtaaccgcagctgaagctcttcccgtagaaacgttacctgtatttggatccttagcttcggtataataagtaatgttaccatttactggcggagtagtaaataccggcccggtaaagacagggctgccgccagttggcgttatataccagctaaaggttgtcccggcgtagttgacgtagcggtaaatgttgcgggttgacctgcattgacgctttgagcaggtggtgttacgctaatatccggattaccaccgcctgatgcagaattaacgaacactgaaccccgtgccctggtgggcgatgttacccctgcagcggatttag

SEQ ID NO: 63156 - DNA, 1383 bp, Arabidopsis thaliana landsberg
tcttatgccttggttacaatttggactagtatatacgatgaatcaaactagaaattatcgtccatagatcatttaatttcgtacatttagacgaaaaagggctaaagacaaatttattagtaccccaaatttttctcttacaaaatataaacatattacagcgatttaataactcgaaaattaataccttcagaatattagtaaaaatttagatatgaaaattagagtacattcatttgtcatcataacactttttgacgcatgcatgcttgtatctttattttcgcattattttatcataagatctctagtatcgtaagtactaccatattattaacaatgatcttttaccctctttcagaacaaagcttcaccaaaagctatccaacttattaaaaaaagaaaacactttgcttttgtaagagatgatatatattttagttgagtgtctattaatatctttcaattagcaaaagagaatccatttccacactctgtcacgaaaagagaaagttgtatctgactacgaagccaaatgaaaccaatctgaaccgaaaccagaattcggtttagaatgaggctgctagggccaggtcttgtatatttttagcaaaagcctgtgtggacttggacaaaccgtgtctaagtgaattttatatttcaaaatccttcaaatttggttcaaaatgttgaaaacgaattcttttgtagtaaagtcaaagtcaaatttcatgtatgtgtgtgtatacataaacataagatagtgagaccaaactagcacaagtcaaacaatgacatctcaaaaaccctatatatatgagtcattatcgaatttattacacatacaaaacaaaaacaaaaaaaactctacatttaccaataaaaaagctcaattttgtttttgtttctcattcgaaaaactaaaattctaaacatgatgaaaaaacaattggtggtcgtagttatgttagttgttatgttcgttgttttcttggacgctacgcaagttgaagccatgaggcctttcccagatcccgtagatgagatccggcttctgtttcaggcgttgcaaagaggaccggtccgtggttctggtcggaacggttgcactaatattcctcgcggttcaggcagatgccataactgagctgtcttacacgaatcttcttcttcttcatcttcatcattctttaattccatattttttttcctcacatttgtgtgttacgtacataattacatttacgtaattatacgatagctttagacttcgtctcatgtaattggattgtaatcaacggaaatttaattagtctattagcgtgtttgtactcaatacaaccatgttttttcactacccactccctggtcaagaaaaatgta

SEQ ID NO: 63157 - DNA, 1318 bp, Arabidopsis thaliana landsberg
ctcctttctactacaattacaagttattttctgattcttcaggattcacacaatacaaaaccttgattgaagtttatatgtacctaatggatgtccctggagggtacaagtccagaaccaacttcccccagggcgttggaggccttctgggacatgaggctgatcctccttcgacattaacaacaacgctctcactttttctggaagcatgttgtcttcgcttaaataataataaaagtataaacacaacagtgagacacagtaacgtagaactcacttccatcacttcgataagaatcaagtaatcaaactgtatttcttatcactgaattacaatcaagaaccctaactaccttggaaaactgttgtagagctctcctaactctcctatatccaaaaggcgtctctcactaaccaaacgatcaaaagattcttactttcctatccctcccctatattataatctattctagtgtcaatcacacttttttcatcaaacttcatagagtttttgccactacaagaacgaaagaacaattcttacattgaggtcgtagatgggtttctatacattgcactagcctcgcaaacatccctcattgcatcaacaacatacctaaaagacaaggaagaaggtcaagcacccattttttaggtttcagaatcaaaatgaaacacacatttaggcatagataggtagatatacccaggtgaagagccagaagttacaaaatactgcagaagcgttgcagaaaacagtaagatataacagcccatatacctatcagagaaagaatcacagagtaatcaacattaagctcaaggatacagtaattgaataagcagagagagataaggagtaataaccatggatctcgtttagttttctcaataaattcagcatcgaaaaggaagagaaagccgataaagacgaggtggagagctactagtgccaatttcagaagcagagaagatcttcgaactgggtagatgaagaagatagcaattagatacagaatcataagaacctaatgaaacaccggatcgtgagatagattagggtaaaaagagaggaaattggtaccaggatcggagagacaagggaggttgaggagacattgatcacgagctcgatcccagggttgaaggaaagggcaacaaacgcccatgttttggtttgactctctctctttctctcaagcaaacattgggattggagaagaagaagagacagtgacagaatcgggtaataagccaaaaagaagatcttcaaaatttaatctttgaagatagtttaggagatgccgagagagagagc

SEQ ID NO: 63158 - DNA, 516 bp, Arabidopsis thaliana landsberg
gaagatttgctaaaggagaaatgttaggctgatgatgttttggatgatgatgatgatgatgacgatgtaaaggaggttgattttttggtaaaatcaccaaaagaagattgtttggaggttaaggaagaagatgttggtgctgcagattcaagaaaggatgatggtgctgtcgacttgaaagaagacaagtatgtggaagaacatatgctcgaactgaatctcgggcaagagacagtgtcagaaatggtctctggggaagagcgaggtcctgttgagggacagccctggatgttgaggaaaataagaagaagaggatgaaaggtgggcatggaatggagactctcatgctggttctcatttccttcgccgttgcaatcatagtagtgccagggagggagacgaagataatcatatagaaggatccatggaaatgggagaagatgaaccaattgaagatgtcgaggaagaggaaactgaggaagatacagaaaagcatgaagggggggttcctttttt

SEQ ID NO: 63159 - DNA, 628 bp, Arabidopsis thaliana landsberg
aacgttcgatgtcgtctatcactattctatccacattgttattcccaattggttcaaaaaactgagctctaaaaactggggagcgtgccgcgagaatcagtttgtgagctttgtatgtttcatctccgacttggaaagctatgtcacaaccaacttcagaatctaacaagtctttcaatccctgacccatattcgacaggggtagcacaatgccatactgttttggaccctcgagtcgggctctaacaacgccaacagtacaattgatgacaagacaatcatcctttaagtagtcagaggtttctaaagctgatcgtttgaaaaagcgtttgtaacccctgaaatttgtgatgataagtcatgatagagaaaacaccaacttccagaaggaaacctcactttcaaggaaatgagtcaatatatgaaatcaacagatgatgcaagagttcaaaaaaagattcacgaaacttcaaaagcaacatgcacacaccttaaacctctcaagggattcaaaagccatactttaaagaaagagaaagaacaatatgaaccatacaattaaaaaaacttgtgctttacacaattttagccgtaagcaaacaaaagcacaaacacattgataaagttc

SEQ ID NO: 63160 - DNA, 666 bp, Arabidopsis thaliana landsberg
aaatacaccctgatgccaagagcctctatatctcgctactaatctcgttgcctattctcctttttcatactttacatttgatccttgctctgtattttgcaggtcctaataagcgagaaccctaagtcattctcgcacttcatcacaaatgtttgcgccataataggaggtgtttttacggtatagtatttgtctcacagcctacctttgttttattctctgttgaattccttcatgagaaagtaagatttttgcttgttggatttcaggtcgcgggaatactagattctatatttcaaaacacagctagaatggtgaaaaagatcgaactcgggaaaaacatttgatcaggaataagtgaggttagatgttagtttttccaattttttaagatctacaaaaccataaagagacacctcaatttcttatataacttgtcgaccttggttattttcgaatagccgcttgcaagagagaatagagaaacaatcttctttgcagcgtcttgacttgttcttgattctttgcctgtaatataaccgcaatgttttggttactctctattttataaatcatagctcttgtagatatatgaattgcgtatataatttaaattagaaataggcatgcacaacacacacatacgccaatttaccaactgagctg

SEQ ID NO: 63161 - DNA, 1879 bp, Arabidopsis thaliana landsberg
ttgtaaggctatcttagaaaccagtggctaaacctaaccctaacccaagtccatttttggttcagaactcgaacatctcctttgaaaatatgtgtttcatggaggagaaacaccaagtgagcaacaacaacaacaaccagtttgggatgacaaactccgttgatgctggatgtaatgggtatcagtatttcagctctgaccagggtagtaattctttcgattgttcggagtttggttggagcgatcaagctccgataactcccgacatctcttctgcggttatcaacaacaacaactcagctctgttctttgaggaagccaatccagctaagaagctcaagtctatggatttcgagacaccttacaacaacactgaatgggacgcttcactggatttcctcaacgaagatgctgtaacgactcaggacaatggtgcaaaccctatggacctatggagtattgatgaaattcattccatgattggaggagtcttctgaagagatccagtttcatgtaaataaggctgcatgtttgtgagtttcccgcatcgttcgtttatcaacctccaaaactttctaatgtctgttacttgcatcttcttctgctgtctctgtctgtctctctcaggagttcctgtttgcattgcgagaagccatgagcctctatcttgagggtagttgtgatgaagctaagttgaggcttatttttaggggttgcggtcgtttttgttttagtgaatattttgaattcgtttgtgttttgtttttgttactttatgccccaaaactccttttacatttgtcattttgtgtttgaacctctcatctgtttaatcaaataaatcttctttgtatgctactaagagtatgtgagaactgttgaacataacaaagaagtcacaagctaagtttgaaccaaaccggacgaaaccggttctcgtaaatttgtgatcagaaaaaaagcggtgatcaactgatcatcaaagtgattgcctagagaagtgcgccacttttgttattttgtggtacaatgaatctagagggaacaaacgttgaaacgacgacgttaaacgacagaagaatctctaaaggttgaactctctttttgcaagtggtaactggtgagtttgtgtctttctcgtgaccgtttccttatgacaacagaaaataaaagagagtaaattaactcttctggacagttctgcttctttaggtcattttcactctgtataaatatctaagcattagcacacattctttattttttactgaaacatatttatatgtatttggtaatttaatctactgatttttcatataaattgttgttagttaccgtattactgtcaaaatgtagcccaaaatgtaagtgtcaaggtgctttgagttgtgtgatgacaagtttgacataacatttggtttctcctattattgtgaagaaatgaaattatcttatggtgatacttgcattaatatttactaatcaaaccatttgacttcttttcaaaagtctttgtatataagtgtggacacacattttatatcataaataaatacatagtcttgtcgacatgtctataagttagatataaaaagcaaatgatttggtctatataacacacacatcacgagtctttagaattttgtggtgaatgagagagtcaactttaatggagaaagtcacaaggagaactatctcctccttcatcttctttatcgtctcttctaccattctctttctcgccggaaaatcctcagccaaaatttctcataacggtgacaataatgtgacggccttgttcctctttggagactctttaatggaagcaggaaacaataattacataaataccactacacttgaccaagccgatttccac

SEQ ID NO: 63162 - DNA, 940 bp, Arabidopsis thaliana landsberg
ttgaatagccctagctacatgattgtccgaccgagaactgcaagaaaagatccgactctattgactaagtaactgacctaatcctctaattgttgctgtgatttcttttctttttttctattgtcagccccctcattctcagttttcttaattgtttattgttttagagaagagactgagatgcccaaagtttgggcacagatttgtctccagagaatggttgacctggctaaagaaagcacaactctgcggcaaatcttggatcctatgttcagctattttaattctagacgccaatggactcccccaaatggcctggccatgatagttctgtctgatgcagtatacttgatggaaacctctggtatgtcttgtcttttttgttagagtattgctttttgtctgtacgtttactcatagttatgtttctttatatattagggagtcagcagttggtgttgtcgactgttgtacgccatctggacaataagcatgttgccaatgaccctgagctcaaggcttatatcatacaagttgctggttgtctagcaaagctgatcaggaccagctcgtatcttagggacataagttttgttaatgacttgtgtcgccacctgaggaaaagctttcaggcgacagctagatcaattggagatgaggaactcaacttgaacgtgatgattcaaaactctattgaagattgtctgcgggagatagccaaaggaattgttaatacacagcccctgttcgatatgatggctgtttcagtcgagggtcttccttcttcaggaattgtttcacgcgcagccgttggatcactgttgatacttgcacatgcaatgtcttcagcattatcgccatctatgcgttcacaacaggtgaactaaagtttgtttggtctcttctgagtgtttagcattatctataaagtttatttaat

SEQ ID NO: 63163 - DNA, 1820 bp, Arabidopsis thaliana landsberg
  unsure (1)..(1820): unsure at all n locations
ttaatcacattgaaacttctctgtttttcaaggaatgaaccagtataagccaatatttttgggtacggccgatccaaatactgagcttagcaagctatctcgggcatgtaacacccaaaagtgtattcgtgctggtggaaagcataatgatttggatgatgtcggcaaagatacgtaccatcacaccttctttgaaatgcttggtaactggtcctttggagattatttcaagaaggaagctatcgaatgggcttgggagctcttaaccaaggtaattaaatacctgggaaatttgtctctgtttacttgatttaagaaaaatatacatggtattattcagtaaactattgtctccctcccttgggacggtatgtctcaattttgtaaagtgattcttctcttttcatttggttgtacatttcagttttgtaaagtgattcttctcttttcatttggttgtacatttcagttagataccttgtgacagtatttcataattttgtaaagttactattctcttttcgttgaggttgtttatttcattgaggttgatacctccctgttttcatgcctcaggtctatgggctaccgactgatcgaatctacgctacatattttggcggtgatgagaaagctggccttcaacctgataatgaggctagggatatatggttgaaggttcttccatctggacgtgtgctgccatttggttgcaaagtatgtattgattatttaagataataacttttaatctgttacctaatttttttgaatccactactcattgatttcctctctcctgaggttacttcacaagtacttcagctaagttgcctttgtattgtcaccattgtttcttgtatatattgacacatctgtttgtcaatgctaacgacaaccaactgtaagcttgaatgcattttggctaggaatacgctatcatgtttggtagttggcaggctttaaaaaccattgtttatgatttacagtcaaaatcttgtacaaaatgtaaaacttaagggtttttaaatgctgtttttctttcatttaacttttgattaaactgcaggacaatttctgggaaatgggcgacacaggtccgtgtggaccttgtactgaaatacattatgatcgcattggtaaccgtgatgctgcatccttagttaacaatgacgatccaacatgtttagaaatatggaatcttgtctttattcaggtacaaaccctctctgtcccaattgttatttagttccattttactaatctttatctcaatatcacaattgttttaatgattttgtagattgtgttactgaaaactctatattgtgcagttagctagattgttattgctcctttagctgtgctatcatattcccaattgtttcctctgactgggatgttacttatgtcttcaaaatagttcaaccgagaaagtgatggctcgctaaaacctctgcctgccaagcatgttgataccgggatgggcttcgagaggttgacttctgttcttcaaaacaaaatgagcaactatgatacagatgtgttcatgcctatctttgatgacatccaaaaggtaatttgtgaaaacttctgttgatggtttcatgacagctgtttaatgatggtttcattgagttatttttgtttggcctcctcttagggacgcatttgtcaccttaattagtactatcatcattntagttcttcatttttgaagtggatcatgggttctatgctttacgtcgagactccgtcaattggttttgaatatctctggtttattgaaattgggattcatgataaggcattctactatg

SEQ ID NO: 63164 - DNA, 720 bp, Arabidopsis thaliana landsberg
aacactgctataaaagctgagtgaaaaccataaaaactgtagataaaagaaaagatggaaacaatcctaacactcaaacaataaactctatcgcagagtttttgatcttaagttcttaacaacaataaagcaacagataaaacgacgtcttagaaaacaaaagtacatgcgtaatttattgcttgtgattgacacctgcaactagaacagaattaagtatcataaagtacggctaatgtgtatttagtcttggaaaagtagttactacaaaccacgataaaatatttgtttggattagaatggtcttgttcgtaatggtagacatttttaaagagttcgtttcgtacattctgttttttcgtttggacttctgaaccgtcagattaattcaagttataatatgaatcatcgacaaaaaatgacatgggtcggtgaattcctgtagaatatctttcgactaacactgtagcatttgcaataattgagttcaaactgttgcatgcataaatatgtatgagtgggtccaaaacgacaaccatacgcgcgtttcgttgactaccttgtatactctcttaggaagaaaatcaaaaatctttatggtcatgttctacatttccagatgtctcatggaccactattattttgcatttaaatcatcttattgctccaatgtttttccctatcaataagccttttttttctttcgtggacacataaaat

SEQ ID NO: 63165 - DNA, 1428 bp, Arabidopsis thaliana landsberg
aaaccttaagcaaaagcgatattaaaatttatcaaaattttagactctgttttaatatttttattcctgaagggactaaaaagggtatgactgatcaaacgtatataattgtataacgtttgttgacaaaaacttgttcgtcaaatttttcttctatattttaaataaagctaaaacgagtccatattttattcccgcaaagctttttgatttcctcgaccaaaataaatgcatgtcctacctaaaaaactataagtacatctcctaatacgaagaatataattttatcatgatttgtcatttggttataatttatccattatttagattaggtaaccgaaaactttgcctttatttgaaaagttaatacagaaactcataaaaggcaaatacaagatgcttctccatatatcaaaccttatttaatttctagtataccaaaagaagtcaaaagaaaacgaaatttactccatcactcgatgatttcacgcgtgctactactttgatagttggtcactacaataagcaatgagcatttctcaattctcatactctctttaggaatataatcgtaacaaaaaaacatcaaatgaattattcaaaatttatttcccaaaagaaaaagattttgatatctaaccaaatttaaatccggcccacacaacatgatactttgacaccaaatgttgagggtttctcttatctcttggctctaaacctaattccaacccaaaaaaaaacatatgaaatagtacaatacaaatatcaaggggtcttaaagatatttccaaaatataagtaagaggaaatgaaaattagctgtatacaatataatatattgtccataatttttttatatatataatatggtattaccttatgtcaattagttataattatacattacaattgataaacatgcaatgatttgtgggttttagtttaaataattttcaaacattattatgtaacttatatttaactattatgaattttttttatcttttcggatgtcatctatcttagtactagatcaaaataatttaccataaaatctgtagaaagattttttaatttttttggtaaggtgaagaaaaaatcatttgtttatagaaatggataatatttttatataacaattggaaaaaaacctcaaaaataaaaatattagaaactcctagagtttggatactttcttcattctctttctttctcctttacgccactctccatcaaaacccatctctcttctctttctctctcgagtttatcaacaatggcgactctacaagacataggagtctcagctctcatcaacctcttcggggctttcttatttcttatagcattcgctgtcttaagaatccaacccatcaacgacagagtttacttccccaaatggtatctcaccggagaaagaaaacagtc

SEQ ID NO: 63166 - DNA, 1390 bp, Arabidopsis thaliana landsberg
ggaaaggtcatttaagtttaatcatggccacctttgctagtcgggggaccagatattgattcttatccttatcgagtggaaactaacatatcaaacaattgaaaagaaattatgctgtcactagtatagttgttgaaatttggctgtctagtaaattgctttaccttttcatactaatctggttctctatgtaacttactagaaatttgaactgtcacctggctccaaaaatagtttcatctgtcttcatcgaaccttgcttttacaccttcttagttcttgtaggacacaatatgacattgaaatgtttatctacctgcagctttaaggactctgttctatcattcaccgagcatgacgactatacggtaccaggcatcccttttactttgttttagtgatccgtatttttggaccttgaacagatgagtatctaggtttggcttttaatttccaattattttcatgtgtatgcaggttcataatattgcgcggagcttccgagacagatggatacctaagcattttagaaaaccttggcgcatcaacagggaggagagatcggagtctatgaggtcacctataaacagaaggttcagagcatcacaagaacctcgatatgatcatcagtccccaagacctgcagaaccagctgcgtctgtcacatcatcaaaggctgcaactcctgaaacagcatctgtatctgagggatattcagaacctaattccggtcttcctgagacaaatggacgcaagcgcaaaagcagatgggaccagccgtctaagacaaaagaacaaagaatcatgactatcttgtcccaacaaacagatgaaactaatggaaatcaggatgtccaagatgaccttccacccgggttttcatcaccctgcacagatgtgcctgatgcaattacggcgcagccgcaacaaaagttcctttctcgcttaccagtttcctatgggattccacttagcattgttcatcaatttggttcacctggcaaagaggacccgaccacctggtctgttgctcctggcatgccgttctatccatttccacctctaccgccagtgtctcatggtgagttttttgctaagagaaacgtaagagcctgttcctcgtccatgggaaacctgacttactccaatgagatcttaccagctacacctgtgactgactcgaccgctccaacccgtaagagagagttgttttcatctgatatagggacaacttactttcggcaacagaaacagagtgttcctccatggttgcggaacaatgggggggagaaaacagcaaacagccctatacctggaaatctaactttagagaagaagctcaacagttaagtattcttaattttagagaagtacagtcgatgaagttgaa

SEQ ID NO: 63167 - DNA, 324 bp, Arabidopsis thaliana landsberg
acgtaaagaaaatgaaatattcaaacttgattatacaattaatactccctgtcacaatcaaacgtgttaagcacttcaccgatgtaaatcatttcgtataatatgaaacatggacttcttccctaccctggaacatggtgttgaaagagatgatccacaattataacatagccaaaaagaaaagcttgttcacatgatgacaatcgggaagagtccgatcttgctacatcatcatgttatcttcctattgttgcttgttctccaagtcagtggccagcatcagcctagaaccactgctccaccgtatattgcccaaagaccaaa

SEQ ID NO: 63168 - DNA, 1076 bp, Arabidopsis thaliana landsberg
tagtttcatcgtagatattttatttttcctaagtccttggctttaaactattttattaacattttaatttcaatcacatagatactgttgttaattagcgattgactaacaaaaatattacaagaatatacgaatttttttttcctcgccgcatggtgtaacttatcaaagattgaatagctatagctagtccttgcttatcaagaatcaatactattatgaaaattcatgtatatgcaaacagggcaatagaaaatcaccagcttaaattcgacaaaagcaatgcgggtttggtggtaaaagtctccaagcaacctcagatggcgaacctaaaacgaaatgaaaagatggtgtaaaatgacaaaacacaacatctttataagtataaacaatcagcgacagtcaaaaccaaatctatacctccccacaaactgttttaaagaaattttccaactccatcttagtgacctgcaattaaaaaccaaaaaattagatggataaaaaagttaaatttcaacagtgtctaacaaatgacataataagtgacctccttgtcaatgttggtacaataaacagtctttccacacttctctagctcgtccttggactaaaggaagaaaacaacgttatgcatatatataccacgttattgataagaacaagattgattcaaaattatctagtcaagcctagctaagattggtttagacatgattatctcaacttacctgtggaaggaaagacgggttaacaggcgcaatagctgttttggacataaaaaccctaataggatgagaaccaaacatagtacccgattttcgtaaagcagacctagctccctctgagacatcacttcactgattaattaaaaaaaacagcaagaacatttcaactcataagaaaattggcgcataattgagtacctgcatcggtgaactcaatgaaggcgaaacgaagaatggacttatagtcaccgcacatacgacaatcaacaacctttaaccccaaaaaaaatggcaagaaaacttatgagaaatgagtttgcataaaatcaaaacaaagatcattaagtaagt

SEQ ID NO: 63169 - DNA, 516 bp, Arabidopsis thaliana landsberg
aacgggtttaagctgtagaacaaagggcttgcttggttctctgttcctgacacaggagtctataatgctgggtggcctgaagctgagaggacgtatcctcaacagcaaaacccaagcaaaagagaactgaaagtggggcgaggctacaaaatatcaacacatttcaagtaccttgtatctttcagcaagaccatattctcctaaaggttctataacctccccaaataccaccatcagctggatattaggtgttcagatacctgcccctatggcgacatttctcattcaaatcaccaccctcttagaatcccaggaacaaccaatgcagctaacaccttaatttcaaactctagcatctagaatcacgtgaaaatgtatttctgtcaactaagcttattggtttgtgatatcttgctgtaatggcctcagcaaactaatggagctgtgtcataaagagcaagccttgtgacagatattcccttgggcaccacctatgaaagtgcggcgccctcagta

SEQ ID NO: 63170 - DNA, 731 bp, Arabidopsis thaliana landsberg
ataacgtacatgttcaattaatcgatataaatttaaatttgaaaattgagacgctcctaaaaccttctatattttaaattgttctatgtaaagctatatcttttgttaaactcttaaaagaccctcatatttacttttaacttaacaatttaggataggattcgaaacatgtatacaattaggtttaaccgatggtgatttgaaaattgttcaagactctttaaatctgtgtagacaacatcagagtctatgaaaaaaacaatttaaagaacaactacaacagtcatctaacaaatacaacagagatgtagaaaatcttcctacaaatgttcccaaactaaacaaacagaccaaacccccgtaccaacaaaaccagacaataacaacaagtagaaaaagacgtaaatacccttaaaagccataaaatatttcacatgagggatttcaaagacctttcctttacgggcttccttcctttcttcatcgtcttcttcatcattatcatcttctcattctttttcttcctcccatgatcacttccttgatcttgttccattacgtcataatcctcatccacaagatcaaactcgtcgaaactcacactcccacctgcaaacgccgccgttttatgaccgtcttcgtcactactgctactagcgctacttctactctttttactatcgtttataaccatcttctcgtcgtcggagccgcctttttttctcccccac

SEQ ID NO: 63171 - DNA, 561 bp, Arabidopsis thaliana landsberg
tggcccgggcggacgacccggcgaccatcgtctacaccagcggcacgacgggccgccccagggctgcgtcctcacccaccgcagcttcttcgccgagtgcgggaacgtggtggagcggctgcgcccgctgttccgcaccggtgagtgctcggtgctgctgttcctgcccctcgcccacgtcttcgggcggctggtgcaggtggcgccgatgatggcgccgatcaagctgggctgtctccccgacatcaagaacctcaccgacgaactggcctcgttccggcccacgctgatcctcggtgtgccgcgcgtcttcgagaaggtctacaactcggcgcgcgccaaggcacaggccgagggcaaggggaagatcttcgaccgggcggccgacacggcgatcgcctacagccgggcgctggacagcgcttcagggccctccctcgggctgcgcatccggcacgcggtcttcgacaagctggtctaccgcaagctgcgggcggtgctcggcgggcgcggcgagtacgccatctccggcggcgccccgctgggcgagcggctcggcca

SEQ ID NO: 63172 - DNA, 658 bp, Arabidopsis thaliana landsberg
ccttgcggaacgcttcgtccttgctgtcgatgcgcgcgatattcaatttgtccgcgcactcccgcagcgcctcctccacccgctcatcggcgggatggggttgggagagggcggctactagatcggaacagcggtcctgccaatgcgcttccgctgcggatttcccgtcttcaagaccgtcgcaagacgcttcgtcctcgtcgtaatattcgtcaaagcaataccgccattgccagcaaccatcacgacgctcgacggtgtaacttccgaacggggttccggctgtgtgcgtctcgtcgccgtcttcgtccggctccattgtcatcgaccattccagcggcttcactgccaccgcctgcccgcctgcgcctatggcggcgatgagggctgcgcgaaacgctgttatttcccattccttcaacgggcgttcgaaatgggcttccaataccgcaagggcgggggcttctgccccctgcgacggattggcagtgactttcccgtcaccatcgcaatcggggcaggtggcggttgatttctcgtcgtcatcgccgggcaggtaagtatcccaattggtgacgatttcgccattgccttggcaggcctggcacatttccgtcacctgcgccggattggcgggcgctacctgtgatgatggatg

SEQ ID NO: 63173 - DNA, 607 bp, Arabidopsis thaliana landsberg
tcccactttaatatcatgtcttcagtactaaaatactaatgaggtaatctaattcgtatattggcttcccattttttttctatatgagttattccatttgaatacagaatatattcttacttttagaggaagtaaaattttgaaactactcaaatcctattctatatatgtacaaacacattttttttctgccgatgacttagatagacacaaagctaagaatttcatattgtaaaaaaagttaacacgtaaatatgttccacatatccgaaaggaatttaaataagtagtggttcagtgttattaagtcagacatttttaggagacgttcaataatataacatactttcccaagagctgcatgtttccatcgagcataataaaaccatccctaaacaacttaaattatgcattaaaaaaaaaaaaacggatagtgtttgttgaattgtcacattaaaatatcttttaattaagtattgattgttatctatgatctacttatgtaatgtgaataacacttcctacaaatctctccagattccttcattactggaaacaaaagccttgaaatactgtaaataatatgacttggtacctgaaaaatgct

SEQ ID NO: 63174 - DNA, 1183 bp, Arabidopsis thaliana landsberg
gctattattataaagcactgctagtcccttaagaattgaacagcatatttcgaaagaaattcattgcttttggagtaacactacttcaaaactgaaatatggacttgcgtaaagaagaaagtctgtaaagctcagctagaggataccatttatggaaccaagccttgttctttagcttttttcaaccatttcaaggtagtttcaagtgtagagtacgcagaagcatctgacaaactcttgctatcaactgcataatcaaacacttcataagcctctgcgaccttaccacttttaaccagagacctcacaagtgtagcataaccattactctcaagctttacaccacttgatttcatcatttcatataactccatccctttatccattaaccttgccttacacaatccatgaagcaaagtattataagtacaatcatttggagcacaccctcttgcttccatttcttctaacaaactcaacgcacctaaagactcgccttttctacacattccattcatcagcgacgtgtaagtcgcagtatccggctcataccccgcatcaaccatagttttcaaatacatcctagcttcctcaactctaccagctttcgacagtccaaatatcaaagtattgtaagtaatctgatctggctcaacaccttcttccttcattttcttatacacaccaaccgcctcactccctttactcagtgtgcaaaaacctttcataatcgtgttatagaggaaacaatccggcttaaacccagcattacctaacttactaactagatacattgcctccctcaagttcttagagttacaaacattatcaatcaagatagtgaagctaacaagatccggcttaacatcgaaatcatctctcatctcatcaacaaactcataaacaacatgaagatctttgcatttgcacaaatgcttcagtagaaagttataagtatatgtatccggaggagagtgtttctcagtgagctccttcatcaaatccttagcttcatcaacccgacccgtttgcaaagagacctcaccgcgatatcggtagttacttgatcaggctctaaaccattattaaccatgagattaagaactctatgaacattcgaaatcgacgaatcaggagctctacaagcatgtgaaagcaagataaggaacgttgaacgtcccgg

SEQ ID NO: 63175 - DNA, 583 bp, Arabidopsis thaliana landsberg
cgctgttcgcgcaggcgaacgcgagctgggtgcgcggcaagatccactcagggttcggcgggcagaccgactttgtggtcggcgcgttgcactcccccggcggccaggcgatcatcgcgctgccgtcctggcacccgaaggccgacgtgtccacggtagtgccgtggctggacgggccggtgacgtcgttccagcacagctacatcgtcagcgaccagggcacggcgccggtctggggccaggacacttccggccaggcggccggcatcattgaaaacgtggcacacccgtcggttcgtgaacaactgcgactggcgggtcatgacctgggactgcgtgtctaggcgagcgctaggcgagcgtgccggcgccagcaccgctgtcggcgccggcggcgggcacccgccactccagccgggttcccggtggcgccgcgttcgggctggccggctcgatcagcagctgaccgccgagtttctcggcgcggacggcgagattacgcaggccgctgcgagagacatcggccgggatccccgttccgttgtccgtgaccgtaacgctgagcatgcccgtcgcatacacg

SEQ ID NO: 63176 - DNA, 380 bp, Arabidopsis thaliana landsberg
aatatttaagtcatgtaatcttcttgtctttttaagattttgcttctaaaccatttaaacagctaattatcataaaaatcagctacttaactagctagtaagtagtaactacgctctgctatttaactacattccgctagttttaatcctcagaatatagaagaatctttttttgagaagaggggggcttaaagaaacattaaacgatcgattttctgttaacaaattggtcaaaatagtgtgtacgtggttgtggcttgtggctggcttgtggctgaaccagtaaaaacatttcgaataaaacacatttcatcacaaaaattaatatttttggcggctatttgcttaccaaagtctgattgggcgaaagaaagtttgga

SEQ ID NO: 63177 - DNA, 510 bp, Arabidopsis thaliana landsberg
  unsure (1)..(510): unsure at all n locations
gatcctttgctaccaggtctgttgccagtacatgccgaattcctccttttgtttcactgcccaatgttaccaggccggggcctcttcttgcgaggcttttccgtatgacaatatattctgtaggcctgtttacacgcaggccatcccagtcgcgccctgccttgaggcagaagttatcatcattgcagtcgatatcgcagttctcgaccaatgtccatgaggaagannnnnnnnnnnnnnnnnnnnnnnnnnggccatggccgtcttcattgttcctgatcacaagtccatctaccgtgaggtgatcggagtacagcaactgcactgtccagaagcctgcgtttttgaaagtcacatgctgcagggtaatgtctgatgaatgctgcaccagcagtgtgcgtacgcgtttggatcataatccacgatccatcgcaatgcttttgcatcatatttccctgcgcatggaccaatatttattccaacagaattttcccgcgcattcacaacgcc

SEQ ID NO: 63178 - DNA, 126 bp, Arabidopsis thaliana landsberg
acacatccacatacacagtgaaaataagcggccacacaccgccgcctaacagtgttaaacacttaccaaacacgcgcccaaccgggagcgcaagaaccgacgaccacgaagagcccgccagaccca

SEQ ID NO: 63179 - DNA, 181 bp, Arabidopsis thaliana landsberg
gagagagagagagagagagagagagagtttgagagagagggagagcgagagagagagagagagagagagacctgttcgtagcattcaactgcaagtcgggggcatttccatcttcgcgtaggtggagattgagtcctttgcatcttgaaacagattggggcaattagtgaacaagaaaggg

SEQ ID NO: 63180 - DNA, 1277 bp, Arabidopsis thaliana landsberg
atctgtacaaaaacactcaaactcttttctcagtgttttgagtttaaagagagacttattctcttcccctttcgtaacacttatttgtctcccaaccaaacagtttctgtcctttcccttgtcctcccacgtgcatctttatatctcatgacttttcgtttctagatcttgaataatgtcttagtggattaggtttgttgtcggtaaattaggtgaccgtttttttcttatatttggaagatcgcgggatgaagcagatactgagtttcagggcatacacacctaatttgaaaatcattgttagtccaatttcactttaatcttgtttacaaaaaaattgatctgaaaatgttgatgggataagtaaaaatgtaagttttgctagtagtcatgatataataatagcaaaaccagatcaattttgagcaaaaggaagaaacaaaaaacagatcgatcccacgagcaagactaagtgtaaagtggttcccacaagagccatatggatatggtccttcaacttttaaagcccattacttcagtggtcgacccgacattacgccacgagtagtcacgcacgcacgactccgttcacgtgacattcacgttgatatttccccctctactctcttctgcttggttgatctaaaaaacatgaagagaccaacctaatttcatattaatatatgatatagacttcatactcaacagtcactttcgtaatccaaatccatatcttacgaaattagttcttaataaaggttgtggattaagttataatattgtgttaagagttaagacacagcatataaccttgtaccaacagtgctttattcttaaatggaaacaaaacatatgtcaatgtcaagcatacagctaaaatatcattatctaatattaagagtaaaacaagataattaaaaattgaaacaacaccatatttttatagctttacttatcgtatttttctagtcttcatggtaattgtgttgctttattttgtttataaatgaatttggttcgaccagatagtctaatatcagtttttaaacactggttttaataaaatcatatgtcggcaattcaacctgttacgttgtatgattgtatcctagtcaaataggggaggaggtactagtcgtttcaattagtttacgtaatcaatccaaagaaactataagctataaagatcctcaatttgttggttacaataaaaacaacagttgtcaaaatttatgtttataaaaagtaataactatgttccttcccatatagagcaa

SEQ ID NO: 63181 - DNA, 1660 bp, Arabidopsis thaliana landsberg
actggatcactttcaaagaatctgttgtttcaatttctgaagaaatttgtgttcgtacgtttgaactgcagaagcagtttggagtttaatgcaagaagtgtaaggaagtgaggcatggggttgcattaatgatcactttgagtttcttcctgtctcttactgttttctatctcagaaattgatattaggaatgtgaataacaaaacaaacgaatgaaataccatgcaaactctaatatggatgtagtaacagaaaatctgtattgctctactaattaaattttttaatttagtaatatgaattcagagtctattagtataaacctaaagtaaacagaaatttttggagtgcgcttcaaatacccttgtaaacttacagatgactttgtatggcaactttttaaaattgctaaaataatttcttataataaatattgaatatttttaattaattcagtacccactctataaatctatataactagtctctctctttttttttttttttgggcacatataactagtctctctatcagttattttcatatggattttggatttttttgtacatatatgaaaaaacacaaatgataaaattatttaatggtattaagcattcgccacagggtatgctatcaatttggtcatttgtgagtgagattgatatggtttggggctaattcagtgaagctccttcggactctcaaagtggtttattagacagtgtgaatgcatgcggtcttctatttgtttgcgaggctaaaagaaacgctcatgatacacaactaatcaaatgactgttgaagaaatttaagatttccaaaattgtcttcttctatttgttattgaagtattggtcaatccatcagtgatttaacgttatagcaatataggctactcgtcgactagcacattttgacgtacttaaatactaaccttgtcactctttttttaatactgtaataatgccttttgaatttccattggtgatatacacattttcccactagatgacactaaagggaactaacccctaaaacagtttttattttatcataattgaaccatgacaagcaaaactggattcaaatctaaaatgtcaaagtgctcctcataatctatatataagcgatcaaagaccttctatagaattaataaatttactttttaatgcaattttttttgttcaaaactatttaatgcaagtatgcaactaaatcatactgtttgactgaagtagttaataataaaacgtaatgaaaacagtgttcctattttcttttataacatttctgttaataggatttagcctacttctctaattcatttgattccctaaacaagagaagtagtgatagttttttttgtctttactaaacatatacacataatgatatagatacacatctatacatcatagatagatacatagatatagagagaaagagaaatggtgtatagaaatatgggtgagactttaaattaaatttatgtaaaagagatgaatgaatatatgaaaacaggttgggtaggtgaagagaggctataagagggagagaaagaggtcgtaacccttttgccctattcacatttttatttatctttccatttagccattctgttccctgtctcttcctcctttctttttgacacatcacatt

SEQ ID NO: 63182 - DNA, 1375 bp, Arabidopsis thaliana landsberg
catgataaaattcgccttcggaaaccatcttgtttcgattcctccaaaccttatggcttgagaattactaatcttgtgatatagtatttacaatacatgacataccatttgagttcaaggtaagagtgtctccagaattttgttcttgcaaccacaggagtgatatgtcattatagacttcattatagagatgacttgttcataagagaaatggtcaggtttggtatatgttcagaaaatgtgtttgaagtgaaaaatgtatatgcaagaatttttaaaaaaattgaagttcaaaacctccacatctagtatccaaacactttaaacacgtgtaccagccttatgttaaaaagggcaaagatagatcagcgtcaacataataacctcgtacggcacaacccttcccttcttttctttgtttaattgtaagccaggaaaagtttcactttcaagtttcaaagttgtgtgtctgcttcttctgaaactgtactactttatttactttccatttgcgagggcattttagtcagtaaccataaataaaatggcttgttcatttcctttgggcttctttacaagatctagtgatccaatggcttgtaggtcccacaaatatagccgttaggaggagaagtgaaggagcggagcggtttgttgttcgtgtgtcgtgtccattaggcagctccgacgcattaaacgaagctggtctgcaagaataaaataaaattatgttgtctgctttatttgttactttattcggaagaacaatactttgatctctttccttagatttggaataaaattaaataatgttgacctcacatacaaacaactaagagctataaaaaaaagattccaagaaaacaactggtaaatttgaatgtaagtaatatattactggttcaaattcgaagcatgatagtactcttgacaaatcaaaatttttgtttttgtaatactagtaaatttttcatctttgtcagaaccaacatgtttgtattgtgattaatgattttttatcgttttttgatacttagttaacaaaatctacctttatgtattagtaattccaaattcccaatgaaatccatatactagtattttactaaacactgttaaacaaaatgacatgagcaagagcaacccatcgaacaaaacaaagtgttttcaaaacactattaaacacaagtaactaatatgaataaatgaaactagccgttggagcccatttactaatattaggccagaacagagagatccactgttcccaccccccaacctcttattaccatgacctgatctttgtctcccttctctttctttctctcacttctctctcactacaagataaaagaacacagaccaagattctctc

SEQ ID NO: 63183 - DNA, 628 bp, Arabidopsis thaliana landsberg
gtgtgatcgatttgtgaacttggaatcttagcttttagcattccttatctttggaatgtccattttccttttaaatgaggaatttagatatacactcaatgttgacatattggctaaattgagagttcgtatagaatgttggtttttgtagcattgctcttaattaagactcttagccgtaggcagccattgttacttccgcataagtcggatttttacttgtagagttgatttgatgagcaacaacctactcatttggtgctttcttactattcattttcaattgtcttacatgtagagaatttgatgtgtaagatcttatagacaatttatgatattagaaactttcaccttgaactgatgtagctacagcttttctaaccgttatggatgatggcatgactggtcggtcttttggttcatatattacgatttcccaacatatttaataagaaactgtgggtatcaaagagttaaatggaacctttcctgttttctatgttggaatgcacttgaagtttacatcatgtatctgaaaaggaacgaattgattctgtatgtaggctctgctttgaatctgccgaaatgttattacccacttattggaaatggaaaacccccacatcct

SEQ ID NO: 63184 - DNA, 1330 bp, Arabidopsis thaliana landsberg
  unsure (1)..(1330): unsure at all n locations
agatagagatggagaggccaatgtttttgctcgcaaaagcaaatctatagttgacacattggctttgcattggacaacaactagaggggctgagatagtagctatgactgttatatcttcacaattggttgagaaacaacagaagcatgagaattttctacactttcttgctctatccaaatgccatgaggagctgtgttctaaacagagtattcacttttacctctcacttgttttttcttcctactgtagcatgattctacttcattattgcatacatggtcaaaaccagaatttttatgcttgaagatgaatctctaattcataagtaatttctcccccaactggatagtaatttatatgaagaacttactgaattgttaaattattctggttggcataaaaattaacaactgagctaatgcatctcttttatggcaggacattctttgcaaataattctggaaaatggtgaaaaacttgctgccatgattcaactccgggaactgcagaatatgattaaccagaaccgcgcagctagatttggctcgccgcaagctggctcagaggatcaagtttcatgtgccctttgggatcttattcaatttgtaggggagagagcccggcgaaatacagttcttttgatggacagagataatgctgaagttttctacagcaaggtatctgaacttgaggaagtgttttattgtctgaacaggcaactagaatacataatcagagctgaccaaccactaggaactcaagtgcagagagcctgcgaactctcaaatgcatgtgttacaattcttcagactgccttagattacaaaaacgagcatcaaatgtggtatccaccacttgaaggtttaataccttggcactctcagcctgttgtatgtaatggactgtggtgcattgcgtcctttatgcttcatctgttaactgaggcatctaggattgatatctctgctaaatcagacatatacacgcatctcgaagtgcttactgaagttttactcgaggcttgtgccggttctacctttgcaaaattggagagggaagaggagaacaaaggtttgcttaatgaatactggactcggcgcgatgctatttttgactctctttatcaacaagcgaaagagtttatggaagcagaaatacaggttagcacttctttgcatgtggtgcactgcatagcatttttgtgtttaatcacaccatgaaattggttttatatatgtagggcatcagagaaagaactngagcgacagatgaagatatcttcagaanaccgtgttcaaaattgctttccattgcaaagcgacatgca

SEQ ID NO: 63185 - DNA, 1215 bp, Arabidopsis thaliana landsberg
cataatttatacttttcctctactctgcatagcttcacataaagtatcatatacaaatctttcatttagaattatgaattcatgatttatttttcaaaactctgcaaccaatcgtgaccccaaattaaaatactattagtgtttgaacattttttcttgaaaaaagctacttctgtatttcttcacaaatcatactctaatgcttaaaatgattataagttaccactttcgatagaactacaaagaatgtcacatggccatgtaagccattttttcatagcattcaaagttatctttcgactattttagtagagccaaggttcaaaagtttcatgtttattggtggttcattaacatatcttaggaatttcaccgccaaaaagtgatgacacgtagagtaatatataaagtacattgactaatttgtttattgtccaattagtttagagttgaaaaatcataaatttaatatgatatcatataaatatataatataacccatataatttgatgggatgagtactaaaaatagttaggatagttttttagtaggaagagtactaaatttggatacaaatacagcattgggtaacttatgggtctttctaactggaccaacaatgatatccacaataggcccaatataatagagcgtgtgataatacatcccaaacaaatctcaggctctaaccaattacgaacctgtgaatgtcttacacgtggcaagtcaaactacagagtcttacaaactttgaattcccaatttaccctcaacgtttctgttatattacgcttctcctttctctcagtgtcagtcatagggtcaccaatggcttcttctttgcttgcactcttctcctgtctcttcctctctctcttatctctctcctcctccctaaatctccgccgtccgatcttctctcaatccaacgacctcgatctcttctcttctctaaatctcgaccgtccatctctcgccgccgatgacatccacgatcttctcccacgctacggattcccgaaaggtcttcttcccaacaacgtcaaatcgtacactatctccgacgacggcgatttcaccgttgacctgatttccagttgctacgtcaagttctccgatcaactcgttttctacggcaagaatatcgccggaaaactcagttacggatctgttaaagacgtccgtggaatccaagctaaagaagctttcctttg

SEQ ID NO: 63186 - DNA, 1627 bp, Arabidopsis thaliana landsberg
taattctgtactaccagagaggatccattgatttgaccataggtatacaattattccactcgaatagccacggaaatagaaattaatgtcacttttggacctttttaataaagagaatttgatatgattgggaatgtgtgaaagtgtaacgacctagtttaatatgacttggcaaagattgcaacttcttctgctggatttccagtcattaggcatgttttggtcccttgagtttgttcaaacgggaaacaacgaatggttgctccggtttcttcttttactctttgctcatctgcgtcactggctgaccaaggacctcttgcccatttccctgatgaaattgcgtctttgagctcagcgtatgagtttacatccacaatgttactgcacaatatcaaaatttgagcatgtgctaattaataccatttattgagtaagtttgtgggagaaagataaacaaaaagagtacctgtctctgaatgataacgccttctctagaagagatgtttggatctcatccaacttctcttttacatacgccactaatgttgatggctccattgatattccaaaaacttttcctgcctttcctggtatatccctcctcgagactacgacactgttactagatacatcgcgtggaccaatttcaatccttagagggattccctacaaaccaaaggttcaaaacaaatgtaaattataagagcttgaaatatcatgaaattcttttcactccagaaaatgattctagtgtgtgtgttttttctaagattgtaacgaaccttcatttcccagaaattgaacttccatcctggggttctttgatctgtgtcatcaagtttaactctaacaccagcagtttggagagcttctttcactgatgatgcggcactgagaactcctgttttctcagtgtcctttttccaaataggcacaatttctaccttcaaataaagaaaagagaggattcaatctcaagtctctcatcacttcctagagataataactacagctcccgtttccccataacaaattctctttagctagcgaatggaacttcagattaaagcaaagaaaactgcttaagaaagataaacctgtattggagctatcttgggaggaagcatgagaccagtgtcatctccgtgagtcatgataatgccaccaacaaaacgtgtactgactgcccatgatgtctgccacacatgttgcctttctccattctcatctgcaaactggcatcatcattacttcatttaacattctttcatgatgaagttgcaaaacgaagatgtgactaaacaaaccatagatgaaccagtaggcaccaatactatcgtcactaaaaaaaatgagagaactaaactccaaacaaattcaagtttcgataagcaagacatacttgtaagataatgatagttctgtacctgagttccaaaggcacgagagaagttctggcctaaattgtggctagtaccagcctgcaaagccttccgatctcccatcatagcctcaatagtataggttatatcagcaccagcaaaagtctctaactttgattttcgacctggaataacaggaattgcagtttgctcacaagcaaatctggtgtagatctcgatca

SEQ ID NO: 63187 - DNA, 591 bp, Arabidopsis thaliana landsberg
acatatggcacaaattgcaccgaaaaacagctctcgcatttgcgttaacctcacgtgtcgaacactttagctacatcttttattcaatcgcttctgttactaacttgaacttcaagtaccaaaagcttgtacaaatattcagtgtcgtgaaaatagtagctatatggtcttatatacgagacttcagaatacacgtatgagaaagggttgagtgatcttctgtgttgtgacaccccaacgcggatttttctgtcttcgctccgaacataccagaacacaatcacacgggctccccataattaccgacaaaattattgacctctgctcaacttcttacaaaagctgccataaacagctagatttgctctaacaacccaatctagccattttacgtgctaacacgacaagaatatgaatgtacttaaccttattacgtaccttacataagatttgatccatcttcatcaaacatactcgtcattcaatccgaccaacaacctgacttctttttttgaacatgccccgcttgattgatattaccaaaccttacccccgtttggtacttcaatggacaaccaactatccctagcg

SEQ ID NO: 63188 - DNA, 339 bp, Arabidopsis thaliana landsberg
  unsure (1)..(339): unsure at all n locations
cccacctatttacaaacacatcaatcaaatagtcattaacaaccttaagaacaaccaacatatttaaagtaagaatgtaagaagtatctaagatcaaaagttcactatctctaataccttaagtcgttcatgnnnnnnnnnnnnnnnnnnnnnnnnnnnnnnnnnnnnnnnnnnnnnnnnnnnnnnnnnnnnnnnnnnnnnnnnnnnnnnnnnnnnnnncaacaaagacccacctaagagaccagaggtcaccaaaattgctcatcaaaccaaaccccgaatgaaaaaccaaaccaggtaaagagagaaagcgagtcaacccaacatacctgtaggttt

SEQ ID NO: 63189 - DNA, 400 bp, Arabidopsis thaliana landsberg
cgacctagatgtattggagggacttaacgtttgtggtttttaatcgacggcgcaagtgtataaagcaagtcctatgtgaaccaaacaatcatcataatcatggacctgaagcaaacattccccaatcttgttttgtagttaccggtaaaaagcctagtgggattgcagaatggttcttatgcccaatgtggtgtgttgtggtggattgaatgaaagtggaaacaagcgcgttctcttctctttgagtcgcccttggaatacaaaaatgagtctataagatagaaatggaggcttgaactctgacaaagatgtctgtaaataggaacattttgactgcaatctatagaccagcatcatgtgctggggggactctgtggatggatataaaatgtgcgccacg

SEQ ID NO: 63190 - DNA, 1336 bp, Arabidopsis thaliana landsberg
cacttgtagatttgttgtctaacctaatccaacttgactttaagcaaaaacatattccaacttgttcttcaccaaaatgatatgttgaaatatcgtatctactaggacatcaagattttgttgtagtcgttatcaatgtaaccggtaacaaataaaaattaatgagataaattaggcatgatcatatccatagatattgtcaaacaattttctatcttcaagtagtttttggttttgggcgaaaatatgttctctttgacaaattcaacaaagaccattctttttggatgacaaaattgacaacttacccattctttttgggctcatacaatttatcaactaaaccatcagtacaaaaaaagaagcagaaattagaaaaatataagaaaatgactctttctctgtaagaaaaaatccaactacgtttattatatccacaattacgtcctatatacaattaaaaagatctaaattgctctattttcgttagaaagtagttactttttacttttttagaagtttgatctagaaaaaaaaagaattatatatatgaccgttttagatttgaattaaatgattttgttttatttattaattgatccacgttcctttctacaatttgttttttttttaatctccttgataaattttcgtcaacacatacccaaagacctccttgttgtactctcaaattcttgggtcgttctgagtcgtctccgcgttaaatcttttccctttttgatcctttcttcctttcttcttcttcttcgcattgatttggtcctccttcctcttctattctattcattaagaacctaatcttcatcttctccatcttcttcttcacggactccacttcgctcatccaggtaaccacaatctgctctctatcttttgcttcaaaattctcagttcctttcttctcaatttccgtctgctagatcctgggctttcgatttgttccgttcctcttctgcgattgtttcgttccagagagaattatcgaaataattaagcgaattttgtgtgtggttttcatagtcttgggttctttagccgctacatatactcaattatgcccaaaattaggtttaaaattgattaactaaaacttatactttttggtctcgtcttatgttatcgtttaaattgttcttagaagtgaaatcattcgatcctacgtttttgacttgttgctttactttatctatacctttgatttgatcaacttttctcttagcttacaagttagaatcaaagcatcaatcctgattactgttttggtttctggaggaaggtttattagtagtaaccaatccaagcgttccttttgttt

SEQ ID NO: 63191 - DNA, 171 bp, Arabidopsis thaliana landsberg
gggacaaggaggacagaaaccaaactctcggccaaccccatatcaaccctacccaagagggatttttccccgcacggcccaaaaacagagccccccggaccactgaagcaacccccacggataccccccgagcagagaaagcaaaaaagggggagaaggagcggccccccc

SEQ ID NO: 63192 - DNA, 807 bp, Arabidopsis thaliana landsberg
cttctattctagaaaatattgaatactaaattatgggatagggaattagaaacttatcaggggtgttaaaatcaagttacccagtagactttttattattgttgaactacgtttaaacaacatatagatatttcgaagtcaatgcagtcaaatatttcatacaaaacactttcgacgaacacaacttgtatctttttttctctttggtgtcaacaagacttgtatatatatcaacatcaatgaaaatacgcaaagatatatatgttcacgtgacaatttattacattaaattgtatatagtctctctatggttctatataatctcatactttctacctcatctctatagtaatcccataatcaacaagacactctaatagtaatatctcaacctccgtctcgttttcccattaacctacccgtttgttagattatgactaatactctctgtttaagcctcatcaccctaataacgctttttataagtttaaccccaaccttaatcaaatcagatgagggcattgatgttttcttacccatatcactcaaccttacggtcctaaccgatcccttctccatctctgccgcttctcacgacttcggtaacataaccgacgaaaatcccggcgccgtcctctgcccttcctccaccacggaggtggctcgtctcctccgtttcgccaacggaggattctcttacaataaaggctcaaccagccccgcgtctactttcaaagtggctgctcgaggccaaggccactccctccgtggccaagcctctgcacccggaggtgtcgtcgtgaacat

SEQ ID NO: 63193 - DNA, 203 bp, Arabidopsis thaliana landsberg
attataccaacgtaatacatgcttcaaccaacataaattccgaaatactttaaaatactaatggctgctaatttaaaggacaattattcatatgggtgtggtgaaatagtcagaacaaaacccatttacatatattcgaaggaactacaaaaggattcaagcgactggatagtcagcagggctggccaaaccacacatctcct

SEQ ID NO: 63194 - DNA, 845 bp, Arabidopsis thaliana landsberg
atgcccattaagttgtaattgttaatatttcagtcatatttatgattttctatatctatgatttatctctaggggtgatgatgtttgtatgtggaagccatgttctatttgcttccacggtttaaaaaccatcaacttgctaaggtcaaattctaatattactgtgaaaaacattatttacgtgcgtaattatatgaatttatgaataggttttaattccattctttcctaatagcgttttatgtcaaagagtatcccactaataaatttattgaaccccatgtgcatatgtacccagtctggtactagttggaacacgagataaagttgtggcaactgcccatgactcggtgtaaatggtatatcacatgaaaaattataagtccagatcacaatatgttttcttcaaataattcgaaaaattatctaatcgatttccctttaagcttgaactaaatagtttatcagcactagtaattctttcatacaaaatctctaagcaaatatatatctttctgggtcaatgttgttttttcatatctaaaatgttttttctttctcctgtgaagtagggttattagttagtggttaccaacttcacattataaaacttcatatctaatcaaatcgtgaagtatttgtcagtcaatcgtgagacgatattcatgaccacttttgtcgttgactttgttttttggctcaaaattttggacggcgataaaaaataaaactcgttgacattgttttttggctgaatcgttgactaggattctgggataagatgtgctatgaagaaaacaaaaaccaatttattcacacgcaatcaactatatatttatacaaaa

SEQ ID NO: 63195 - DNA, 170 bp, Arabidopsis thaliana landsberg
cctaccaccccagagggaaaggcgcgcccgacgggccggccagagggcgaggagggaagatagcccccaacaccgaggcccgcagacacgggcaccaagcgggtgaagaacaaggcccaacacgcatacactggaaccgactccaggagaaccttaacaaaaggaggctt

SEQ ID NO: 63196 - DNA, 927 bp, Arabidopsis thaliana landsberg
tgtaattcagaaaactttccggagattttttggtgatgtgtttttcgttgttaaattttgaaattttggatttggtggttgaggaagatagatggtgtttcttcaatggatctgtgaagacgagattgttggagattgatacttatcttattcgtctttatggctttgcttgattaagaaattgtgtgattgttttggggaggggtttaaacatggatggagaggttacttcttggattaggagagcaaatttctctcatactgtttgttatcgtatgattacgccgagtttagaatctatgccttttactgtaaaccaagagaagagttctggattgaaaagaatgactttgagttcaccatctgatttgaaatcacttgtaggaatttctcagagtacgcagcagctgactggtttgagttgtggtagtgttgttggtactgaagtgcagaggaatccagttactaataagaagaggtctgtttctccgttgcctcatatggctctttctgatgcttttatcgaagcaaagtctgatattaagaggttttctactccacatcctagaagagtggaaccagagaagggaatgaaggccaagtcgtcgtcccgcaaagattcttctgagaaaaaatcagttaatctacggtccctgtctcactcgggtcctattagggatcttagtacgcagaaagttaaagagaggggaaagagcaagatagataagaagtcttcaaagtctgttgactatagaggttctaaagtaagttctgcaggagtgcttgaagaatgcctcattgatgtgtctaagttgtcttatggggataggcctgctcacgggaaatatagccagatttatcatggtgaatatgaaggcaaagctgttgctctgaagattatcacagcgcctgaggataatgacgacc

SEQ ID NO: 63197 - DNA, 548 bp, Arabidopsis thaliana landsberg
ttgacttttatcaatagcatatatcgcatgcccgcatatacatccaatctgtcgacgttttgtaacctttactttttagtatgactccataaacttagcacaacctacagggcacaaattttactcaactcatctcactacacaagatccaaaatatacaaacaagacaagcattgcttccccaaagactaaccagcaattccatagactttggccacaaaagccaatcctcccgtggcacgattgccttcagcgatacgctgaagcagactcttgatctcttgaggcgaatatacaacaggatcttcactaatattaagctcagatggctctgaacgatcaatcttcaacactctgaagaatcttttattcctatcactccctactagataaaacctctgcacaaagaaaattacatgacaagcaattcaatcttaggttcccttaacgattccaatcattccaacacacatttttcgcattagagagtgcctaagcgatggtgaaatcaaatgagaaacgtttgatgcaatcttcctcattagtct

SEQ ID NO: 63198 - DNA, 927 bp, Arabidopsis thaliana landsberg
ccagaaatgctgttaaaccagtctctccattagccaaagccaatacgaaagaaacaattgcagccacaatcaatatcttgacaagtaaatcatcaaattgtttcagaaccagtttccagaatggcgttcctgcatcaattaaaaagaacagaagaaaatttggcacatgtcagcggagaactaaaccctactcttatgaaattattaaaaaggctaggttcatgtgcgaagaagaccatgaggaatatctaacacgattagctaagaccataaggaagatctatcacgataagctaggaaagtctaaaaagaagctaaagatacataaaatgcttttgcaatagaacagatgtattgtagacaaatgaaccagaataatactgtgaaaataaaaatgaaatccaaggcaaaaattacaatcatcacagcgctaaaacagttaagcttctctcaaaccataatggtagatcagggattagaaataaaactgaagcaattatgaaagtaagcatccattatcatgggcggttgttgacaaacttacttttctcttcaggcagtactgcagatcatgtgaagaaacatgcaaaaaaatttaaagaagaagatcagaactaaacaaggtaaatataatatgtgctatccactatgaaaaaggtatgcattttccagttaaaggcgacactaattccatagagtgccgaatgtttaaacgcacagacaatcgtatgcaggactttcgtctcaaggatactcaaactggatacttgacaagtaatttacaatgctaaacttataaatacatgcaaaaactataatcaacagctcacttaaattccatatgcctaattgaaaagaacaataaacaccaagacaccctatcatcaccatctgcatgaaatatccttatgtccctgtctgatgctt

SEQ ID NO: 63199 - DNA, 1524 bp, Arabidopsis thaliana landsberg
cctgactgatgctttatatgaacagaagtgcaagtgaagtggaagtaatacataccattcctgccataaagccttgaatgatgaacaacctacatatacggaaacgaaagattaacaaccaacatgggtatctttgaagtgactttaaaagttcaagtaacaatggagatctcaattcggttcaacaggttcatacctgagaatcagaaagaccctttgttgggtctaccccaaagaaatcaagcacctgcacaaaacacagaatcacatcaacacctaacagagggctcaaatacgagaaattcacttccatcaaagtaaaacagttgccaagaatatcatcaccggctagctaacattatatgcgatcgcagctatatctcacagattacaaatccgaaaacaactctcagagaataacggattgagaagagaaatgcaaagcacctctgagacagatctggcgtaggcgtcttccatgttggaaaagccaagggtttctgatttttagggaggaattcccaaaacgtggatttgggtcgccgacgaaagggaggtgaaatgtaaaagactagaaaagatgagaacttgtaacgccagcagcttccatgagcttctccgtctccgatcgctgagactgaaagtcaagtgctgagatacactttacatgaattagcgggtaggcttcttctctcacgtgaggcccatttagtatatatctcatcaaaactcaaattaaattaaaatgtgagattcaaaaaaagaaaaaatcttcaactatcatcaaaattgaaattaaaattaaaatgtcagatctcaaaaccgcattaccgctaagagatttcacgttattacatattatatcattatcaatgcataaatatttctatgtgaagcttgtagtatccgtggtcaccacttttttagcatgtaaccgaaaatgaatattaaccaatctgaaatcaacgtcgttctcagcactcatgatcctcaaatatttttgttatcgttaataatgtcaacaaacaatttttctctaaactacttgtgtgtgtgtgtgtgtgacttggagcttccaaatcatatatgttctctaaaaggacacagcctcgttaaaatacaacacaatttttggtcacgacaaatcattttcatgtaatgaatgttttttttaatactgtggtttagtagtaccccattttctaatgaaaagctgttgatcgttgatatatctggtaaccaaataaacttggtaatgaagaaatataatttctaatcaatctttttttttatggacaatcaagattaattacattctaatgtggaattcggacttcttttcacgtaattatatatgcatttagtctatcatcgacatcaataagatcattaccatacgaatatacgattaaaaaaaaccaaagttatcaaacttcttcatgcatcattggaccagcgacattaatttggtttgtagactataccatttttttaacttttttacataaaacaaattgttagggt

SEQ ID NO: 63200 - DNA, 620 bp, Arabidopsis thaliana landsberg
ggcgaatttggatgaccgagtcctcactcagctcgagagcatcctgaggtggtggtcagccttggacaacgctgggttggtggggtagagaatagagcttcggatttagatgggagttaagtacatacccatttactgtaatctaaaggcatcttgaagtattcaagggtctttagagtagttttagtaaaaaaattgaaggtgtcaatgtgtgttagagcatataacacgcccaataatttctatggtgatgttgtcgaaccttccatgagatgcacacacctacggctagtttgctatgtttgctctgtttagatgtgtagtcacgtgataccaccttttacagtggaaaactgacggaggagccagaaggagagccaagcgacctttcctttccccaaccattccaactaacggagtatgtataattaggcagcgctacactcagcggcatggacaggatgtcagccccatcatatctcaataaagcttttcccttgcctctttactagtactattaatcctatatgggcggtgcttgaacttcacagatccccgcgtcttgacgtctgttctgtcctaccggatctacaaacgtgttacccttttgggtgtttagg

SEQ ID NO: 63201 - DNA, 1731 bp, Arabidopsis thaliana landsberg
tatcttggctaaatcactgaatcataaatttcatggttttaggtttctagatcttacaaaaagtgtcattttgaaatgtataacacatattgagatatatttatgatataaaatatatttacattagatatattaccaactaaatggtgaagaattaaacttcagactttttgagttttgaataaagagtaattaaattggaaattaagtttgcgacattctaattaaaacattttaaaaaaataaaaaatctagaacaacatatttgtgatacagaaaaagaaaaaaagaaaaaaacgattttcatatatttaccctaaacatcaaatattaaactatttcaaacatatgattgagtagagtccctttagcagtataattgtatatcaatttttcataatgcttttgtaatgaagacgcctttatgatttgtaaaaggaactcttttctctggcgatcaaacatcataattgagttaaataacattggccctctaattatgaatttagatttaacttttcaccagtgttaagactataaccaatttaagtcagcaatatatcatacttactcattaatgttccattgtcaactttctcttaattttctgtcaataatctttcatatttagggttttatttgcttagataaaaagttttaaaaaaattgaaataaataatgcagcattgatcagataactaactattcactgaattcttattaatatatcatcatttatttttgtcacatattacatcagagatactatcaatccatataaacgactccaaatataactttcacgatgcgccacttttccggaatactcgaatttgtactatgccacaatatacagttttatacctaccatacaaaactacgataaaggctttgtatttacagtaacgatctctttacagtactaagaaattttcattaaattttagatttattacaatgcaagctaatacattatctggaaatcgaattttgaccatgagatcaaaggcgttaccattaccatttaaatttctagaactctctagctagaaaggaaaaaaaaaataggattttgatatttctcggcatttaacacaaaacattgattttcatatctactttttgaggggtattaacgtcattacaaaacgaactgacagcaaatccggcgcgcgaatggtcactctcctccctccccaccttcggacaatcggacatttacgtaaatccgcaccacaccaaattttattgttggatttttgtaaaacactttttttacattttaccattacacgaaaacattactacagtataaaactaattaacaatttacatacgtaatcttcggttcgttgtctccttagcatttatagtataaagtttataaaaataattaaaaccctaaataacgacattttcttcttcatttctctaccaacaaacacacactcactgaaattacagtaacaagttttttattttttaacttcactttcgtactttttttttgttttctctctttggatactttgctagatctctattctacgaacaaacccagaaacaaaaatgtttctctttaatcactcaattagagagatctgaataaacttgttctcttgtttttcttcttcttcttcttcaaatgtgactaaatttataatctttcgggtttgattcaatcgtacattcaccatttcgtctctcacagaaagctaacttttttttttt

SEQ ID NO: 63202 - DNA, 200 bp, Arabidopsis thaliana landsberg
catttttcatccgaggcggtctgaccgtaaacaaactctaacctcgtgttcttcctccactcctactctcaattttggaaccacaatctctaaaactggtccagtcccatcaaagtatgcttcaatatttgcttcttccggaatccgattcggcaattgtatctccctcatgaattcccctggaggacaatgctcagcca

SEQ ID NO: 63203 - DNA, 734 bp, Arabidopsis thaliana landsberg
tgcttgtgttgccatgaaggcgaagtaaacatttacggtgaaagactttgatattttataagtttgaaattgtaagaacacatcatttatttccttccacattacatcgtcacttgcattgcatttttatacaggactcatttggtagaatgaatacacttgatagaacaaaaatatacatcatcttttccattaaatttttttttgtcttggcaaatacggtgacatgtatgacacaccggccgagaaacaccattgtttgaagcaatctcgacctccaaaccactaactttgatcctatggccagacttcaaataagggtatttccctaagatgcattcaacatgtagagtcgtgcagcattcatggcaggtgtagaaaagtttctttttgtttatattttcttcgcaaatctcacaccaccactcaagctgaaaactcttcgagtaatatttatcactgtatagagtgagtgagtgcgagtcatacttgtattttaccagttttggtaaattcaagcatttgaactccaagggaaaccagcatcctttgtaacattttgctgcaaatcttgaagattgagtgcaaccttcacacctgtaaataaattcatcaaagtatatagcccgataaagaggatgtttatgcatactatggtcgaatggttcggcaaaagaagcacacttcacatttattttaaactcacaatcttcttggcaacacttgtacatgaa

SEQ ID NO: 63204 - DNA, 1056 bp, Arabidopsis thaliana landsberg
ctcgcacacacgtcgtgaagagcaaagtcgcattgcttgcaacccaagaaactaccaaattcaattggaaggacacaggcttgacatacttgtccactttcttctttttcgcccatatcgagtctcaataaatcatgttcatggctaaaatggcgtactgattttccatctatttccaccaacgcagcaagatcaacttgagagtcaatctcctctggttcaggctcttcttcaagatctttgccatcccacacatcaaaacgaattatacagcttgaatggacaacataattacatgtcttctcaatacaagaatatcctccatatctaacatcaacttggctccggcaaactccacaaatgttatcaccatcagagatacgaaaaacgtgagagagacgctgtgagtgacgtgtgagctttataacctttggtaggaatatacactgtctatgtacaaagaaatcgcattgtaaacatccgtacatatccatacctttatcatccctcccacaaacatcacaagggaacggattctctctacgaatgaaagttagtgtatgctcatgaatctttgcattgataattgtaagacaatccttatggaaatgggatctacattcacgccgataatatgcgaaagattcaaaagaatccgtaattttacacaatttgcaaattgcatctctagaatcgcgtggagattcttcaaatatgtgtctagcgtgatcagatgagaaatacattatggtgatgtgattttgtaaggactattatcgtataaatagatatattgttattctccttctttaggtacaagtacagcaaagacgaggatatcttcggttttacgatgcttggagaaaaagctaagtccatatcgatcctttgtttgtgaggtcttgatttggttagcacaaagtaaagaacaataatgttattttgtaatcgtatctgattactttctttgtatgtaaaacaagaaaaggtttaagccacatgctaatcttggaatttgggcttcaaattgtcgtaggcccattttgtctagggttg

SEQ ID NO: 63205 - DNA, 202 bp, Arabidopsis thaliana landsberg
gatttatctaaatcagctctgacttaaatatcggagagatacagtgtcatacacgacccaaatcaggtctttggacaaaagaaaaaaaattggcctattattattatttttaattttgttgaggtttctaattatagaaatgttattagatgcatacttgcatgcaacgagttttcggctcatacgtcaactatttaaaatg

SEQ ID NO: 63206 - DNA, 201 bp, Arabidopsis thaliana landsberg
cttattaaatgatgctgcacccaaaccaacaaagtaaataactctctttcagcacactactccactctttatttttttattcagcctgagaaactaccattgagatctcaggcgctaaactcttgctaaaccaatctagattttataataacatgtaatgtcttttcttactaagtgattactaagaaagggattcgaaac

SEQ ID NO: 63207 - DNA, 200 bp, Arabidopsis thaliana landsberg
cttgttaaacaagagacagaagtggatgtatacatttttggtttaaatgttttcaagtttttataatgactccattttctaaagatatcaaagcctaaacacaataatgaagaacaaattttgtgttagaagtgtgtaacagtttcacggccgtcttgagttgttgctcctatgaaactaccaccatgtcgcctgcaacg

SEQ ID NO: 63208 - DNA, 749 bp, Arabidopsis thaliana landsberg
ttccctattttattcatattttactttatattcactttacaataaatatctttagatatttctacaataagatccttatctctctccatggtttaattaaaaataaatccaagaaaagtgcataaaaagatctgtactttttattcctctacccaatcacttcacagcttcactcacgcgcgtgttctttgatatcagatagatacgtctacgtgagatacacgctcttgttaatcaagtggtgatgaaacagaacttactcgcctcggtgtccgattctactcagaagatatttactataaatatctgatttctctcgactttgacgaaaatcaaaaagagagaaaaacataattaaaaattattatgaagaagaacggcgagacgaaacggcggaggaacgtggcggaggaggcagagcagggagaggatccggcgatgtgggagaatcttgaccggaatttcagacaagtgcaatcagttttagacagaaacagatcactgattcaacaagtcaacgacaatcaccaatcgagaatggctgataacatgtcgaagaacgttgctttgattcaagaactcaacggaaacattttcaaggttgttaacatgtattctgatctcaatactagtttcttgtccggctttcacgatgggaagaacggcacgatggtggtggtgctgcccgaactagagcttaatgaaccggaattcaaattgttccttcttagttggacccgcccggtttg

SEQ ID NO: 63209 - DNA, 1849 bp, Arabidopsis thaliana landsberg
cgttatatactcaaagaaagaaaaaccaagggagcaattacaggggagtgttaatcttttactaagataatttgatggatcattatcttctacctagttaacacaataatataaatttgttaggaaaataccatggtcacaatatcaactgaagatggagaaatatgcttgtcaagaccatcccctgtcaagtcacaagcaaatgcacaaacgcgtgtctctgtgtattcatcatgagcctgaatgtcataataagttaaatacactctggtcaacaaaaaactatgaagcacatgacaaatcacacactattccatttggtagacgcagcaagtaactactcacaggcataaattaaggtggacctgttaaatgagcttagagacagaaagactattactataaattaacctcactaggaaagacaaatcaaccaaatcaaagtacacattagactagaagaagaaagtgactgaccttgaccaattcgacggctcgtggtgaaaaatcacatgcataaacaaaaatgtctggatatgtggcgatcaatggaaagatggtgtttccagctccacagccaacctgcaaatcaagaccaattgctcaacagaataacaaaatagctagattttggatgagtaacagcttgagcatttttgtttacctcaagaatgacacttttcccactaacctgaaaaaggaaataagaaaaactaaggttatatactatactaggtaatgcagcagaaaccaaaagaaactagtttaaatactcacggaaaaatagctattccattccttatccaagtagtggcggtctttgaaaaactgatgaagaacaagaaaatcttatcatatagtaaaacacagcaatataattagcacagtgagctcacactcaaatttcagaaagcattaatgtcaacgttatgatatgacctaatactggaaccttagattatattgctgataaaatctggaaccaagggcataggcagttgaagacaatatcagctcaagacagccataattccgtttctcctataaacaaacacctaagttactaaacttaatgaaatagatctacttgatatatagtatcactaactaacttgagtcctcaaacccatcaatcaccctaaccagttcagaggagtggcagctttaaatactcttcactttcatactgtaccacatatcaacaaagagagggtcttaacatatatctgaacaatccttaacgactacatctaaagaaactaaacgcatttaccaaatcaaaagtgaatccacccaatattacacacttatatgcatcaatattagctcaattacatgtgaattgagaaagaaagtaactgagctaaaggcttactctgtctccatgatgcttgtaaaatatatcccaatactttttagcatctcgctcatacttgtctgagagataaaggaacaagcttgcaaaaattcatacttggcaatatagatatcaaaatcagcttaaagatgtaaactttgagaacctcgccaaaagggagaaacaccagcattagccgtcggataaatctgcagcttctcaatcggtttttgcggttcttctatgattttcaagccagaagacattatttattaccacacgccgtatcttcataagaacaaaaaaaaacatcatgaatttgagtaaattagagaagacccaagtaactcaaaaagtagaaaaaggaagactaacctgtgttcgtcgacgttaaacgctctggttcttcttccctgagaaaaaatctgaagaagatttttagagttttgtttaagacattaagctgcagggttttaagttggtcggcccagt

SEQ ID NO: 63210 - DNA, 588 bp, Arabidopsis thaliana landsberg
acatgtcttttcttgtgattggccggcataaaatcacctaaaactaaaacctacaccacatgttcgaaaactttacttattcgctaacaaaaacatgaacaatgttttgatatttattttataaatgagtatctagatagaatattagagtctaatataaatgtttgaaaaattctcaagcgatatataatgaaaaactttgattataatgaaagcgtctgatgtgatttatatattttcttttttgaaaggattttttatttattttatctatacatttacaaaataaagtagaatttataatgaaaacttgcaaattaataaaataaccaatgatttagaggtattatttaaaaataataatatattgtttatttatttcacttaataggctatctatatgtccaagtatgttgttagtgaacattaaagcatatatttttgagaactgactcagatgaaaggataaatttgaggccaagaaccctcttcctcaatccctaattcgaaaagaaaaaagaaaaatcgaacatgccttagactatctatgtggcacgagtaatacagaagaccattagcttttctact

SEQ ID NO: 63211 - DNA, 525 bp, Arabidopsis thaliana landsberg
gttctaatatataaacctgtcaggatttcatatactcactcctaatgcgtcaagaaacacacttttccgaaacacgaacattaccttacgaaactgagtgtagacatcaggcaagtcaaaaacatcaaaaggaagatcatctttgagatacatagtgcttccccaaatgagctcatgcttagtactatatccaaccctttgcataccttgattcacaaggtgtttcaacatatgccttctcactacacgttcctttatgcgcaaaaacctaataaaacaaactaatcacattttcatattccctcagaaagctctgataaatttcttcaacacaagcaataaacagaacttaactgtacgagctccaaagtctttagcaagagaaggaagaatctcttctggtttaccacttctaataagaagattcaatcctggtttcatgagattctttctcatatcgaccaaacattccataagaataccgtcttttaaagctgaaaacatattcacaaagattgagtgatc

SEQ ID NO: 63212 - DNA, 187 bp, Arabidopsis thaliana landsberg
tgtctctctggcactagattttaacgaaatcaacggactattgttcttttctcgttcttttattgggtaaataaatgaagaaaatttgtggtgtattttcaaaatggatatttctatttttgaactgtaaactattgtatgttggtataaatatcaatttagcaatgtttcttgggcacacaattac

SEQ ID NO: 63213 - DNA, 1832 bp, Arabidopsis thaliana landsberg
  unsure (1)..(1832): unsure at all n locations
acatctttcttcaactgtttgcttttcagacaaaaagatgttgaaattattacaaaaagggcaaagctttacagcaaaagtggttagaagaaaacaaagtgagtgcactgcagaaacaatccaactgttttcattctcatggagagaccaccaaagtttgttaatttgagagcacaagaagaaaacaatattacttatttgcttatcaccagcagagaaacaagatgaatgtggaagtatcaacttgcttaccacaaagaaaaaataatcagaaaaagaaacactttaccaaaagaagaataattgtagaagaaaaaaagaaaaagacagtaacagatgatcaagaagatgtgatgatgatgatgatgtacacaaaagtatcctaagctgcgtattcggtttcaagcattggttgtgtacgagtcgtggtagcagttggtgctcttgtttcaccaacctgagtcatcctcagagcttcccctgtctctccagctctctccatctccctcattttctcttgcttcttgtaatttcgacatctcaaaaccagaaacagtaaaagccccaacagtatcaatccaccaaccaccgacccaacaatgatccaagtcttggaattggaatcagagctcttcttcttcttcttactctcaatcccaggaggagctagactcggagcagaagccacagatttcaccaccacagagaaatgtccctgatgctcagtctcgcatgtgtttccaggctgaatcgaatcgctgaaactcgcttcacctttagaatcgaatctaacacacttagcactagacccttgcgggattcgttccagatcagagaaatcgattctgataggatcattagacacccttaaatcaagctgaggcaaattaagcgcagagagattcttagcatcgtaagcgagaagacccaagacaggagcgacataatcataaccagacaaagggtaatacaagtgagagaaattagctaggttttgataaaccaaaacaagccttgtcacatacggcttgacgataacgccgctgggaattgagaactcattaaaaggagtgactccacgttttctaaagcttccgcttctgagtctcatagcagcgagtttgatcccagtcaaattggaaggaacagtagtagcctcgtagagaatgccggtacgaggacgaagcaaggctctaaaagagtaatcttgaagaagagcatcgagtgaagaagaagaagaagcattgggtgaagaagattgagcagagagcttttgtagacgaagagatagaaacagaagcagcagcagctggagacaacggagaaaccccattgcttttttttgtttctttcgcctctggagcaaaaaaaaatccccccagggcgagtcaaaggtgggagacacagtaatannnnnnnnnnnnnnnnnnnnngtagaaaaagggtaaaaaggggaaatggtgaagagaagaacaaatcgaggaatgagggttaaggagcaatggaggaagctgaggaggaggaggaggaggagagagaatgaatggtcgccggtggaaaagagagagagagagaaaggagagaaggagagagccaaaaggacaaaaaggagaagaagagtgttgtcgtcagtcccatttgttcacaaaaaaaaaaatgatacagcctgttcatctgattttttctccctttacacattaacaaaaatttaatattttgtttgttttttttactttccttttcgaccaatcatattgatacattacggcaaacaatttcgccgtaacagttgtccgtcaacctcttattgtgttatctgtatctctctctgt

SEQ ID NO: 63214 - DNA, 492 bp, Arabidopsis thaliana landsberg
  unsure (1)..(492): unsure at all n locations
ttcttggcccaacatacaccaatgaacagagtaaacagtcccgaggttgaagacaatactttagtacttgccacacttgtacgagcaagagcagcattggacagatactgtatcatcaaaaacagcaaacaaatatcaataccaaggtttaaaagaggacactttcaggcaccaccatcaaaacaatacaacgagcatatcaaagaaaattcacctctgttacaaaccaaattggtgnnnnnnnnnnnnnnnnnnnnnnnnnnnncttagtcgtgatctctttcctctgtttcagagtctgcacttcttctctaactttaccgatcaagggtctctcatcttcttcttcatgggatgaaaggtgttcctcactatctttcttagttatagtcccttgaagtcccatttcaatgattttatgcctcaaaggagaaccgagcttannnnnnnnnnnnnnnnnnnnnnnnnnnnnnnnnnnnnnnnnngaagagc

SEQ ID NO: 63215 - DNA, 1035 bp, Arabidopsis thaliana landsberg
  unsure (1)..(1035): unsure at all n locations
atacgaccatgatgttcaatataatttgtagaatatgatccagaagaggttaggctcatatttatattttgtctatacactggttaaagcccaattgagaattcaaggttgtaaagctataaccttgtatacattgggcctagcagtccttgatttcactaatatnnnnnnnnnnnnnnnnnnnnnnnntctgaatagagaatcctaccgaacgttgggctttttatttccaactgatgttaagtttccaaagttaaaagtgcacgaaaatcagtaaatcacgtttgtttggggttcagaggaccgacattctttctaatttctaaacataacaatattcgagcaaattacatgaaattggattttggccattaaatttgatggtgtggttgactcacaaaatttctccacagaaaacatgatcaaaatatgcttatcgtcatcagatatatcaatatttcaggcctaatttgtgagcaaaatgatgccaagacgaggatagtgatgtttaatccgaattatcatctaccattgtatataatttacctctagatgattttcagtggtaataaggtatatttaataaatgtaaatcggaagtttagcctttttaattaaaaatgcaaacaacacaaggaacacatggatgaagcaaacataaccaattatgagtgactagtagatagtagatatacaaacacatatttccgatttcccaagtaatatgaatctttgtgatgacaaaatcgttacatcattcacgttgtattaagttacaactaaccatgcagtttttattttacaagtaaatgtgatttgttttctagtatacccatatagattatactcctttgctattttaaggtgatatgaaagctctcccagagactagtgaattagttatggatggttgccccgcaaaataatatcgttttgtaatttaatatggactaatggttatctcatgacatatactaattaaaattgtgaaactatagaagttatttaaaaagaagattgaaaatgagatgtggt

SEQ ID NO: 63216 - DNA, 191 bp, Arabidopsis thaliana landsberg
cgacctctcgctttgaaattcctggctgaagctcgtcttcttgatccaaatctcccgatttattatttcgaatctgagcttaacaacaacaaatcagacgaaccaggatctgcaaaatcgcctggatctgcagcagcaaaggattcttccaattcttcagatcggccttctttacaccaacgtggatcgtc

SEQ ID NO: 63217 - DNA, 155 bp, Arabidopsis thaliana landsberg
tcatgatttctgacatattgtaaatagtgtggttatatgtgaacaatgttggattgtactcttatgactacttttccatctttaggaagaatacataatacacttttcttgtgctaagcatctatatactcaaatttttttttataaatatactc

SEQ ID NO: 63218 - DNA, 530 bp, Arabidopsis thaliana landsberg
cgcaccaattgcactgttgcggcgtcatcggcagtgaagccgacgacgctatcagggaaacatgcgtcgaaagtcataatcctggtcttggcaatattggccgcaatcgtgatgcagagcgttcctgcgggccatagcttgctctggcgaaggccaagatcggaatacgtggcgttgtggctacggatataggcatcgcagttggcgacctcactccccgaagttgcagtggcttgtggcgcatctggaaaaaatcaggcagagcgacgagaaggtaatcgtctttacagaatatcgtgagatgcagcggctggtgcataaggtcatccgaaagcgattcgaggtccaggcgagcattgtcaatggctcaaccacggtggatacgctcaaggatgagtcccggcaaaagatcatcgaccgatttcaggatcgacctggctttggcgtgatcatcctttcaacgacggcggttggctttggagggaatatccagaaggccaatcacgtcatccattttactcgcccatgga

SEQ ID NO: 63219 - DNA, 611 bp, Arabidopsis thaliana landsberg
caaacatgaaactcatttgagaaaattacacaaggaaacttcagcatccttgtccgaaagatttactcctctattgaagaccagcaacctgagcataataagctgaaacatacaagtacagattgatgaaacagttttctgatatgttaacaaactatgaaggctaatcaccttactctagttttatttcgttcttcagaataacatattttaacttgtcttaaaagaaacgcataagagatgcaatataaagcagcagactctcgtcatctcgataatcaaagtgagtactgaaattgtgtaaaagttatccaatttgaagagagctataaggaactcccagcagaacaatcacattttaggtgagacaacttggagacgagaagaaattatcacgtctgactaatatcaacggcgtatgttttcccaagtaataatgatccaacggcggttacttgggtcttcgctaggctgggtcttgggcctcttagctactattaatgtatttatcaattatggtccaacaacgttctttccttttctctctaatctactgtcattatccagtgtggttagagtctgactatgatcaacggtgtatattttcccat

SEQ ID NO: 63220 - DNA, 744 bp, Arabidopsis thaliana landsberg
caagccctacgtcgtgggtgaccgactggttcagccgcagctggcgcatacgctgggactgatcgaacacggcggcaccaatgccttctacaagggcgaaatcgcccgcaaggtggtggccgcgagcaaggccgacggcggcatcctgtcgatgcgcgacttcgccgactacagcgtgaactgggccaggccggtgacctgcacctatcacggttacacctatatttccgatccgccgcccagctccggcggcaccaccatttgccagatcctggaaatcctagagccgtattcgttgagccagtggggctacggttcgcccaaggccgtgcattatttcatcgaggcccaacggcgcgcctttgccgatcgcaacacgtacctgggcgacccggccttcgtgcacaacccgctcgaccgactgctgtcaaaagcgcacatcgacaaactgcgcagcaccatccagccggacaaggccacgccgtcgtccgaggtcaagggcagcctgggtgcgacggaaggcaccaacaccacccagtattcggtggtggacgcgaagggcaatgccgtgtcggtcacctacaccatcaactacctgttcggcgtgggccagatcgcgggcgataccggcttcttcctcaacaacgagatggacgacttcacctccaagccgggcgtgcccaattccttcggcctggtgcagggcaagatcaacgacatccagccgggcaagcgcccgctgag

SEQ ID NO: 63221 - DNA, 566 bp, Arabidopsis thaliana landsberg
gggcatcgatccagagagcgtatcagctattgaaattttaagttcaatactgttaccaaaaagcattttaacgcgattttccatttgtgtcatacagttaacccttataaaaagcattgttacttacggtggtaacatcatctcggacccatcgcctaaacggcaatcgctcacggtatttcggaatgacgtattgccacaacttactgaaacgcatcttttatccataaaatagatagcgtatttccttgaacactaattacatcaaaacgacaaggataatgcgtatatttcttatttatcaataaataatgtttggccgttttgataatttttttttgtttttgtttggttattgtttctaaagcattgccatattctaacgagactcgagctctaacctcaataaaaaccaaatagtttttatcaatcatgactaaatcaatttctccccagcggcaagtataattactttggataaattgcaatccttcgttggttaaaaattgacgtgcttgctgctctacagcaaaaccaatttgtctagacattatttttcctttttt

SEQ ID NO: 63222 - DNA, 210 bp, Arabidopsis thaliana landsberg
tttcaatgggatgtcaacatgtcacggccccggcgcttgtccaagctgactatttttcctttttgctccacgcgattgaactgggggcgtttgctgttcttagctacagctgcacacctccaaagctgtagacatcacatttcattgtcaccctcatggagtcagcacattgtgactcacatccttacattccatggatactattgatca

SEQ ID NO: 63223 - DNA, 1162 bp, Arabidopsis thaliana landsberg
acctgtaagaaaccgtatatcgtgtgcagtcattcacatgatcagacacttgcacgctgagagtataatgagaaactaaaagagatggaaaacgcataaaacatgggttcacacattaccgggctctcccagttgtcttctacaaaccgtatatcgtgtgcagtcacatcaatacctaacacataaaaatagtaagggaaggattatctggatgagaaaacttcctaatgaaacataaagacgaccttcacataatcaaaccttaagcaaatcaaaattaacactataaaaccacaaaccagaaccagcacagggtgaaaaattcaatcaattgtgcatctacaaggaaaggaacctattctgttaaaagacatgtaagtggaaacaaaagagaaggcagaaagaatcagtacctagagcagaaagactgttgataaagagctgttgagagtttccagggtcaggtttcaatatgacttgaaattgagtgtgtctttgaagcctattgggattctctccatagcgagagtcgtcaggacgtatgcttggctcaacataagcaacattccatggttcaggaccaagaaccctcaaaaaggtacaaggattcatggtgccagctccgacctcagtgttacttggttgcataacggcacatccaacggaagcccaatattccttcaatttcaaaacaaaagagagtaattcaatttgaattcgtcgaacttttgaaagtagagaattggagatgagtgagaatcgaacgaacctggaggcgttgaatcgcttgttggaatgtaggaacagacaccgcgcgggtaacatcatcgtcgggattacgataggattggtgatgaacagcggcggaggaaacggcggaggtacggtgaaaacggcggcgggagaggaaaggggactgagaaagagagcgagggaggaggaagaagcgaggagaggcgtgaggacgaaggaaagagacgataagaggaagagagaaatggaggatggccatgagtgtgaccagactctttgtagaagagagtcaatgtgtagtgctcgatttttggaagacgagagagatagagagaggttttgtgttatcctttcttccttttttcttttctctctctcaagttcgcggttcgacctaaactatatgatt

SEQ ID NO: 63224 - DNA, 1461 bp, Arabidopsis thaliana landsberg
cctgcacattttgatatcaaattatcccgaaaatttgatgcaaattctttgctgaacaatgctgggctcactgaagtaattgttgcatcgtcaaatcagctcaatttgaacttaacagaatctctttttgaggtaagaaggatataatttcttccctgttaaaatcctctgtagtaattgataatggcagggattggttagtttcggtcagcttggtttaatactgttgttttggtgctaaatcctataatcaaatttcccactagttttcagaaaggatgagtagcttccaactttctgtctacttgtataattgataagacggtatataaataatctcacatcagatgggagggaactaaatcaaaactttagaaaacctcagggcaccaaaacccttgagctagtttttgttgtcagttctacccaatggtctttgtgttcatggtttggcaaactcaatatttgtaaaccgtcagttccatatatgttaattttgtcttttctctgctgaagtgcattttcaggataattgagatgttgaacattttggaattgatggaaacagatgccattcctgataataagggattgtcagtttactgcaccaacagtaccaggacagaacgatattccccatatgtacttcaaaatttaacttctcttccgttggggtaccaagttttccaaggacatggttcagatgtgctaaatatatcagctccagtggctcagaactttgtgcaaccaggttgctctgttcccatttatatcgataatagtgacacactacttattcctgatagacgtcgaagtcaatttggttgttccagcagtgaatctggtgatgccatacatcattatatgaaggtccaacttgatggaacatcttttgcttctcctcctcattcaatggatcgaattggcctttcctattttgaggttgatttttccaaaacatcaaactccagtgataatgttgagaaagcaagtaaatctggttatggaagcagctttgttgttcctgttgtgtacgaggtttcattgcagcagcagagcaagttgatacgagtatactctactgtatgtatgacgtcattataatgtatatttgttgaggttttgttcttataaatgttgattctgcgtttgacctttcccttttttcaggttataattttgaactccacatccatgccattggaacttcgctttgatattccgtttggcatctccccaaaggttattgaaattctaatatgccagtttgttctatctgtaccagacactgtttatgtgcttcttaagaaaattaagctttgtttcttttcatttctagttgccttacctggttgatcttaacaccatcttttattattcttatgccattctatttcagatcctagatcctatttttcctggtcaagaatttccactgcctctacacttggctaaatctgc

SEQ ID NO: 63225 - DNA, 782 bp, Arabidopsis thaliana landsberg
tttaactctttcaacctagccgattaaggcatccatttctagcttatgtttgttgtaatttttcaatatctataatcttattactctatatatatatatataatatttatatatatataatatgtatatatatatatatatattgttttgattaaatagaattatgcatcataaataatctattgattattcttcttttattatctaaaggacataaaaatattgatgttataaaagagtgaagtatagagaagggactaataattgaagaagactttccgttgattttctttgcctaaattgtgtttaattttacaattgagtgaaaatgcatatgtatactacaaaatatagacaacattactgtaaataacaaatgacaatgggctccatatcatgttaattttaaataacagccgctaccgtaataattctcaggatcgttctgagaaggttgggggacagctggggaagtgtaattccgaattggaccagagcttcgggaagcgggaaggttaatctggcataatcgaattgtagagtacacccggaccagctatatcgttcaggtgagaacagaggtcgacagacgagcgaggagggttctagtcgtcaaaaggtgagttgtgcctttccgccgaagagtcgaagcttcataatggggatgaaggattcataattgcagaaaaagtagaaaatagattcttttcgattatttgtcctaaagaggaagagtaagtataagaagtgaaagagaagaaaggagtatataccttacacga

SEQ ID NO: 63226 - DNA, 598 bp, Arabidopsis thaliana landsberg
  unsure (1)..(598): unsure at all n locations
gtagccttggtatgtgaaatacgttagcgggccaaatattcaacagatctgatgatgacatatctttttttactttttacttgctctcgggnnnnnnnnnnnnnnnnnnnnnnnnnnnnnnnnnnnnnnnnnnnnnnnnnnnnnnnnnnnnnnnnnnnnnnnnnnnnnnnnnnnnnnnnnnnnnnnnnnnnnnnnnnnnnnnnnnnnnnnnnnnnnnnnnnnnnnnnnnnnnnnnnnnnnnnnnnnnnnnnnnnnnnnnnnnnnnnnnnnnnnnnnnnnnnnnnnnnnnnnnnnnnnnnnnnnnnnnnnnnnnnnnnnnnnnnnnnnnnnnnnnnnnnnnnnnnnnnnnnnnnnnnnnnnnnnnnnnnnnnnnnnnnnnnnnnnnnnnnnnnnnnnnnnnnnnnnnnnnnnnnnnnnnnnnnnnnnnnnnnnnnnnnnnnnnnnnnnnnnnnnnnnnnnnnnnnnnnnnnnnnnnnnnnnnnnnnnnnnnnnnnnnnnnnnnnnnnnnnnnnnnnnnnnnnnnnnnnnnnnnnnnnnnnnnnnnnnnnnnnnnnnnnnnnnnnnnnnnnnnnnnnnnnnnnnnnnnnnnnnnnnnnnn

SEQ ID NO: 63227 - DNA, 304 bp, Arabidopsis thaliana landsberg
aaaatcttatttttttggagtatctgacaaaacaaatattgagtgatttggatatcttatccatcaaaagaaaataagttagaaacgtgggttttgaaaactaaaattttgtgaaaaaaaacaaaaaaatgtttaaagactattttgttttgttgctaaatgacgatgatggttatttctttaaacatttttttgtgaatttgggcgttttatttttaatacggctcaaaatccatcagggatagtatctctatacataaattgggaaaatcttaattaagatctaaaattgcggggaagttta

SEQ ID NO: 63228 - DNA, 616 bp, Arabidopsis thaliana landsberg
  unsure (1)..(616): unsure at all n locations
cgattgaccgagggatcggnnnnnnnnnnnnnnnnnnnnnnnnnnnnnncgatgcacgccggtagtggtttcctcgctcaggcctttgatgccgccgatcagctcggggtatttgtcaaagaccatattggtgaggtcgccgccgtcgtcgaggatcatattcaggggcttgtctgcaccaccgaaaaacagtgtttgttcgatacaccagtccgcttcttcctgggtttgccctttccaggcaaagacgccgatacccgcagcagcaatggcagcagcagcctggtcttgtgtagagaagatattgcaggagctccatttcacctcagcgcccaggtggatcagtgnnnnnnnnnnnnnnnnnnnnnnnnnnnnnnnnnnnaggcagcctgcgatacgtgcgcctttcagtggctggctcgatccgtattcttcgcggatcgccatcagtccgggcatttcggcttcagcaagcctgatctctttgcgcccccatgcggcgaggctcatatccgctaccctgtgggccagcgaaaaatcgatatctgatttggtaacagtactcatatattatggtatattttataaaaaataaaaacggatgcaagggtagcat

SEQ ID NO: 63229 - DNA, 1452 bp, Arabidopsis thaliana landsberg
gaacgtgggctgtgtgtgcattcggatttgacccttctctttatttatgatctccggcttttttcctggtttatctcaagttaatttttgtacctttaggctgttttttctttgtatctcacacaaaacatcagtattcctaaagaagattcattgcctctactattctgtctatccgtagtatgtgtgaaagtctgtttgaagttttgttaaaccattcaatggcctattttcttgtcaggggtttcaaagctcttaagcagactgtgaagatctattatcgtctaggtaaatacaaagaaatgatggaagcctatacagagatgcttacatatatcaagtcagcagtcaccaggaattacagcgaaaaatgtataaacaatatcatggatttcgtctctggatctgctagccagaacactggcctgctgcaagagttctatcagaccactttgaaagcccttgaagaggctaagaatgaggtttagaagctattcattcgttttgtataagctactgattccttctcaatcgtttggtgttgtgaacatatttttttctttcacagagactctggttcaagacaaatcttaaactctgcaacatctggtttgacattggtgaatacagacggatgactaaggtataatgttgtttaatcaaatcttttgactgacgctgattatgtttagtgatcctagtatggacaataacatctattattgcttgccagattctgaaggaactccataagtcttgtcaaaaggaagatggaactgatgatcagaagaaaggaagtcagctgcttgaggtttatgcaattgaaattcagatttacactgaaacgaaggacaacaaaaagcttaaggtaaatgtcataagctacatggtttcttacaattttgagattctgcaattttattgctgcatactttcttctggcttttgtgactgagactcaacaacactcttgaatggatgcagcaactataccataaggcacttgccatcaagtctgccatacctcatcctaggatcatgggtataatccgcgagtgtggtggaaaaatgcacatggcagaacgtcagtgggaagaagcagcgacagacttctttgaggcttttaaaaattacgatgaagctggcaaccaaagacgtatacagtgcctgaagtatgtttcctatgatcttctcatctctttatcctttcttatttgataccctctggtcacttgattattaacatggtataaaagtaaatataaaagatgtaatggatgattaaagcagagcatattatttagatttgacttgggacatggttttaggtgcatatgagcattattcgattactcttgtccagtaactttctgtgatcggtccaaacatgttagagttaatgatctttgttttttttttcttttggctatgcaaaggtatcttgttctggcg

SEQ ID NO: 63230 - DNA, 2082 bp, Arabidopsis thaliana landsberg
tacaggattaatcagtctatgaacaccattttcagttaggtgtatcttcttgctacaatcgtacacatatgaatactaaacacaacaatttgcgtttggcttaattgattaagataacatgcatgtacatggtagttactgaaaataatttacatactaattttgattaacttaatgcattgtaaacccaccaaagaaaagaagtagttttgaaattaaggattttgaaacggggatgatgaatatgatgcgcatgctgacgaacggaccactcccaaattcagatcttgtacaacagtccacctcactttcagaaggatggctttcacatttctatttttagaaagagacataattaataatacctctgtttattaccattatatatgtgttttcatttcacgtgtgtatactagtaggagtatgatatatgtatgtgtgtaacacaaccatcatcatcatcatcattaccatcatcaattattgctcttgttgcatcaccaacctatactacctagtcataagacaaattcacagactcacatatacgtcttgctaaatggcaaaatttcatgatgttttagctaaaggaatatatgtacacatttgtatgcttattattttgggtttcattggttacatttgcaatcacaaaacaaactaaggcaaatggtattggttcaaaaaacattgaccaacatatatgtatatatataagaaaaaacccagctatttacacaaaagaacagctaagtgatgataagaactgactaattttatcacactatgtatatataaaaaagcagaaaattcagctggcctgacttaaaaaataaaaatcttaaaccaaaagttaaatactatattttattatcattatcagcttcaataactacaacatttaaattttacttgcttttctaaaagatgtctgattttttgccccaaaaacaaatgtctgattttgtacgtcattacgcccacaccgattacgcccaacaattatcatgtgattaaaacagctggaaagtttgtgaagaggaaaagaaaaattatgccaactaaatctaaatcaaaatttcgcatataaatcaattgcattcaaatgatgtgccaacgatttttttttaaacacacatacatgatacatgtacactttcaaatgaatatataaaattaagcatttgagtgttctatactatttgcactgattaaagacgaatttgcaatcgcgtaggtgtaatgttaaatatggtatctgcaaaattgcagaaatactgctttagctacataaagaggtaaaaataagggttgttttctttgtcggactaaaactaatttcaagtatttgtaatcttcccagcaagaatattctctaaatttctatttatatcgagcaattattacaagaaccctaagtattcaaatacaagtacatggcaatatgcatgtttcgcagcaaatgacaaaacctgagagtgaaaaaatattaaaaaacatcattaaactccgacgatgatgatggtcgtggtcccaacagtattgaaccctccaggttgtgccaaatggcagattcataaccgttgatggacatggccggcgaggtaacggcacgtgatacgagcatgcatgcaatgtggttatacgtactaatgagtggagagagtaggcttggtgcatggaaatagcaatccacgcgtcgcacgggatcggaacttggtcttggacgatatatcattcgataattcatgtatttaaagtttcagggtaaaacataaaaaaaaaaaagaagaaacaagaaaaatttaatttggaaaagagaaagtgaattgagattggaaggaaaatggaaaaaagttagggcttggacgttttcaggaagaaagacagctgctggtgagcatagggatatgggtcgtgatgaatggtctgaatctacgatacattcatgtacttggttttatatagtaatacttaaatgatttgtctcataaaattttgagtaatttagatgtattagatgaacaaattttcctctaattttagttttaggtgatacatgaatgtataaagtaagcaaaa

SEQ ID NO: 63231 - DNA, 2108 bp, Arabidopsis thaliana landsberg
accttctacaatttacatccacatattagccttcccttattccaatgcgcgtgccacaacagtggtaacagtcacaatcgttgtcaggccagattcaaaattagaaaacacccgcgtcacaatcgttgtcaggccagattcaaaattagaaaacacccgcgaagaagcaatcggggtaaaagagtcttttaataccaccaaaactactctttttcgaagtcctttgcgcaacatcccattttcaaatttctaagagaataagtacctatttagacaataagcccaatttaatattcttattctcaatgagtcacaagttataaaatttaaggaacttttactagtagattttcttaaaatgttagaattatacagcattactcatttataataatgtatttgtaaaaagttatgaaattcatactttcacccctatatatcgtttgtgccatgatataaataagaattccatttattagcataaataatctccatgctatagtatattcctcaatttgggatcctttaaaactcaaaaatatacaagttctaaaccattagtataagacaatccgtatcatcctggtttgattcttattttgttacatttttaaccattcactatagagtacatttttcatttatagagtagtgaaatcaaaaatatattatcgtatcacttaagatgaaaacaaaatatgtgttaatcttgacccctgaggcagtttactcggttcttctagaaaaagttgaaccttatgttttcttatttgaatattttcttttgaagaggaatgatttacagaccaaaactgagtatcatcaagattggttcgaatcaaaacaacttatggaatttggttcacaaaaaaagagagagaaaaacaaacaaatcgacaattaatattttttcgcaaattctttttctcaaaatgtgttacctatattggaggcccatcggaggcccagtatgggttaatattgactgaatgtaatggacgccttgtcctttgctgttaatctatctggacattgtccatatgggcctaaagtagcatggggtcatgcgttcgcaattgtttattttcgtacccaatacaaatgcaagcttacaagatctaaagtttctacttacaacagcaggtattttatcaatttttataaataacaaaaaatctaaaactcattttagtcaaatcagtcagtatcacattcaatacatttaaattaatattgagtttcataaatatttacgaaatatatatgaaaagatttattctttattggatgtctccaaagggacaatatgaaagcatttcagtatttaaagtttcaaacactactcgaagttaaacaaaatcgataacaaaaaatgaaattaagtttatgaattattgttaaaagaaagggtttcaactttcaaatggagatccaatttgaaaataataaaaatcaagtttatgcaattaaaaaaaaatccagtttctatttggtcatttattttactcttcatcaatgtcccctcattttccataaacaataatcagattttaccactatttatatatatttctctcaaagtcatacactcatactccgatccatatagtcgtatcagtaggcaggtatagaaatttagaaatgtcctattatcaaaatgaggttgacgtaattatcaacatgcaatgctttgttttactttatttggttaggtgaagaaagacaaaagcaacattgcctttttcattactaaaactttcaatataagacatccacaaatccgcaggaatagacaaaataaattgtaccaatatcaataaattttttggtcggaaaataattatgtatgtttaactgatttgaatatgctaacaatataatcattttgtcagaaagaggttttagattttgattaagaaatatgaaaaagaaagccaaaatatgctaaagatttatgttctagacagaatgtgaaacaaattagaaagtgatatcaaataaactaataaagcatagaaagcaaaaaaaaaaaaaaggatttaaaggagaacaccaatagtctttcccagtctctaacagtctaactttctgctatctttatgctgttc

SEQ ID NO: 63232 - DNA, 1265 bp, Arabidopsis thaliana landsberg
agattttcggtcaggcatgctcggtattgcaccctttactgggacacaaagagaggcagctgcacctgcaggcccgggaaaaaaagtgagacaaaactaatctgagatatggggttaggaaaccagatttatgtcactaattattaccagcaaatctcaagcattcctcatgggacttgccctctaccatagcgactgcaaatgctgcagtgaaagtatccccagctcctgtagtatcaaccacttgtgcagccggtatgatagactgctggattggtttttccccttgtatgaatagtgcagatcctttggacccgagtttcactagaacttgcttcactccctgaggaaaacatagctttaaaccttataaacccaaaaaagcctctttaaagagtccagttgcagcaagaataagccagaatttggagttggtaatgtgcaaaaaaaagggacttaccaactgatggcactttgcaacagcttggctaatctgttcaaaagtttcagttggcattcctgtcaagcgactgagctcagtttcattggggctcaagatgtcaatggaatccaatagctcatttggtattggcgtatccattcctcccacatcaaggatgactggaacacctgctttcttcacagcctgcaattaaacccaccaccagcctaagtttctttgaacatgatatttcaaacataatcaactctataaccctattccaaaacctctcatagttttcaaaacctaaagcagctgcatccattcaacagagcttccctaaaccctaaaccaactctcactaaagtaactaactcaagaaagtcaaaaaatggaccttagcaacttgaatattgatggaatctgggatctctctttgcagaaggacaataccagcattcctcacaatctcaagatcatcatcgctcattatctcaggccaagctttcatatttgcaccaccaacgataatgatcgaattctgaccgtccgactgaagcatcaccaccgcgtgtcccgtcggctcattattcacagatctcacgtagtccaagtgaaccccacacccatcatcgcccaacgcctcagctataagcttcccgtgcgcgtcctctcccaaacgaccaacgaagtaagtcggatacattaacttcgctccacacgccgcctgattcgcgccttttcctccggcgagcgtttgccctgtcttcgccgaaatcgtttccccttcttgggtaatctctcgatctccacatagatatcg

SEQ ID NO: 63233 - DNA, 1816 bp, Arabidopsis thaliana landsberg
atcataacaaattattaaaagaaaataaacaaagtgattttttttataaatgtttcattcagtttagtgtaggcggttttatatatacagaacatgacaaaaaaaaattaggttaaggtttcgctttcaggagaagaaaagcgaaatattcaagtggcagttggaggtgctaagtttttgattcgtttagtttaatatgaatgttagtatataaatgttatcacgttcatgttttcatcacaatcaatcgtggttttgcctcaccattttgtttttgttttggaaaatgtatattctaattactctgaatataactacatattgatgaaaactcgtcatatttgacactgagattatatataccatggaaattttgattagtagaaaaaagttgcgcctatttaaaattaattcgtaggctcatataggataacgattgaaggtcataaatcagattaattactaccacttggttggataaattattttcatcacattgtcggtagagaatatcacattgtacaaactaaaaaacgtattattttttctcatataaccaaatctagaaagtgtaatttggttatagcttagatgtcgtttagctaataaatatagaaataaaataatagagaaaggagagttagtgatgaatgattgaaatggtgaatgataattgaagaagtgggccacgtgagagaagcatgtacttttggaaagtgggtcatttcgaagctcttcctgtctccatccacatgaagttggcattcttgtgtctttacggcctaagtttgcgtttctacctcttgagaaatgaatcttgccttcttgtttagtgactggtacggatctaatagtaacatgacaccatctcatatttctgaattggacgtctttgaattgaataccataacctaggttatagtctacacctacaatattacgtgccgatagatcaacatgcatgatccgtatagtttagtgatctcgttacgtcgttatatcaattggtgaaaatcattaagtgtttttttaggagtgatgaattactggtacataaattttacgtttcgtttagattttggaagaccttgacgacacaatggtagatgttggtaaatggataacgcatgcaacaaagaaataacgatacaacaacaataatgatgacttaaaagaagaataaaataaataaaagtggcagtcataattcataaaagcctaagctaggaaattcttatatatggtagaccagaagggacaccttcgatgagtaaatctgccgcaccacaatcttacatcattctcttcccctaaacttggacctcctccattaataaataagaaaactgcaaacattaatcttctaattgtgattttgttacaagttttagattctttacatatgtttcaaattatcagttactgttctttcatacatttcactaatttacaaatatgtaagaatgtaatcaatgtaatcgaataagaatacatcaaaaacattaccaatttgattgacatttacctctgtctattcgtcctcaacattattatcccatccgttcatacaaattgacattttacacttaatttcgtatatcatgatcaatactctctcgcatcggatacttaatcaattttcggattaaatattctttcgcatctttgtgaacgcaattagtgggtggtttggggttcccacctttggatcctgcctttattccacatatagcagatcattggtcacatatccttacggataataaattattgttatctggattgctgtcttattggcattctattgataggtcta

SEQ ID NO: 63234 - DNA, 791 bp, Arabidopsis thaliana landsberg
gatgcgacttccaagcttcttctgactcagcggatctgtatgaggcccaccactccttggagatctacggtcaaggccgagctttggactccggtctgtaatcggacggctgaggtgatgcggatcagaggaagtggacaacagtgatgtccttagcctaggagattgcctctgaggcaactctgaacctctaatactactcacagatcaaagaagacacatatcagatcatagagactaacaacaagaaaaatctaaatcacatttttcatcaagaattgaagtaaaaccctaaccttggttttggcattctgatttatgcaaagttgctgactctccaaaggttaatgatctgatgaaaacgaaaacattcctcagaataaagcagatatatgaactggtaagccacgcgccactaagtgagagtgagaaactcttaaacagattccactattggagtcaaaccagacacaagtgagatataaacaacacattgcttttgcttttactcaaaaacgctttagaagatctaagataacaaacttcaatctttcaccaaacgctttagaagatctaagataacaaacttcaatctttcaccaagacttgaatcagatttctcttgaggaaaagtttcttatcttgcatacacacataagtaaatgggttggtctaattgtagaaactaaccttgaggataatgtagagcactttctggggttccacctgtggaattgaatacgaagaatgattgcgatatagtcttaacaagtaatgcaagcagagaaata

SEQ ID NO: 63235 - DNA, 1371 bp, Arabidopsis thaliana landsberg
agagaattaataaagagggcaaaagaggaaattgtttttgaatatgctgctggtgtgattaattttgttgatagaaacaagaacacgaagtcaagaaaacccaaaatgtggagaaaagagaggtcgtagctttatgtccagagagagagactctcaattcaagaagcagagagatattgaaaaagtagacgttggaagatttgaaataaagctggtgaaagtgaatgacctttgggggaagataaaggacaaaagtgtaatttacatgtcttggagggtgatgtcccacatttacatgtaatcataatgttttgtttttaattatcttttactacattaagatttccgtatctttgcatgatttgattataaaagttgccaaattgtaccaattccttcgttcattggaggtttttttaaaaaaaattctaacggatttctactgaatttcacaaaatgtagtacaaaatttggcgtaaacgacagccaaaaaatgggaaacaaggcaattacacaagaagttaagaaccctaaacctaacatacgagctaaatataaaattttgaatcaaatcatgttacttctatttataaagacaaaaaatggtttaagagataaataatttattacacgcatgtgtgggtacccttatcaatcggtctgacattgtttctttctttttgtcggtttcaacaaagttcaaactcttttcttttagtttctcttcttctttttatattccaatcgttctctttttattttttttactttataaaaccgtaaaccaatatattgatatatgttaagcttaatgtatgaatatacccatttttatatctattattttaggtttcaatgtttcattgtactttaaatttggaattcctaatggtaaatatcataacactactatatgaaaatggatataatgtacaacatttcagctttatattaaagaaacccatacacaatgttgaaaaacaaaaccccgtaacaatctgtgttcaagatgaaatatcaatcactactaattatttttatttcacttttatgtgccaactatctatttatgttttttacataacgttaatcactcactacatttttgtagtatagagtaaaagttgacaattaaaatagtacagagcaaattgtaagtaaaattcagcgccactatgatttttgattgtaagtagcatctacctttaacttttggttctttttatgatgatgttgttgataattcaagtaactaataagagtactacatatcaatcaatacccaaaagaacaaaaaaaatcaagatactgagttttgggagttgtgaaattagaggcccattattctctttttcgaacataaattcatag

SEQ ID NO: 63236 - DNA, 783 bp, Arabidopsis thaliana landsberg
  unsure (1)..(783): unsure at all n locations
tttcaattctctagcttttattgttgattattagtgttgttgtagtggaatactgggtcatagagggagcttcgagtttattgtaggatttatgtttcttgattgatacatacctttgatgtattttgaccagtttatttggtgttgatgctgtttttgtaatgcttacatatgaccaggtgagaaattctctgagattgttgggagtccatattacatggcacctgaggtgcttaagcggnnnnnnnnnnnnnnnnnnnnnnnnnnnnnnnnnnnnnngattctttatattctcttgtgtggagttcctccgttctgggcaggtctgttaaccccttcctctcttctctagtctttcgatttcctctgccggagcatttgctagtttttcgattcctctgccggattcttataataccttagcatgctagtcttttgtaaattgtagtttcagccagttttttctttgaaccacagagtcagaacagggagttgctcaggctattctgcgtggagtaattgattttaagagggaaccgtggccaaacatttctgagaccgctaagaatctagtcagacaaatgttagagcctgatccaaagcgtcggctgactgcaaagcaagtgcttggtacatagaagctacctttgccttatgctctttctctctgcatctgttattatctcttttcccaattacttcactgatctggaaatactccaaaagattttttttatgcttattcctgcttttgttatcgtttctcatttgctagagcaccca

SEQ ID NO: 63237 - DNA, 606 bp, Arabidopsis thaliana landsberg
  unsure (1)..(606): unsure at all n locations
gcaaaatacaacnaaaacagcgggcaaagcccgctgnaactaaaacaacaaaacttacacaatctcntatccaaaggcnnnacngacggccnctagcaccngaaccagagngctcgcanccngacccccngcagaagccagaacccagctgccaccgccaccnccnnaaataaggggcgcaaaagannananaaccagccgacccgcancaagaaccaaacncnnaccnaccnggagggccgganctaaaaccaccaccacactggcttttccctggatggcagcagtcaggacaattacataatctgttaattcgtttttaagcgcaaaggccagtttcttaagtccatcggcactacttaactcgacctttgctcctataaaattgacgccacccatcgtggtcgctttattcttaagatccgcagccaatgcactgatttctttggcttccaaagacgtaagtttgctttccaaggcgcttttttcttccaataatttttcaatagccttaatcggatccttggtctttaaaatgtcagcaactgctttatgtgccttaccttatcggcaaaatacctgatcgctgcaccgcctgtcaacgct

SEQ ID NO: 63238 - DNA, 662 bp, Arabidopsis thaliana landsberg
gcaattaattttcttgccaccaaaattatgtaaaatattttattatatatttcatcacaaattgttgtgtatttagcgattttgccttcttaattgtattagataccttataaacagtctctatccgatgtgagagcgaagtctatgatatgcaataattttagtttatatggtctatacattgtgatattggatacacacacacacaaacgtacccggttcgtgtttcattaattataattacgactgggtcaagatatatttgcacatactttaacatttgacaatatcaatatataagtacattcctaaaaacttacaaataattctatttcaattgtaaatcttgactaacaggttaaatgtatcatatctatggatatgtctttgagttgactattataagcaccaaaatgtcagtcatggtttaacttattgtgaaattaagtcagaagttcatgttatccctttcaatgtctatgtatatctattaacagtcaaggccggtaaatcattacaaatctcaaatgttccacgtcctaacttgagtttggaccgtaacctagggaatcttttcggaatttcgatggtcgccattttcttttctgtaagatcaaaacatgtacgtcaggtcgtcgtcgagcaaaaacgacaaatatttg

SEQ ID NO: 63239 - DNA, 1430 bp, Arabidopsis thaliana landsberg
catgaactattcgagtagacaaaagagattgcttcaggattacggtcataagtgtgactgtgatcggtgcaaagtggaatctagttggtctgaaggtgaggaagatcagaatgagattatggaagagatggaggatcaagatgaacaagaagagatggaagattcagtaggtgagaatgaagaagaagtttgtggaaatggtgtggatgatgaatctaattttcctcatgcttacttttttgtgagatatatgtgtgagaaggagaattgttttggcactctagctccgcttcccccgaagactcatgatgcttcgagagttcttgaatgtaatgtttgtggaagcgttaaggaggatgaagttggcgtaaatcaatgaggaaggttagcttaaagaattgatcagccgaaaatctcaagcttgtttgatgcagccagacccaaacaacaagagacttgtcttggaccacatcgttaatcaatgttgtttgatgtttactttttttttttactcagttttgaaaattcgataagtattctagctctagaattccatatctaggttttttgttttctcctagatagtctgaagaatcaattgtaatggtctgtggaattacacggaaacagttttgttgtaataatggagcatcagttttctttggttgaatgaaaaatcataatttttttgactttttaagttgaaaaatgcagaattacatggcttgatgatgtttgcattgttaatctctattactcttcagtgtggtcagtgcctgaaaccatagcttccttgatagggatcaatgtcttggtaaaccaaattgtgtaatagtttttccataaaatagattcaatagaaccagtgtaacaaaaaattattagggggctctgttttaaggtcgcaacatgacggtgacacaaacattttttagtgattaacttgttctcattctgttccaagttcaacaacacaaactgagttttttggcttctctatcagagaactaatgtgattctacaacacaacctgctctgactgacttactctgctatgttctgttttgctctgctctgttctcacttccacgtctctgtttttgtcattgacatttcgacttgtaggaacttaaacatttagtggattgactggcaagattgatccaaccttttccaatcttacatccataaataagttgatattttttctggtttttatttggcaaacactaatgcaccctagggttcaatgagatatatatatattacactaacacaagtacacaaccaaatgttattgtagggacttgtaataatttaacagacccagattcctcacaaattctaccaaatttgcgagtcattcaagctagcaaacattatcatctataaataaatagttttctacacatagtacagtacataatttt

SEQ ID NO: 63240 - DNA, 706 bp, Arabidopsis thaliana landsberg
ttggatgctacaaacatactttataaacatgtacagtcttaataacaacaaattgaatattaactgaaaactctaaagattctcaaacgattgatatattgttaaactaatcacccaaaaaggaagagtcttctaaatcacaagttaataaaacaaatgaaaaaagtaaattcactccccctaatcttaaatcatatatgtggtgaagactaatataggaactaatggacgagtatggtttcaacttgcacaacaggaaactacttcgctttggctttattctctttgaaaatgattattggtgtctaatatctgtagaatttttattttattttttaacgacaaagacatatgaaaaaatgaacatattcaaattgatattcataatgtgaagtaaacgcagaaaattcaatgtacgataacctaaccacaaaaatttctgaaattactttttgtatattattgtgaaaaaaaatatcgatcgtgaatacaacgaacacattatattttcaaattcaagactttaaagaaccaacattatatacaaacaaatgcctcaatacttatttagaatctatcataacactaggctttttgacgacttaacgatttgactatcaaatatcttggctttagactagaatatcaagaaatcctccttgatgttatattgcatcttttacaaattcggctgaaccgcatactg

SEQ ID NO: 63241 - DNA, 1491 bp, Arabidopsis thaliana landsberg
ataatttctgaactgttgtgttccctatttataaagtttttctagaaatcctttaggctttgcaaatatgggctttatatgacagaaatgagggggtcattcactattctggttatgtattaattaaagcccattgggctaaagtttcagtgtagcagagatgtttccggctacgataaaatgtccacgagatgcgagacaaggcgaagacagagctaacttaaggaccttagctgaagcggattctatggttttatttctttcaattttatgagaagaatcttgcgttttggattacgcagcttgatcgtttgtgtagttttaaacttgttaaagcgtttcatcacagtgttatgtttatgcttttgagtgctcaaattgatacatgtttcaacggatcagaatttgaactttaaatgtgtttcatggtgatgtcgccaaatattattggttttgcataacgatttgtgggttttgataatgtagctaggtggtgagaatatcaacaattatgttgcctttgatcttctctttaatccaagaaaatccgaaacagctcacaaagcagcaattgcttgcttacttgtgagttgtgattgcaacagagttgtttggtaaacatatcaatcactcctatattcacgtagtttgttctcttattaatacaagaagatatttttggtaaactgatgtgacattagacatcgtggtactttgaacctatgtctctctttgcccttctcaaaacatacaaaagtaaactcctttggaagatgctactggatttttctcggaaatggcaccaatttttgtagacattggtttctgcttttgtcccaatatcacatcccttcttgaggaatgtttcaacttgcattaataaagaccaaatgatataattagaaagagtatgtactttcttactctgaattacgcattctaagttaagttaaacaaactagtccctactacatatgttcactacaacaataaactttgttcttgtccaactcttttcctaaaggatttgactaacttgggagatgtcaacattagacatttagtgattctatcaaatagggcatgtccattccagcttggaggataacaaagtcttatgattgtaatccatattcaatgttctttcttttggttaggtgtgtcgggtcgggactctagacaaaagctacagtaatagacggagcaatccattagagtggaaaaagttttccggattagggaagaagacaagcttatcaacagacaagttggtggtccgaaaactcataccttgcttctgattacgaaaagcctctctcgctttttttcattgtctctctgtttatttgcttcaaatatttttgacaaagaggtccaattaacttgtggtctcattgcacacatcacataatatcccacataatcatttgttcgagaatgtggctcatatttgatctagagctgaattatgtcaatgaataattgagaagc

SEQ ID NO: 63242 - DNA, 1520 bp, Arabidopsis thaliana landsberg
tataatcctctccgtcgaataccgtctagctcccgaactccgtttcccggcggcgtacgaagacgccgtcgaagctatgttatggctccgtgatcaagctcgtggcgcaatcaacggtggtgattgcgacacgtggttaaaagacggtgtcgatttctcgaaatgctacgtcatgggttcaagctctggaggaaatattgtctacaacgtggcgttgcgtgtagttgacacagatctttctcctgttaagatccaagggctgataatgaaccaagctttcttcggtggcgttgagccgtcggattctgagtcacggcttaaagacgataagatctgtccgttaccagctactcacttgttgtggtcactttgtttaccggacggtgtagatcgtgaccacgtgtacagtaatccaattaagagcagtgggcctcaggaaaaagataagatgggacgttttccgtcgactcttatcaacggttacggtggggatcctttagtggatcgtcagagacacgtggcggagatgttaaagggacgtggagttcacgtggagacgaggtttgataaagatgggtttcatgcttgtgagttgtttgatgggaacaaagctaaggccctgtacgaaaccgttgaggcctttatgaagagttgttcatcaactggcccatcgtccaactccaacatgtagtagtctgatctaatcatgttttacgaactatatatatatctagctaataattaaattcctacaactattatgcaatttttgttgttttaagtcacatatgatatctgtggtgcaatggaaaaatgtataccctttcaataaatatagtggatgcaatttaatctatttactaatactaattttaacgatgtccaaagagaattggatgttctgtgagctacgttttattaacattttaaattatgaattccaccaacaaaaaaagatagattttaataggtgaacatactatcattatcatattatgattagctatttacagaattgtttgaataattcattaagaacattgttagattctttttgtatatatacaacaataaaatgctaataattccatctagtttagtttgtagaacatgattcctcatttagacaaaatataaaaacatttcttaatttggtcaataatcaatatccctaaactgcgtaaaatcatgaccacaaataatccgtatattcatcctaatcacaacttaagctccattaaacgtaaaacagttacacacaacaacaacaacaaaaaagtaagaaaagaaacgaaaaaaatcctaaacatttcttcttaggtcaaagttaacttcctcttaatcacgcaattaatcataaaaccatgtcacgtgactctcctcccgcatttgatccatacaaacacctcaacataacaatcaaccccaacggctcttgcacgcgccataaagtttgacacgatggttgaacccgacccggatccatgccccggcaagctcgccgcttccaaagacgtaac

SEQ ID NO: 63243 - DNA, 278 bp, Arabidopsis thaliana landsberg
  unsure (1)..(278): unsure at all n locations
ggacgancaggggccaacaagacgggcttacacccagnaaacccccccccgcccggcaccaaacaaaagaaaccgacaaccaacggacacaacggaaagccaaaacggcccacaagcgaccaccaagcggcgcaaggaaacccacgcgcccacaaanaanagcaggcccaaaacgaaaacaaaagaaaaaaagacgggaaaaagaaaaagaaaaaacccacggcagaccggcacacagccccgcaggacacaccagggccaaccccaaaagcaaccaa

SEQ ID NO: 63244 - DNA, 692 bp, Arabidopsis thaliana landsberg
  unsure (1)..(692): unsure at all n locations
agattcctattggtttgtgttttattaaaccccagtgtgagtgtcacattgctaataagggttcctctgaaactacttactcgcaaagatttggctttagatgggatggtcatttctcgatataatgttatattgaccattggagttgtctctgcttatgtgtactttctgtgttcaacattgcataattcaattctgattacatcatttactgattccaaggttgaatatttcctcatgggctgttgctgatgcgcagtgtaagttgagtttttttcttagttctgtgaaagccatgtacatgttttaaaagggtgttatgctttgtttctcagatggtgatcccaccagcagtgagaccaccacgtctcttcgactacctaaaaccttacgtgctgaaaatgcatttcacaaacaagtttgaccacgcacatgtcatccactcaccaacagccacagtggcttgctcagcgagctcgcaagagacagcattgagagaaacaatggacatcacacgcgacgtcgctgctgcttcaaagattggtcaaattcttggagaaagactcttgatgaaagatattcccgctgctactattcagatgaagaaagaacagaggtatcatggtaaagtcaaggctgntatcgattctgtaagagaagctggtgtcaagttgctctgaagattattcaat

SEQ ID NO: 63245 - DNA, 698 bp, Arabidopsis thaliana landsberg
aaattgctcaatgtcccttcatgccccaattgattcctacaatgtattaaaattcaaaaaacattattttattttttttggtcacttgtggcggacaaaatcagggtttccccacaaagcaagctccatatttaatatttaaagtaattatatcgcattttctccaaaaatcagcatatcaatctcacatttaagagattaatctagattaaccccaaaaaacactaactacaaacgccgagtttcaaaatttaagtgtgttttgacaaggaaaagatatattgaatgtgtttgttttattcttgattactctatggttaacacgttttcataagaaaacaataccatctgttaggtataatttatagtttgaccaaacgaatatatatgcattttgtgttacatgatcgatactcaaagacctatctatatattaagagagattcattagaggaaacagaagatacagctctttaacaaacttatacagtacagtttgaatttatgatgtattcataaggtcgaggacgaaaactctgaaataaaaatttcgtgtttttatgaaaatcatgaaataacgtaactagtttgttgtacagagttaaacacactcatttccacatattagtattgtccaacaatattagtgggcataattgtttttattagttttaacaaatttgtcggtatatgaaact

SEQ ID NO: 63246 - DNA, 669 bp, Arabidopsis thaliana landsberg
ctaaattaataagcatcctaaattttaaattatgtttgatgtttactcaaagtctcaattcccaaagtgtcgctgggaattatgtttactcaaagtgtcgtcaatatattatcaagaaacaaaagattcataattttcttggtcatgtcctcttttgctctttcaaaattcgaatttcaatgctgcattctaacacccaaaatctgttgcccactaaaagttatttcattatgtcgcaatcactaataatgaaaatgtctagtgacgtttaatataacaaaaatgtatataaatctgttttctaagaagaatcaaatttcgctatcccacctataaaaaaaatacaaaagaaaacgtcattgaaagcaatagtctgaatttgataccttcaacgacattgcaattcaaagtctattagtattatttgtcgcgtaataaacttcaaaatttggggtcgtatcttgtgcagtgcatatagacaaaaaaagacccccataaattttcagatttgataataaaataaatgtattcaaatatatatgccatttaagtacatatcacaacgcagaacgatgaatacgatgtgtgaattcacgatttacgatgattgcgtccaagaaacgttacaatgtcgctatccaatatttatacaaattttcgtcttgatta

SEQ ID NO: 63247 - DNA, 1864 bp, Arabidopsis thaliana landsberg
ggtttaaccaagaagactatataaaaatttgaagtcgttttcaacttaaaaaatggattggctaaaaggtgaaacttttgagaagtaggggagagaatgaactttatacattcaaacaagcatagaaatttcaaaatgatcctcaaaattattaatattataataagtattaggaaaagtaactaaatggaaaatgcccactaacaaagtactttatcccacaaggagaaattaacaaatattttacgaaaagaaaaagatgtatatgtatgattggtgtccaacaaattagaaggatcaagattaacttcgtccttcttatctttttggcggacactttcgccttcttcttattcttaatttgataaaattatgtctcttaaaatatttaagtttctacaaacacctttaaatatacaatataataaagtagaatgtctatataaaatctcctcctacgatacttcatgttatttgattttcaccattttattctgtcttcaacttctatttttaatgctttattaatagattggtatagatacctgatattgatgtataactcattttactatatatataatactactagacaaaatatctagaaagctcaaatggtgcaaaaattatatatgaaaaagtcttattttgtataaatggtgaactgcatgttttctttctttttatctctttatgaaacttgtttcttacaagaaatatgtagcaagcaatatacgaaactttgatcgatattgtttactttgaggttgataatagaacttaaataaaaaaattagaattataatactttccactccgaaactcatatgtaaatatgttggtaaattcaatatagaagtgtgaaaatgcgtaatatagtgatattgttttataaaaatacttaaaattctctcttaatttccaaaaccattaaaataaaataaaaacataccattatcactcaaatttcatatcaaaggtttttttaaaatcaaaattagtaataaatactaaaagttttaaataatattggaatagatctcgtctgtcaagtccacgagagatctctaaatacttgatcttgaatactaattcatcttagaggccctagaattagtaaaagcaggagtggctaacgcatcagtcatctatcaagatactggtgagcaatgagacttgttatgcacccctctcggcatggtacaaaacacataattatttgattcatctaacatgttcgttcttgtagtgatattatagacgctagtgtgcttatccatcccgtgtatgaaaccggtaaatatatgactacgaataaaacattatacactttatacaaaatctatcataatcggatccccaatcttaggagaatattaatactccatactcataaaactcacctaaacacataaaaatttgttgggtgtctttcataactttctcttgacttaagtgtcggagattaattaaacgacaaaggattgtcctttacgtggtacatgtttatctcttgttcagtatatcgtccacattcacgagaagcaaacacaatgcagatgtcgaaaatttggcaggaagaactatctttttatattaaacttgtaggagcttttccaaaacataatgtttgtggttttttttgaatatatatattctaaaagtcgatcataaaagttttaaaactaaaacattatttttttgattggtgatatatataattttgtgtccgacaccttaatagtatttagtaatataatgggtgtgcgccatatataaattgacaagtgacaccaatattttaattcttacacacaatctatacacataaatctcattcgatccttacctttgccgtagcttt

SEQ ID NO: 63248 - DNA, 705 bp, Arabidopsis thaliana landsberg
ggacgatacggagaataatacacatgtacctatatatgtctttatttgagacaacaaaacagatacaaaatcaaatttaaagtcatatgataaaataagaataaatttttgcatatcgttataatgattgtcacttacaaaaataaattttgaaatttttagtatgtcatcaggctattcaataaaaatattattggattcatatctgtttttattgaaatataagtatttaaattatatatagtagataaagatattacagtcatcacatttaattaataaaaaattgcttataacttcatttcaaagtgttagatagttttaaatttactacttttaagttaaagctagagagatctcttgttgaagtgtgtaacataatggatagtgggaaaaaaaagttttcattagaaaatacaattactagtttaattgcaacaaattttggtgtcgttatgaaagtttgttgattcagagattgattatttttcattaggattaactttgctttcgtcactgcaaatttccacataacaatacatattttactaatagaaccgatgatatttttttattcataatatccaattgtgttaggaatcgaaaataaaacccccccaaaatatcattacatctttggattttaatcagcacaaaacgagagaaaaaaaaagatagaaggataaaaggggtaaaaaaattttt

SEQ ID NO: 63249 - DNA, 749 bp, Arabidopsis thaliana landsberg
tcctatagtacccaaaaattctcttattaccaaaacactcccataaccaccaacaagaaaataaaaagggcatgaattttccagattcttcattgttcacaccaaattttgcttatgaaaatgatttagatttctctagtttgatcactccttcaacgcatgtatcattccaagaacctaaaccatgtaatccagtcattcatagtgcagggattgaaaacgatggaagacaaaactgtgagacgaccatgacattaagcgaaatcatgaaaggagacgatgagccgaagaacaagagagctaaacataaagagcttgagagacaaagaaggcaagaaaacacatctctattcaagattctaagatatttattgccatctcaatacataaaggtaagtaacattttcaaatttttcttatacaaattctgtctcatctcatgaagtcaaaaaatttctatagattatatagaagatccccttagtctaatcacggtaattaattaacaattgtgtaaatagggtaaacgttcctcggcagatcacgttctagaagcagtgaattacatcaaagacttacagaagaagatcaaagaggtcagcgaaaaaagagatagaatcaagagatctattactcatccatcatcaaccaggagaattttcaatatagaacattagcattcatcaccttggttcttgcgttgggagacaccccccattggttgttggtcgttaggcctttggtttgat

SEQ ID NO: 63250 - DNA, 1128 bp, Arabidopsis thaliana landsberg
tgtgtatatcgctgcagaaaacaaagtaaacgaggatgtcgactggtatggaatactcaatgcaagtcctcgggatgatgatgaaacgttgaagagaaagtacagcaagcttgctctaatgcttcaccccgataaaaacaagtctataggagctgaaggggcattcaaacatgtttctgaagcttggaaatttttgtcagataaggaaaagagagcagcttatgatcgtaggaaaagtttgcactcagtttatcagaaggtctcagtttcatcttctaataacgggttctgcaatttcgccaagactacgttcactacaaatgcaaggacgacgaccccgagaaacaatccgccggcccagaagaccaatccgccagcccagaagaccaatccgcctgcccagaagaccaatccgccagcccagaagaacaatcctccgacccaaaagaacaatccgcaaaagccagttggtactacacagaaaacaggacgtactgataatcacacaacaacaccaaactcatttactgcatctgggtcatcagaccaatcaaagtcgaatactttctggacagtctgcaggagatgcatgatgcagtacgagtatctaagagtttatgtcaactgtaaccttcggtgtcctaattgtctacagtcctatttggcagtagaagtccctaaaccaggtatttcaagccgttggagtagttgcagccgtctaaagtcagctgcaaaccacaatactacttcaggtttatttaataactccaagtggacattctcaagaaccagcagtgcagctcatgctgcaagtgtggttcaacatgcttatgagaaggtaaagaaagatcgcgagcaggcgaaagcaaccgcgagaagagaaaagaagaatgccaaaagaaagagcacaactgattcgtctgcttctggtagttcgcttaaaaagaggaaagtttgtttagaaactgatatcggttgctctagtggaagagaggtcacttaccgtgtgactggtgaaaacggaaaaaacatggtaaagttagaacatgggaaccaaagagagtgtggacaacgttgtctcttagaacaacccatagaaagattagcaaggagaatgttacaagagag

SEQ ID NO: 63251 - DNA, 552 bp, Arabidopsis thaliana landsberg
  unsure (1)..(552): unsure at all n locations
ttgccaccaccgagggcatcaagagccgggacgtgcaggacctcgtgattacagttgtcgagaaccgcttcggccgcattaacatgctgtccgaacccatggaatggctgaccgacaacgggtcctgcttcatcgccaaggacactgcatccttgctccgcgacatcggcatggaaccgcgcacgacgccggtgcgaagtccgcaatcgaacggcatggccgaggcgttcgtcaaaaccttcaagcgcgattacgtctcggtgaatccaacccccgacgccgaaaccgtcatggcgcaactgccgttctggttcgagcattacaacaatcttcacccgcacagtgctttaggatatcagtcaccgcgcgagttcatcagctcgcaatctcaaacctgagcatgtccggtcttttgggggcaactccagctgcgtaatccgtgaggtccgtttgagcgtcgcagagacacgcgaatcgtagtgctacgcgatgaatgctgccggaagcatcttcacagagagaacatcggncgacattcttcgtgcgcaagac

SEQ ID NO: 63252 - DNA, 219 bp, Arabidopsis thaliana landsberg
aaggatggaggatcggattggaggtaggcgaagcggttaggatattgagactgaagaatctggagttcctctttagccgtttccactagttgcatctgccacgacgacgacgaattcatcttctcgaaaaaacaatcttctttcttcaattctttcactccccgagaaaagaaaactaaagagagtaagtaattagagagtggatgagtgtggttggag

SEQ ID NO: 63253 - DNA, 387 bp, Arabidopsis thaliana landsberg
  unsure (1)..(387): unsure at all n locations
caccgggaaaaaaaccaaccaaaanncacaaaaaccgcaaaaaaaaaccacacagacacccgccnnaggcacgcagacccaacccaagcacancagcgctcacaacagaaacaaaancaagaggaacaacccccaaagaanaaaaccccaacgacaaaaaaaagcacagnnggctaacccgccngcactnncctatacacgtgactaatacggacaagcatactaatatttttaaatatacgtaaaatgattattatagacgttttaaatgcaagcatgcccatttttttttatgaaaatagaaaaaatatttatcagagattagtttaagcttctctagagttatgataaaaaatcaaaattcattaaaaaaagaaaaaaagagga

SEQ ID NO: 63254 - DNA, 429 bp, Arabidopsis thaliana landsberg
  unsure (1)..(429): unsure at all n locations
caacaannnnnnnnnnnnnnnnnttttaggataagattgcggtttaaggncttatttttctacatttcttcgagaccacaagacataggccaccccgaaccattgaacacgctgctccgcgcttcccaacactggggagggggggaacacatgtgcgggggtccccatattgaggaggcgctaacatggaacacacgccgtgggccccgcggaaaaggtcgcggcccacgcgcggagaggggcggtgcgcatagggcgcgcttttgctctctctctcactgtgacccagtgctctgggtcgctcctgtggagagcgcggtctgcccacactcaaggggggttactgggttccacactgtttcgggggatcccccgcgaaagcacgtgtgctcaaggggccggcaaagggcctatacccgaaaatgcgcc

SEQ ID NO: 63255 - DNA, 1840 bp, Arabidopsis thaliana landsberg
ctatgcataagttaaggccttatttgttaatgatctttttgcaatttggagcagcaggaacatatattgttattatggccactcttaaccaaggccagaaccgttacgtcgtaattgtgtatcgtaatcttgtggctgctcttgtccttgcaccttttgcactcatctttgaaaggtcagtctatgtttaaacaatatttataatgttcttcttttggacacagtactactatacatttcattgtttcttaattagcatgttgtggtctaatatgtttcttcctgttactaaaacataaaatcggattattttggttttggttttgtaggaaagtgaggccgaagatgacactatcggttttgtggaaaataatggcacttggtttcttagagtaaggactaagctttccatttcacattcttaagtcaaaacaataaacattatgttttggggaaaaaaaacaatgatatttcataaagttgcaagtaccttaatacatatatgtttttgtcccggcttgtgtgtaggccagtcttggatcagggttttggttacttggggatgaacatgacatcagcaacatatacatctgcgatcatgaacattcttccttctgtcacatttataatagcttggattttaaggtaatctatggtttaaactttgaacacatctttaaaaccgaattgattgtaataaacgggtgatatgtgaatagaatggagaaagttaacatagcggaggtacgaagcaaagcaaagatcattgggacattggtgggtcttggaggggcactagtaatgacattgtacaaaggtccgcttattcctttaccgtggtctaacccgaatatggatcaacaaaacggacatacaaatagttcacaagaccataacaattgggttgttggaaccttgttgattctcctcggttgtgttgcttggtctggtttttatgttttacaggtacgctccttacttttttgatcatacgtaatatatacttatcaatccacaaaccaagtaatataaacttcgaaatttttgttaattggttgattcagtcgataacaataaagacgtaccctgctgatctttcattatcagccttaatatgcctagccggggctgtccaaagcttcgcggtagcgcttgtggtggagagacaccctagcggatgggcggttggttgggatgcaaggctttttgcacctctttatacagtaagattatatatattagttttaaccataatcaatcaattgagacaaatatcaacaaatttgatttaatgaagggaatagttagctcggggataacgtactatgttcaagggatggttatgaagacgagagggccagtttttgttactgcctttaaccctctctgcatgattcttgtagctctccttgcctcttttattcttcatgaacaaatccatttcggatggtacgttacataaatgtagacacattacattagtaaccatcaaaatacttattcttgatccttatattttggttatgtttcagtgtaataggaggggcagtgatcgccgcgggtttgtatatggttgtttggggaaaaggaaaagactatgaagtatccggattagatatccttgaaaagaatagcctccaagaattgcctatcacaactaaaagtgaggatgacaacaaattggtttcttctataagcgacaacagcaatgtgaccattcctggtggtgcgcatagtaacacatctggaatataagtgaagaaagcatttctcgagttataaatacatatttgtattcgactaaaataaatacatatgtatttgtatgcatttggtatga

SEQ ID NO: 63256 - DNA, 349 bp, Arabidopsis thaliana landsberg
  unsure (1)..(349): unsure at all n locations
tggtatttcctaacatgttaactcgaaacaaattttattaagaacgacaagaaacctaagacttcattattnttctatagggcatagaatagatagtataatctaaagcagttgtttatatgatacaaaagataagcagaacaaaaggctaaaatgataagcaagcagaactcaacctcttgattattttgttttcacctgtgcctgctgcgtttagatggtggcatgttcttcatgttgagtcccaaacgctttcataaacctggtttaactctcttccacactataagactgaactacatgctctcaggccgcattaggagctactttctccatctcagaacaagac

SEQ ID NO: 63257 - DNA, 489 bp, Arabidopsis thaliana landsberg
  unsure (1)..(489): unsure at all n locations
acaaaaccggacggaacgatcgaggcagcggaaggagccataaaaccacgccttgtttcgctggtgtcaaaaagagaattcataaatggacgattttaacaatatcgaaatctaacgaatgttttaaacctcgccaataacggatgacaaaaaatgcggaatgagcggttcaaacaccgctttttcataacttgtgaattaaactatggatattcgaannnnnnnnnnnnnnnnnnnnntaatggcacagtgtcaaaaaattgaccgcttaattggtggagatgaggnnnnnnnnnnnnnnnnnntagacattttcgtaagcggaccttatcgtgtgacacaacttgctgcatggccaataatacatcgcaatataggaatgtcccgagttagtaaagccaaatttaaaaaaaatgctggaatactggcaaagacccgacttttaaatgacgtaaaacgaatggtttgagaatgctcagattaccgaac

SEQ ID NO: 63258 - DNA, 4855 bp, Arabidopsis thaliana landsberg
  unsure (1)..(4855): unsure at all n locations
tctacgcatggccattgatcctgtgagtccggctacagttttctgtgttaagcttaagcagcccaattccaatttgcttcataagatgagtgttcctgaattgtgccgtaacttcaggtttgactctctctcccatcggaaaatctttaaatttcatcaattcctgtaaagttttctccttttctttgtgttagtgctgttgcgtggtgtggcaaattgaatgctattgcttgtgcttccgagacctgtgccaggattccaaggtatggtttttggtacttttctatgtcttgaatgtatgggcagtgatgaatttctcaattttcatctttctctgttctcatctcttgcagctccaaggcaaatacacctttttggataccaatacatatcttgatacctgagcgccctactgagtgtgcggtgtttaatgttgtggcaggtattttgatatcagttaattatttatgaactcggttgatctagtgggtgataaacgattatgatgcaattttttatatgtagactctcctcgtgattctgtccaatttatcgaatggtctcccacttcttgtcctcgtgcgttactcattgctaattttcatggacgtataactatctggacgcagcctactcaggtttgtgctcctgatcactgggatttacctttatatttcttctttgtcttctgtgtcaagatgttttatgacaccctcagatgattttttttttgtggattggttttgcagggttcggctaatttagtgcacgacgctacctcctggcagtgtgagcatgaatggcgtcaggacattgctgttgttacaaagtggctgacaggggcttccccagtatgtaatcttatgttttgcttatttgccattctatcaaatgcacagcatatttgtcccttaatgagttcgttaaattagtaatggagggcttgcatgtgagagtgggcactgggattactaaatcgtgagtaattgaactggaaatgtctctacgttttggaggaaatgagatggagaaaacacaacgtcctggaaatcccaactctctgtttgcaaaattactagactcctaaaagatcttccaatttgcgtttcttagatgcatttctttaatgatcggcatgaacacataaggaaatgagtaacagatagataataatgccattgcaaagaacatgttctgaaggacttaatatcatgttgtttctggccacctagtttgctgctctagttttatcctaggaaatttatcctctatgttttctttttattgataatcagtataggtggttgtcctccaagccaagttctggtacaaatgcaaagtcaactttcgaggagaaatttctctcgcagagctctgaaagctcaggttttcttctgcgtgcctcttgtgactcattttttgatgatatattcagaattatgcacttaattttaattatgtcagttcctttgacatccaaatatatgtgacaagatcaatacaacatgttctgacgttagtgcattttcctccactttatgtgacggttctgattctctaccatttgttgcagctcggtggcccaactttctctgtgtatgctctgttttctcatccggctctgttcaaattcattggtcccagtggccttctaaccagggaagcactgcaccaaagtggtttagtacaaagaaaggtcttttaggtgcagggccaagtggaattatggctgctgatgctattataacagacagtggtgccatgcatgtagcaggagttccaattgtaaacccttcaacaattgtagtatgggaggtgacccctggccctggaaatggactccaggcgactccaaaaatctctacaggcagtcgtgtgccaccatcccttagttcttcttcttggacaggttttgctcctttagctgcgtacttgtttagctggcaagaatacttaatatccgagataaagcaagggaagaagccctcagatcaagattccagtgatgctatatcgctaagttgctcaccggtttccaatttttctgcttatgtaagtccagaggctgcagctcagtctgcagcaaccacaacatggggatctggtgttaccgctgttgcttttgatccaactcgtggtggttcagtgatagcagttgttatagttgaaggtattgttctcatccttctcggaacctcatactgtttccatgattgaataaacattttcaggtttacgtttagtttttggtcaatcatttagaaatgctcatatattgaagagctgccagatgagaaaatgctaattttgtttgagtgatgaagcgcaacagcttcaatctattgtttaaaataaatgctaattgtttgtgtctgcagggcagtacatgtctccgtatgatccagatgaaggtccttcaatcacaggctggagagtacagcgctgggaatcaagtgttcaacctgttgtactgcatcagatatttggaaacccaacttcaaattttggaggacaggtccccacgcaaactgtctgggtatccaaagtggatatgagcataccacctactaaagattttaagaatcatcaagtagctgcagcaggaccaagtgtggatgcaccaaaggagcctgattctggtgatgagaaggctaacaaggctgtatttgatccttaagatttgccaagtgatattcggacacttgcacggattgtctattctgctcatggtggtgaaattgcgattgcttttcttcgtggtggagttcatatcttttctggtccaactttttcacctgttgaaaactatcaaataaatgttggatctgcaattgctgcacccgcattttcaccaacaagctgttgttcggcttctgtatggcatgatgctgctaaggactgcgcaatgttgaaaatcatccgtgttcttcctcctgctcttccgcgtaaccaatcaaaggttgatcaatcaacatgggagcgggcgatcgctgagaggtatgtaatctctggtatatattttctagcttgtctgcttgcaaaggaacttatattgtgacttgagatatgaatctgcattctttcttaacagattctggtggagtcttttggtcggagttgattggtgggatgcagttggctgcacacagagtgctgcagaggatgggataggtatactttagtgctaagtttcttgatttaagtgttatttaatatctgcagttggatttttttgggtctttagttgtggaacaaccactggaattagttttgcttagaaatatgacagtctgtattttagtttgggaataagttctagtttttaaaggctgagtgtcattcaaagaaccttttctctgtttttctatttgcttttantactaaggtttgaatgatagaaactttgnatgatagtggttcaaatattatattgtattgtntgaataatatactgcttaangcattggatgatgtatttctttttatgattacagtttcattgaacagcgtgattgctgtcatggatgctgattttcactcccttccttcatacagcacagacaacaatatggccctgtatgtttttctcaacccgaatccaactcattttctttttcctttttaaatgtctgaactgtttgcgttgcggtaccgtttattatgtctttgcaaaatatttatatatatatatatatatatatatatttttttttttttctggttttataatgtaaagcttctctattccatgagcatgcagaacctattttgtgttgttcttttatcggactataagatagtgtagctttctctaatttaaaaaaagaaagaaaaaaggaacaaacttcatctgactttagattatttgagtagccaatatacaatgcatctgattgactgattctaagacgctgaacaaaatcttggcagtctattgcccccttgagattcttcgtgttttttttgctgttttcctttttggttggttgcgctttttggtaaagaacttgtatttttatggtttacagaacctagataagatcaaatgtcggttacttgaaggaaccaatgctcaagaggttcgtgccatggttttagatatgcaagcaaggttgttgttggacatgcttggaaaaggtattgaatcagctcttgtgaatccttcggcgttggtttttgagccatggcgagtagatggggagacaataacaggcatcaatccggaggcaatggctgttgatcctgctcttgtttccagtattcaggtatcttgatgccttcaaatctgaggataaagttgtaggttttcttttatgaaagatgaaaattcaggctcaaaccctgggaacggttcatgcagtgttttcatttaaagagtagttgctctttgctgatatatcttagtttttacttttaataatcagccaacacatgctgtattagatttggttatttagcacagcttaagacattttagatcatattgtgacattgcatattctatcatggatctcatatcattgtatatgaaacagaccatatcactatccttttacaagtttggtttcctgttgcagatttttctgtactctaattccttttccgcttcatttacaggcttatgtggatgctgttcttgatcttgcttctcatttcatcacacgtttaaggcgttatgcgagtttttgtcggactcttgcaagccatgctgcttctgctggaactggcagtaatcgcaacaatgttaccagtcccacacaaaatgcatcatctcctgccccacctcagggtcagtatactataaaatttgaaaaacctaatttactccagcatgacaacaagggctttggatggt

SEQ ID NO: 63259 - DNA, 1487 bp, Arabidopsis thaliana landsberg
tgttttttttttacaaacaagaaggagcaatttctaattttttaagtatctgaacttaatttttgtttagtttctctttagatacgacttttttttttgtcagataatacgatttattttgtcagataatacgaaaattatgatgaccaataaaaaatacaacaaaaattaagcatttgtttgttgaacaatgttgttgctatttgaagaaaaaacaaaatttgtgtggaaaattttaagggcgtatagcaccataagtggaatgtaatgccttcgtttgatgcaatcggttttagtcatagactcatagtggtacaagtattcaaatgaaaacggcattttcaaacggcttttcgacaaaaacaaatccattattagaaatcaagcgtcgtcggaaaatcatatttatatggaaattgtaaaagattacaaaaggaatgttatcggaaactctttacaaaatttgtcgatatatcgtcgaaaatttctgacagagtttcgattttcaaatttcttttgtcaatgttatttttgttaaaaaatttgtcgaaaaattatatacgacgttccaaaaaatttgccgatggaatatatggtaaaaaaagttgtcggattcctgcaaacaagtaatcggaataatgtcatgggaatttttttggaatattgcgatgactataaagcgtcatcataaaatcaagtattcaagaggacaaatggtgtttattgaagattcagtgaaggataatttatgacttttatttgttaagcaatcaatgaaagagattggctttgacaaagaatcaaaattagttaaataaaatttagaaatcatcttttgtaaaatagaaagtgatggtggatagccaagccaagaatgccaagttgaaacatgagattggtggtggatacccaaactttggatctatcaaggttgccagcaagatcatacacatttttccttctttatgcaacttaatttgctctttctatggcaaatttagagccatcctagtggatcatatgtgtttaatcaatcgaaagcatgatattaaaaagtcaacgttagaaagtgtcgtattttgtaatataggtcaaatcgaaatcatagatgaaaaaaaaaaaaaaacacgaatctttcactcttgactaggccacaccacaacgaatctttcactcttgactaggccatgaatctacacaattaatatgctaaactttttttcctaaatattacaatccactacttcacacattccactaacaaacttacaaatccaaatcgtgtaaagtgcaactttttaaggctcggagactttgtagataactacaaagcaaggaagtatagcttttggattatacacaaccaagtcgtcaaggtttgtgtagaccccagcggcccccgcaaccgaatcatacgagccagaaccactttcatcttccggcacatcactctgcacgcgcctcactcttcccgcgatcacacggca

SEQ ID NO: 63260 - DNA, 1010 bp, Arabidopsis thaliana landsberg
tggttttattgtttgcggataattatcctagaagctgattttttgtgactaaccttcatgatttgccataggaaatcaggcaagaagaagggtttcttcttgtttctactgatattgcagcaagagggattgttctcccagaaacaactcatatttttaactttgatctcccacaaacggttacagattatctgcaccgagctggaagagctggtcgaaaacccttttctgacaggaagtgcattgtcgctaatctgatcacctcggaggaaagatttgtcttgcaaagatacgaaaatgaacttatgttcagctgcgaggaaatgatgttgtaggtacagtcttaactatctcagtataaaaattttgcattattgcctttgttttctccttttttttttccgcgactaccattactggtgagtccagacaccacagcctaatgtaactagttaagtacatgggaagagtatatgtgaagtgtcatcactatcaaataaatttctttgtaatttattgttgacttttatgctctgcattttttagttctcagttcttacaattagatcttaaaagtatcatatcacaactccatctttaattactgagttcttcaagattactgtaatgccagatctgatgtaaaatccatcggatgacctatctgcttcttgtattccctgcaaatcatcacattagtggaaatgagataagcaaaagaagaattgtatgtctgatgggtccatttttttttcttaaacaaaagaaattttttacctccgagtttgcgatgattacattctttccaactctagcattcttgtctattatgcattctctgtagggaaaagaagaaggtaggaagaaatgaaggaaggaatgaggaaacttcacaaatgagaactgtttctaaggtaaaccatgtgaagttgatagttagtcttactgaatttttgtgttctctcctattccaatgggaacgtttccctcagcaagttgtgctgcaactt

SEQ ID NO: 63261 - DNA, 1281 bp, Arabidopsis thaliana landsberg
tccagccaacttattccaatatgtttaccttgttccacttcacaaacttgagctgtttttatgcgttaaacgtatcaaatctatagaagctcttcaaaatacacacaagtagtttcctgcatcaaagaaaaaactttttgtaaacagcatcaattacacaggtacagcataagagagaactcgagaaaagcaaagactctgttccattataaaccaaaggattatactcacttggttctcacaggataaaggtgccaaaagtgccgtgtggctttgaaacagaggagagaaaaagggacatcaaccgctatgcttcaaagttccagaatcagacaagaaccctcacagaaacaatcttgcaggaatcctattctcttctgcgttggttaagtaaggcatctgaaaaggcaaaaatgacacatacatataataactcactctcacctaaaaaaaggagagtgaagtgagccaagagaaagaaagagtctaagattaaccaatggctttgagaccaatcagttccatgagacaaagttttgtccaaaacaatatcaagtggttcggaattttacagataaaaggtcataagaacagattaggtcaccttttggattctgttttagactagtttcgtttatgatacaagtttaaccttctctagtgtttgtcaagtttgttcttgttaatcatatctgtaatagttgataggttaggctttagtccatgcttttgttcatggttgtttcgtccacttttgtactgactcggtttgtactggcttatatatataaaagtaacactcttgacaaaaaaaaaaaaaaaaaaaactcaagatgaagctcaagaactttctcatagcaacagaatgtatccttatgtccttgggccgagaatttacatataggctaaattgatggctgcagatggagctcaacatatagcaagtgctcaacatatatagcaagtgctgagtttacaaagtgaaaaaactcaaaatctagtacaaaggaaagtaaattccctgcagacaatttgcatctcactgtgtgagcagcaaggaatcacatgccactatcttcacccggctcacattctcttgacgatcgccactcttgaacattgcgtcctgaaatatgaaggtccagacattgtcacagaaacctgtaagtgtgcaggtgtccctgaaataataaataagaaacgatagtcagaatctgattgttttatctgccaaagttttctcttatttctgagatccagatttgacttaaaaaaaaaaaa

SEQ ID NO: 63262 - DNA, 688 bp, Arabidopsis thaliana landsberg
  unsure (1)..(688): unsure at all n locations
tctttgtttacaaaagaaaaaaaatagttggagctctttctcttactgaggtcaaaattataagacaaaaatactgattcgaccaaaacagcctttagttttatttttcatatgtagtgccatacaatcttcatggctcttggatagtctttttcaaatgtgtttccgacagtggtacgctgattacaatcgtagagagcatagagttatccccttccgagattttcattttagatccattagcttccacatcttcagttactttactatttgagtcaatcttggctagttcacatatagtcacttgattctccttttgcttntcccatatgacagcatacagtccaattacaatcagtaccgcaccaatcaccctacatgtcccaaagcagttgataagctttatgtgatgattgatattattcatcatatatgattcatgaccatgcatggagaatgagaaaaggggcaaaagtggaaatttttaccctccaaggaagattttttctgccaagacaaaagaacccatgacagcaacaataaccatcatcaaaggactaaaggcagtagcaaacacaggtcctcttttcttcatcactatcccttgcacatagtatgagatacttgatgccacaatcccctattattatatatcaaattatcgggataagtaaataaatatatgtga

SEQ ID NO: 63263 - DNA, 403 bp, Arabidopsis thaliana landsberg
tcgaatcccaataactttgtgatattatttctccctgaactaacattaactttggatcattcaacaccacatcttgtgcttgcttctccacatgatacaaatcaaccccaatcgtatctgccagatcaataacagagacacgttccaatttactgatctcacgagtaatttcattcctcaattgctcctgaaacaaatcaagatcaaacaacttaacttcattttttccgattaaattcctcatgcaacaagaagagttagcaatttttcactccattaacacattactcacatcatgataccagaattttatgcgaaacccagtgatgattcttctggagtctaaattcacaccggaaacgaaatagaatcagtacctgagtgatgtattcttttccggtga

SEQ ID NO: 63264 - DNA, 387 bp, Arabidopsis thaliana landsberg
  unsure (1)..(387): unsure at all n locations
tcttaccaagtatataatcatttaaccctcgacgagacatactcgtgtaaagctgggaattccgtcaggagctgttgatctgctagtgtactaaacactaacgttgaattggggattggtttttttggannnnnnnnnnnnnnnnnnnnnnnnnnnnnnnnnnnnnnnnnnnnnnnnnnnnnnnnnnnnnnnnnnnnnnnnnnnnnnnnnnnnnnnnnnnnnnnnnnnnnnnnnnnnnnnnnnnnnnnnnnnnnnnnnnnnnnnnnnnnnnnnnnnnnnnnnnnnnnnnnnnnnnnnnnnnnnnnnnnnnnnnnnnnnnnnnnnnnnnnnnnnnnnnnnnnnnnnnnnnnnnnnnnnnnnnnnnnnnnnnnnnnnnnnnnnnnnnnn

SEQ ID NO: 63265 - DNA, 2067 bp, Arabidopsis thaliana landsberg
gtactgtgagatggctaggaaccgcaagcagagatgagctaatgacccgacttagctcagtggtcagtttggctagagagcaagagccattagaagagccgttgctggctactgaaccggtggagaacatagaggaagaagatgatggtaagactaacacggtcgagtcaagggttaatgaaccgacacaagagctagtggtgagtccgatcctttcgcctataaggcttccacaagttccatcattctcagagtttgttaaccggagaaaaatgaaacaaaacacattgatagataaatcttctgaaggttttgatgacaagaaaccggcaaagataatgaagcttcaataaataaaaatgtgctaaaccctcacgatttttgttcactagccaaaaacgttttttccagtttcatttgtagtttagctttagcattggcccatttgtctcttaaagtcgtaacatacacaataattagtattccacctgattgaatagacttactgaaggtaaaccagttaaaccgatgtaaaaaccaaattagaccaaagcttaattgatttttgtgtaaaaatagtttgaatcccaatcttagcatcacgacgacaacactaaaatttaaattataaacctacaagtcgccataatttgggtgagagaacttcatatttgctgctgtaaatttaaaatgacttttttcaatttctaattttcccttgatcatcttacaaaaggacttattattaaattcacatatgacaatatacattttacacactaactcacaaccaccaccactaaagaaaaaactaatcaagacaaaagaaaaacagattaaagaaaaaatctaaagattctcctccttccctttatccagacgccaactgctttcttttccataaaaaacgctcactaatttcaaaaagcacacctatttccaatctttttgatatattattaatcgtattcgtatattatatggtttataagatacgatccgatatctagtgggtggagttttagccttttacgctatgagatacacctcatggagaaacttgagactgatgaatccacggcggctccggcgaaaaccctcgcgtgatcgctttcttgaccgtaatccatcatcggacgatactccagatcatcatcgtgatcgtatacaaactccggcatctctatctcattcctcctcacatgttcccacagataatcaactctgcttatgtacctcagcttcccgtacaacctaccgcagccaatcaccacaccaattaattaatcaacgtttttctaaaaaaaactatagtatcaagaaaagtcgttgaccagaaaattaaaaaacgcggcggttagttactcacccgccggaaaatagaaatcggccgcaggtggcgaggaagagacgtgattgaagacctggatggaggaagtaaacctcctgaagattgtctctgacgtttaccggaattgcgtcgtagatcgctcgtagagctgagatacctgggaaattctcgcttctctgtacgccggtgtggacgtagagtacggcgaatggttttctacctaatcgaggaaatatcttctcctctagatacttcttcaacacatccagtgacagaaatcgagctgatttcagaaacaaaaaaaactcaaatataagaacaaatctacacagagagaaaaagaaacagatcctattgatatatcagtacctgggaagaatttgccgataatacgaaggatcttacggccacgtttgtctctgccatggatcttgaagatctcaagcttctcgatcagctgctcttgttcaatctccgaaatctgagaactcatcgtttctctctctctctctctcttttttgtttcgtcggtgaaattcacagttgaattatagaagaagaagggaacaaaaattgaggcgagtgaagaagaagatgatgatcattttaaaaagggaaaagacaaaaaaataaaaaaatagtgtattaattggagggtaatgggagaaacgacgggctcttaccaatattctatagcatcttcctttttatcatga

SEQ ID NO: 63266 - DNA, 520 bp, Arabidopsis thaliana landsberg
cgccggcgatgcctggatcgaggcagacttccaggccaccattctcaccgtctcgaccctcacgactcttgtcgacgggctgatcctctccaacagacaatcctccggctcgtgcccgttccgaatcaatgtcgccctcgtgattaacagcgacatcttcgggctgctcacaatctccacgggcgcattactgggtgcctcgcctcggcaatacctgagcttagtcctcgctaggggggcgctgaccgcctgggctgccgggtgggtgcaaaacgggccgtgcgcgttagctgttggctgtggacgaccagaatagatgcaggcccttatggtaggtcagggcgctggcggtgatctgccttatatggggcagggagaatatgcgctggctttggcgcctaggaaggaaaagacctctggggagagagaaggctaggtgtctgcattgtactagttcctagcggctggggctatatttatgaccactgggggagccgtggtgactctcgctagactgcac

SEQ ID NO: 63267 - DNA, 727 bp, Arabidopsis thaliana landsberg
tatcggttagcaaactactactgtaaggatactttgaactttttagtgttagtttgatattgtttctatgtaacaaaatttcttcacctattatatatgtatatgtttattttgttggagtttcataagtctaaagtaaaatattcaggggaaaaaaaaaactatttggtgaaagtgtttgtccttggaaaggaaagatgtacaagatacgaaaatacctttgcttcgctttgcttccaatacactgccatttgtcaacaacatgctcaatcgaaaattcgaacgtacgtaaatgtgtatgtgggtaaagattattacggcccgaacataactcatgttcacgattgcgatttttatttctagactaatactaaatatttcgaataataattgtgatcaataatatattttgaatcatacgtagcgatggttgcaagggtcttatcataagcaaagttggtctctagagtccccaccttctcctatgtgcaatttagctactccttcagtcctctgattgacacatgttcccacctgtctttgtttttccaagtcttaatgaagcttagaagttaattaattaaatcattttaaccttgcaccatctctcggatcttattaattatgcatattattattccttcatctaaaccctataatatttcctcacatatacgagtttcttttactttatttgattctgaactattatcaaaattaagaaaat

SEQ ID NO: 63268 - DNA, 539 bp, Arabidopsis thaliana landsberg
aataatacaataattagaccatagaagagtaatagacaattgaaaaatgaaatcaccaaaaaagtcagtacacatacagacacattgacgcatcgacgtcaagcatggagagcgcacaaagagcttacggctttattattaacacacacactaagcaaaacagtatgtgcacgagaaagcattcaaaaagcccaaaggaaccacctttattatttattttatcttaggcaaaggaagctcctttattaaattcccaatgttgttacactactttgcacaatctttaatcgatcaaaccaataaattttgcattctttttcgttggcgaatgaaggattagagagaaacagaagaaattgttgatttttttcttgctgattttaattaaagagaagagagatctctctgctggattgctctcaagaacccaagggactgttggcttcagctgattagaccttgtactcgatatgttctatctgggaaatatcgatgttgatctattaagagctgaggagagccaaaggaacctttttgat

SEQ ID NO: 63269 - DNA, 139 bp, Arabidopsis thaliana landsberg
aagtgaaagaaaaggtttagatgacccaaaacggactgaactttgactattcaatatcacatttttaacgcaccgacccggacaggaggaaagatgtggtaaaaattctcccaagacgagacaggctaaagcaaccatc

SEQ ID NO: 63270 - DNA, 505 bp, Arabidopsis thaliana landsberg
  unsure (1)..(505): unsure at all n locations
ctacgtgatgaagtcgacgtatttcttttcggcttgccagcgatctatccgttcggggattatgtatatacccggttcaacggtcaatacaaagcctgcctccagttcccggccgaggcgaagggatttcagcccgaaaatttgagtttcctttttcagcgcatcggtgtaacccacatattgttcgccaaggtcttgcatgtcatgcgtatccatgcccagcatgtgtcccagcccgcattgaaaaaacatggtctgtgcaccggcttgaactgcttcggcagcatcacctctggttagacccacggcgttcaggccttccattaatttttgcccggctgcaaggtggatgtctttataacgtacgccaggtttcagcatactgatggcatggttcatggagtttaataccacctcatataattctgcctggcgngaggtaaagtttttgcctaccggaaatgtgcgggtaagatcgccgccgtagtgcatggcattctctgcg

SEQ ID NO: 63271 - DNA, 567 bp, Arabidopsis thaliana landsberg
cataggatacgccttggctggtttcaatgaaataataaaacgtcggaattttgggatcgtttaatattttcgtgcaaatttcatcagtacgatccgtagacttgttgttgatcacgatcacttcgtaattatcgggatttgatgtctgatctaaagatgcttgtatagattcagcgatatatctgtcccgattgtaagtacagattataatcgataatttcttactcatgaagttattttgcatcaaaaaccaaagataacgattatttatttgctcgatgacttgcaattgtttaattacatttgttcgaataaagtaaagagattggatgggactggtacaaaaagatgctttcagaacaatgatgatatcctatttgggaattgttttggggtatttgaacaaaggggtcctgtttcttatcttgtttaatacggaccaaattggattgatcaatctgattattgcaattggtaccttatttgctcaattatcgaatttcggctcaatcttcacttgttggaaagtttttcccttttttaaaaataaagataaaaagcatcacg

SEQ ID NO: 63272 - DNA, 749 bp, Arabidopsis thaliana landsberg
tttccgcggcgccaacacggttctggtggcgctgatccagaaagacggcaacatctataacgaaaaattcctgacggaactgaagcaggccacggatgaagtgttcttcctgccgggcatcgaccgttcacgcgtgtcatcgctgtttacgccggacgtgcgttacatcgaagtggtggaaggtggcttcaagggcggcaacgtcattcctgccgaatatgcgccgacgcaggaaatgttcgacatcgtccgtgaccacgtcaacaagggtggccacgtcggtcgctacaccaccaaggaccagcgcggcgcgatgatcttctccgagttgctcgaagtcgatccggtacccggcgagaagctggactacggcaacgtcgccaacatgctggaagaccgcatccgcggccgcttcacaagcaagaccaagttcgtctacaagctgaatgaggactacacgacgccagacggcaagttcaagttcaagaagggcgacaccatcgacgaaggcttcaccgatctcggctggaagcagcgcttcaccaccttccatgcgaccaagaagatcgaggaagaagacaagaccgtgatcgtgccgatcaagggcagcatggtcaccgccgcggttgtcgacaatccgcagtacaaccccagcgttgacatccatatcctcggctttgccaaggtcgtgggcgacgtcattgatgcgacgctggaggtggtggtgttcttcatcatcaccctggtca

SEQ ID NO: 63273 - DNA, 414 bp, Arabidopsis thaliana landsberg
tctcctgcgaatatcgcctaatgaaggagcctccgctgctgctattggccggctaagctattctcaacccattccacatcgcagtggtcacattccagatctacgcatacttagtctgattatcgcgcttacttaaagctcccccgctggccacatgcggcttatcaatctgaccaatcttagagcccatgccagcacaaacgtcttccacatggctagtgcccacctctgtgctgcacaccaggcacacagagtctgaccttgctcagcattctgactattcctcgctcttcccacactttgcaagttaatgaactcaccggcatcattgtatggtgggcctattacatagtaggcataattagaactggcccggtcagttatgcctgtattgtaaatgcacgtataacctgc

SEQ ID NO: 63274 - DNA, 1172 bp, Arabidopsis thaliana landsberg
caaataaaagactcatcttgatatcaaccaacgcaggtcaaggtgggagtacgaggggccgaggaatttggcgagtacgaagagtggttcaactaccgactctcaagggccgctcctgacacctgcgctgagtttctcggaagctttgtcgccgacaagaccaatactatgtttactaaaggcggcaaatggcttgtctggaggttcgaggtgtggtcttcttacttacccttacaatgaatctgctgtttatagttgcgatgatgatgatgaatgaaatgttttcttcaacagggagaccgtgatctcgctgattacatgaaagatcggagctttccttctaatctggagtccatcatgtttgggcgcgttctccaaggagtcgagtctgtgaaacgtcgtgcactgatcattaagcagattatgcgccagatcattacatctctcaggaaaatccatggcacgggcattgttcaccgggacgtgaagcctgccaacttggtggttacaaagaagggccagattaagctcatcgactttggtgccgctgctgatcttcgcattggcaagaattacatcccggaacgcactttactcgatcctgactactgtcctcctgagctctatgtcctcccggaggaaacgccaagccctcctccggagcctatagccgctttgctttccccgattctctggcaggtggttttcttattcttgtttgccttcttttttacttgagtctttgcctgatttggagtgctgattcttacagttgaacagtccggatctgtttgatatgtattctgctgggatagtgcttctccaaatggcggttccgaccttaagatctactgccggtctgaagaattttaatctggagatcaagtctgttgaatatgatcttaataggtggcgggacaggactcggacgaggccagacttgagcatactagatctggactcgggcagagggtgggacctcgtcactaaactcatatccgagagaggttctctgagacgtggacgcctttcagcagctgctgctctcagacacccttattttttgttgggcggtgatcaagcggccgctgttctttcaaagctcagtttcagcaagtgactctgatttaaattcttatgatgtaaatgtattacaataacacgactctctt

SEQ ID NO: 63275 - DNA, 504 bp, Arabidopsis thaliana landsberg
gttgagggttcagaagagtcattggcaacagacaatgtatcatcaccaattgtagcgcaagcaaacacacatttggtggatagaaaaaggaagagtgaaccggattcaaagacctctttgagaccgagccatatttgatccagcagcattggggaaaatggcaggcgctttgctttgaggtcaaggaaagctgattccataacgcaagaggatagatttagtattacaaactgaatcaatgtgcttgacgaggtagacatggttactaggtaagtacaagaagaaacatttgattgaactctggtggttttctttcacaattacaatatccatgtcatgatgttgtctcaacatgttcggtgaacaaaacagcatcgtacactgaagaaatgtgagaagggagaagaagagaaatgtcgcttagagcaaggtatttagttgtcgtgcttgtactccctgaccagaggaaaagaaaagagagaaatgtgctagtatctgtacgat

SEQ ID NO: 63276 - DNA, 120 bp, Arabidopsis thaliana landsberg
ggccggacgcgaggaccacagcttaaacagacgtgcttacccggccccaagagggggcccacgggagacggcaaacgggcggaccccgccgaacccaccaggggaacgaaaacaagacca

SEQ ID NO: 63277 - DNA, 4181 bp, Arabidopsis thaliana landsberg
gccctctttgcatcgagccgaaaaccattctccaaacgaccatagatacgctgctgcaatacacccacaccccttttgagttttagagggctccatataacaccaacaaatatacatttcagaggaaaatagtcaaatatgcttcactcaaaagacaaaaaacgactacgaactcccaacaccataatatagccatataacctaagactctcactttagttaactaacttcgatatgggtagctaatagctatcctcattggacgagtcctcagattcgatatccatgtgcatcagtaacatcatcatatccgttgtagtcagttcgtcatcgtcagtatctctaaacccaataggaccatattcaccttctgaaattatattcccgatcatatttacaagtgtatccacgtctgagaagttagttccatagggacgtggacgccttggaggtggcctgtgatatttccatgcatatgaacctggcttcacagtgtgctggaacacaacaacatccattaaggactaatcaagctttctaaggacttagaagaaaattctgcaaatccaccctccctactgaatatcactaaccattgatgctatatcacattatatcaattttctacacttccttctatagtgacataaaatattagctgaaaaatttatgtaaactaattgccaagactcttggataattataaagcttcaatgcggttatcagcaaacattttaaattttctagattcggaacatctggcaataagtagtatagataggtaagctcagatatagaaacacaaaagaaatgtaaaaaagcaggaattgcctatcagtaagagacatcaaggtttaatagttgacgtcatctcaagtatgagatatataactagattttcaactttcaagagaacttcagatatggtgattcaatattggtttcaaacagataccagaaaatactcatgtatgaaatcaaggcagtaaatacatacaatgaaacctgatttcaatgtaatcttcaacagcagtgccaaatgtctacttaaacaattaagtttttgaaatcatttcaaccaaaggctcctcaaagaaactaagaaccaaaattaatccaaccagcatggttttaaatacacccccgactaaaaagggattgcctgtcactatcagtaaaaaacatcaacacatattatttaacatcatccgagcatgcttgatttagttagagtttcaaccctgaatgcataaaaataccttgtagaagcaacttgtcccgaatggacaattcccatctccaaaactaaagtgtttacaatcgattgacctggtagacagagcataaaattgattataagtatacagatttttcttgctttgtttgccaatcaagtatgatgaacacaaagacagcaataaaaccaccagaatgaaaaaccttgcccatggttagttaacttaggcaatgttcataaagcatgtacctgagcttttccctgtagttatccataatttcttttttctcttctggagctgaaaaccagattacactaggaacaacaaaatacgataacttgcggcatatggggcaagcccttagtgtgctattgacatccatcccagtggaaggagaactgctccgccaattcctgatacatgcaatgcagaaagcatgatcacattcagtgagtaacccgaacttgcgttcagctggagttgccttagacaatacacgttccaaacagacacaacactcgatctcttggctaagttttaatgcttcaagttgcttgtgctttttttcacaaactttcttgtgctcctctctttcgtcgggtctgaaaggatgcaagcaacatttcccacaagttgggcaaatagttccatggatgtgagggcattcattcccacgtgggcaatcaccagcagcagcaaatgagcaaatgggtagttcttcaggtttgactgtaccagggttagaagttttgacctcgtctacggaatcctggagaagagaatccaaattccacgttggttttaaagatgaagaaggaactgggctcaaatctctttccgcgacaccaggaagaaaagcacaggcaagagtgttggaagctgaagcaggagatggccgaggcacagcggacgaagatgaagcagatggatgaggcctggaagctttgacatgttcgtacctgcatcgacttccgtaagagcagattcctttctggtagtaggtgcaaatctgtgataggatggtcgtttcttagagaacattaacaatacaaaggaatttaaagttgatgaaagcttgttcccccatacataggggagagagttaaagcttacattatttgtaggatccttccagtcatgagaaaattcacagtgctcccctttcaagcatgcaccgtgagcaaagaatttacaaaggattctaagagaaaacaaaagaaaacgaagaaaaagttgagaagaaacaaaatacaaaaagagcatcaatgaacaaggtatgcaactaagcatacagaagatgaaactattcacggattcttgactgaaaattatcacacgcttagatttacgaaaaaacagttataaagatctttccagatggcgaattcatgataaattactctcaagtctaaacgttgtccccgttgatgaagaaattataagagcccacaccctgagattatattcattggtacaagatggttcatgtgcagagacgtatcaatataagaacattactcgtatcaatttgtaattaaaactaaaaaaggttgcaagctttcagacaaagaagtcagcctatgaagaagagaaatgggtaaagcacgcaccttttcgacatcggcgatcgagagaaagaatccgggggctgattatgaatgaatatatctctcgactcctgggaataaaaaaagatgattggttagggtttcgcggattgagagtccggcttaattgggaatcccggggtgtacatgcaaatatgataaactgtggggcttatccggagattttatttattcagcaaaaatcaaacccgctgacacaagtagaaggttgtaataaataagacacaagaagggagctgggaaaacgttatccatagagagtataatggccacgaaaatcttcttggcatctcccgttatctccgccaccagaacgccgatcgtcccaaaggcgatagcatcacgtctaggcacctccctggccgccgcgttggccgcgacttccgtgctgactatggttccggtgctgccggcggcaggcgaggggaaccagacgtacaaaatttactacgggacggcggcgagcgcggcgaactacggaggatacggggggaattcagacaggaagacatcggcggagtacgtgtacgatgtgccggaagggtggaaggagaggctggtgtcgaaggtggagaaggggacaaacggaacagacagcgaattctataacccgaagaagaagacggagaaggagtacctgacattcctggcgggattcagacagctggcgccgagggatgtgattctgaacaaccttgccttgtcggacgtggagctgcaggatttgatagccggcgcggacaaagtggtgtcggaggagaggaaggacgagacagggcaggtctactatctgtacgagatagatggggttggaaagcacagcctgatcacagtcacttgctccaagaacaagctctacgcccatttcgtaaacgcccctgcgcccgagtggaaccgcgaccacgatacattaacccaccttcgcgactccttcaagactgtctcttcttcttgaaatttcaatgtttgcttgtcgaaatgtatttaatttggtgagaacgagaatgggatacataaactggagtttgttttgtgatcctttaattatcatcaattctaatataggtataaataaataagcatatagtaagcaaatgccttgaacatagagaaaccaaccaaatgggtatttgttctttttttgtatatttgcttgtctgcaactttcccggcatccatacgtaaaaagtgtcctctattatgatagtagctagtattatttactagtgtcgagtactattcaatggagtttcaattgcccctacaaaagagaagagagacaatagactagacaagacaagcaaaggacattgtt

SEQ ID NO: 63278 - DNA, 432 bp, Arabidopsis thaliana landsberg
tgtcttactatacatgaaacttattgaaaggcagcgacgaatcggatacattatggattcaatgtacacgggctgtatacagtgagtcggaaggtcatatcgggccttaaatatcttatccaccacttacaaagagccgaagaaaaacttttttgggccggacacttttgtttatgtgaaaaaagaggcgctgctaggatatacatcgtctgtgaacatctaatcatatactttacagacccactgcaaacaaacaatcttgagtagggcgaattccacaggataaactcacgtgctttgctgctataacagactctctgacagaaacaatatgctacttagggggttctttcgctatttacttatattcagtgtcccattgcttatatatatactagagtatacaactatgtacttcttgaagatcggagc

SEQ ID NO: 63279 - DNA, 583 bp, Arabidopsis thaliana landsberg
aacgcataaccaaaaaaagatagattaaataatatattgttatatattaattatcaagataattaattaattttttgttaattgatgaatttctttataaaattccaatggtcacaaaatacaaagggaatacaaaagcgtgatatgacatttgaaacgtaaaaaagcttttttgaattttcactttgttgccttgtgtggcacttaagcgggtcccattttacagcttgccacgtgtcgacgtaatgtactcagaataacacggtactattggaagcatgcaccttcagttatttgtccacacatgataatcaaaaaaaaaaagtgatacgtagaagtttttgcattggtaaaaaatattctaatttatattctgttttcattaaattttaaattattctattttaaagtatttgtttaaccgtgaaaaggtaaaactatatagtataccacttaagtttagggatgatgaaaaaaactaccacgtaaaacaataatatttggttggttgaaaaccttgcaaagttccatgttaaatttattaaaggaatataattattttcaaaaaatatttttatggttt

SEQ ID NO: 63280 - DNA, 1347 bp, Arabidopsis thaliana landsberg
ctgggaacgctggcaaaaggtgttacccattcctgcaaaaactcgtgaattacgcttttgtagaaatcatgcgtgcagcatatctgcttgttgcttaagctctgtattatgtaaaacgcttcctgcaccttgctgttatgctcgcataacgaacctattgcgttgtacgttccttcgtttggtttacaacgccggtatatcatctcgtctagacatttcacaacaagatcaacttttccttccttgcacagacgggcgatcaccggattatagctcgtggcagtgactctaaactgatgatttcctttgctcatctcctttaaaacctgcagtgcctgctctgttcttccatgaaaagctaacgaattgatcaatatgttataggtaacaactgaaggagctcgatctccaccgtccatctcagccaagagcgaattcgcttcctcccacctcccatcacagcacaaacacctcaacaaaatgttatagctcacaacatttgccttaaacccttttgcaggtaattccctaaacagcgccatggcatcgtctgttcttccttctttacagaaaccagtcaacagcacattatagctaaccaaattgggttcaccgcctttcgcaatgatctcatctaagagcttcacagcttcgtcggttcctcgttctttataagctgcttcaagcaagaaagaataagtgaaagcatttggagctaagcctttctgcatcaacctctcaacaaactgtaagctttgatttaagctaccaagcatacaaagacctcgaaccaaggcattgtaagtaacggtattagaaggataaccatgatcttccattttctcaacaagctgcatcgcataaccaacgttacctcttttacaaagctgattaaccaaatacgtgtaagcagatgcatcgggtataatcccggagctaaccataagctcaatcacacgaatggctttcttcaatctattggctttgcagagatcgtacaagagctgagtagaatgagctacattgggtttatgccctcccgtgactaaactttctagatgagagaaactatcgctcaaattcggctcgtcgcttctcgggtcatcagaaaacgacccggaatccaaatcgggtttccaactggatccagtaatggtaaagccggagtctttaggggataatgttatctgggtcgaagctaaaaccctagcaacacctttactgacggaggagaaatgaaggaaaccagaagggatgtgggaaacaaaacctacggcttttctcggcgatgattccggtgacgccatggataagactgagttcagtagagtcgacatgggcttaaat

SEQ ID NO: 63281 - DNA, 638 bp, Arabidopsis thaliana landsberg
cgttccaaagctttaaccttagacacatctatgttcacatgcacatacacacacataaacatatacacgcattcagatagatgtacacacatgtatacatatacatacacatacatgtacacatatatccatacatgtatagtagtgatggttaaccttggtagtcaatgtgactggatctaaaatcaaccaagagacacacttctgtgaaagctttggttgatcaggctatttgaagtgaatgatgcatcctatgtatgagaggcacttctcattgctagcttagataaaaagagatccccgggggaaagttctgggttttgcctccttcctataatatcttgctggtgagtttatctactctgtcactgtagttgctgccaccgttgtcactgctgtagcagcagctacatttcttcatcaatctcagaacccaactccattgtcttccaaggaagactgaaggcaaggggttctccaggaatctgccaggccttcagcccaagttgggatagcaaagtcattcagtcttgtggcctgagcagcttctgagttcttagcttccttcccagtgtgcagatagctgctgttaggacaacctataccacccatgtaagacaatctacagtcttattttg

SEQ ID NO: 63282 - DNA, 4222 bp, Arabidopsis thaliana landsberg
tgtacttgtactttctccttctttctttttgtcatccattcttttgatttaaataatgtatacttggaatggctaatattatttttaacaacgttttatgagtaaaataacacactacttatttaaaacacactaaatgctacgctatttgaagaataaaaaataagccaggtaaataactcagcataatttacaacattgccaatgaactcgataaataaccaaccagtcacacgtgtaggtaggggtaacttgtgtgagtgggaaaggttcaacattctatagcctataggtaggcattggatctgatgtttatgaaatgggaaagaaagtttcacaagatccaagtcatgtgcatgcagtgagtcttgtaatattaacccccacttttacttctcatatttattgctagtaatttgttttcacccattttgaactttgtgtacattttctcaatccttactcgaaacaaaacaaatactataccacccaatgaaatatagagtaagcacaatatatacttatatatccatttgctcttaaactttttaaaaatgataaatgatgatcacaaataaagaagctctctcttcaacaaaaaacaaaaatcataatttttacataactaaagactcggtcatcttttacccattctttcctctacatcccatattacttccgctgaccaaagagataatgttaaagatgactttttctgaagttaaaatatttttgaaaaaagaaaaaatagacatgaaagtagaatatggaaaaggattcgaactaataaaaataacatccgtttttaatgaaataatacttgctaactaatatatatatatatatatattcactagagttttattgttcttcgttattttttaaacaaaaattgtgaaaaatttgacctggcaagataggaacagttagaatagaaagcaaaacttacatttgcctggtcaccaagtcacaacattatatgtttcactactttgtgagtacaatgcctaaaatacccttccctggtcacgtggcttgttggaataggtaacctaattatgacgtacattattatttagtttttttccttaatcgcactatttttattttcttcaatccttttcaaatttaaattcgtgttgttaagtaaaatataataacagtcagttcgcaaaaaaagtacataaataagggaaaggaaaaaagaataaatgaaaagaaaaactaaaataacagaaagcacgtggagtcacgcgcctttgcctgctgtaggaaattaaaataagaaaagaaaattaaaaaaagggaatataatcccaacggaatcaggtaatgatgagatcctctctattctcttctctctcttccttttttgtattcttgccatttaaagttttaattttttgccgtaaagctcatttataatttgaaaattaaatttcagaaagaaaaaaaaacgtcaatcatcgagaaagctttcaaatttgctttttttttgataaataaacattcaactttgttcataaagttttcttgataaaataataaaataaattatttcaaggaaattagaggaatattcattcgaactatagagaaagtacataccaactgtatgatatatatatatatattccgttatgccttatccaattttacccattttaaaaaaagtctatgttttatttttcttcttcctattaccattattgtttcactaaaacaattgtcgaaacaagaaaaataaaaaagttataaaatagcatataaagtacaagcaacaaaaagaagagaaaaaaacaatttctataaacatgcaaggtgagaatcaaaacaataaatagttttccaaattcataaatacgtaaatcctcccaatttcatgaaaatactaataatgtgcacaacaccaagattcactacaacaaaactgacaaaaattagtgaaactttactgacacaatacttacaatttttaattgttgtaaccccactttttttgttgaacaatccaacaatatcaccgtgacagagagaattaaactcaaatatatgttaacacttctagttaaaaaaaaaactcttggtacgaagaacagatgaagataatgatgaaattaaaattagataaaaactgtacaatgaaatgtctctaaaaattcttctgtctgtgacaaaaatcacagtactaggacgtgtaactttagcactgtctcttcttctttttcttttttttttgttcttccatggcttctaaggtttcagactaacccactggtaccgaccttcaagcggcgtatcattgacgatgtcgtagttgtacctatacatgttttaaacaactgcaagttaaggatctctgctatcatgcgcgtgtgtgtgggtctaaaaaagactcacttttctgtgaatcgtttctgttcgtatctctccgccgccgagaaaaagtcatctagctctgcctgcgtcggtgatttttccatcttcttcttcttctccgtctttctctgatctctcatctccgtcgtcgccgagtccatttctgctgtttctcccagattctcgcttgatgaaattccctgtttcctgtgaaattccaaaaattatgaatttatagacgaaacaatgaagaaattgaaaaatctttgaaacgtcttttttagttattaacctgaaattgttggtgagtaacgttgagatttcggtttcggagatttcatgagcctgaaaacggaaacaaaattaattaatccaaaaaaacgtaatcagatcttgctcagagagcatttattgtgaaacagagaaatttcaaaatttgtaatctcgagtttcgaaatttcacctccagatctgaaaatggaagacgagtagcgatttcgttagtttcgctgctggaacaaccagagctgatgcttgagcttcgatgatcgtcttcttcttcagataacgcgacggagcagaaacctccggaatctgaaaccgagtaagccagagaagaagaggaagaagaagaaagagttctcgtcggtgagcgtaaaacgtcatcatcatcatcgagtctcatcctcttgatgtttgatcgttcgtactcagaatctctcttgggttttgtttcgctcatttctctcaagctcatatagttttctctggagagagtttatgaaaaagttggggtttctctggttaataaaaacagaggaagggttttgggtatttgggggagaggaagatgaaggatctagagccgttgattaattcaacggctgagatttaattattgggccttgcctatagcggatgggccgttgttgtgccggttttgagtggggtcctttaaactgagtcccgttcacggggaagcaggtaacggcgtcgttacggagcgtagacgccgtcgggattctaaacgacgcgtcttttttgccgtttttagcttccttttaaagcaacccaaaactaaaacgtcgtcctataagctgtagaaatgtgagttgtgacagtaatttttgttaattaatctaaaacactttctactatagatttcttaaacttatattcttttacacgtaaatacatttgtcaaaccaaaaaaaataattctgatggttgctgattcataatttctatcataagctctaaatatcaacttcttaaggatataactaggcacatagattagagtctaaagcattcactttcttatgagcagcttcacatggagacagaactataaatacaatcaattaaatagtacttattaaatgacaacaacaaaaaaccaacttaaaatccagcttttacatggaatctgtacatgtccaaaaatgggttaagaattttacacatacaacatgtttatttccttctaataaaatgggaccattttcgttattttttggcagtgaaataatgagcaataattgaccgttacataataattgtgctaacaagcatttacttgggatttttttttttttttttttttttttaaagttacacatgtacaatatcgaaaatatgaaatattagaatctaggcttcattttgcaaaaaataaataaaaaataatctaggcttcaattgtccgattctgcttcttcaataattttaaaatttatcacaagaaaaaaaagaagactcttcgttaattttcatccataataatgatgtaatcagaattttcaaggataatggtaaaaggatgagacgaagaagattcatc

SEQ ID NO: 63283 - DNA, 1456 bp, Arabidopsis thaliana landsberg
tatgcgcgactagggcgaaaaaaggtcaatccattgtttttcttcgagattttctgtttggaacaaaaacgctctgttgtctgtctttagtggagtcaaatcggaatcctatggtccaagtataaactaaattgcttcgtagaaatctagggaatgtggtctatagaatgttaagtcagctcgtttgaggtcagtttaaggttcatttgaaatattggctgattcgatgattaaactatatgttttgtcttcttacatctaaatcaatttcaactttaaaaatcatcaacagttgtattgtggcccccttccgccagtccctcgctctacccgatgcctatatacggagaagcatcaaaccataggtatcattcttggacgttccatatgatttgctttgtggttacatcatgagtacgcacttccgttactgcaacttagcggtatcaatgattcttctatgccaacgtttatttacgagatttcattgcattttatatttgttgtccatgtagttcggttggtctagaaaatccaaatttatcagattatccaagagcagagcattcactgaagcagtcacaggagattactcttaacgctggtgatgcagtattcattcctgaaggttggtgagtatactcgtattttctcattaaagctctcctagtagcgcatagctttgcatttcagaataagctgaatattctaagatatcctgcatcatctgtatcaacctgtttttcctaatcacttgtagttatcatgtctctgttatgtagctttttctagctgagccactattttagatgctgcaattatatcaataacgtatgcaaaagaaatctcttttttcttggtctttctttagtgtgtgggtttgtatatagtttatgtcatatcgtatgaatatgcctagagcctctaatctagatgcttgacatgagttcctttaggtttttattccagacacaaacaaagatgcttgaaatgtcattttggttagctagcttactcagaaccatgctaattaaagtgacacttctttggttaccttgtaagagaattgtaagtatcgaagctttgacactttacttaaggcgagaacaatcagtaggcaggttgatggattatttcagattaagttttattttacttatgcaggttccatcaggtggatagtgatgaactgactgttgctgtcaacttttggtggcaatcaaacattatgtctaacatgcctgaacacatggattcgtattatctgcgtcgaatcacaagaaggtcttgattacacatcttggatttttatataggatatctttctgcataccatatttgttttgtttcctgactttgttcttttttcttgcatgtgctcctggattcttgtgttatcaattaagattgatagacagagaaatggtgtgtaagttattctctttcatcagtaaag

SEQ ID NO: 63284 - DNA, 221 bp, Arabidopsis thaliana landsberg
ccatgagaacagtatttgattatgaatcacatcaaatttaaccgttaatacctattatccagtttgactcatttaagtatgcacgagtatgcccaacttgtttaccacttagtaaagacgatgttcagaagagcactaatgacgtgtattaagcagggactaacctagactgtgaccatgtatatttgaacttgttgaagagctctgaaggaagttcatgc

SEQ ID NO: 63285 - DNA, 1539 bp, Arabidopsis thaliana landsberg
gaaagagggaagagccaaatttagttaattgatttcatcacaaacctctgtttttatcccaagtgctaaagacgctacagcagcaaccattaaaatgatcaaggtgagatcatggcaagcatcccaaagaaacctctgtaatgattaacaaaaaaccaatacgcttgataagaaagtgagcagggaaaacctaacttgtagcatagagctaataataaatatgcatttcataccagaaaccctttccctttcttgcgaggatatgtgtttgatccataaatggtcttgcgctttagcaagtcatcatcatcgccactgatacctttctctggatttgtcttgagcaaattggccaatccttgagtctgatgcaagaaatacacgcataccaataagataattagagaacgactataagaaaacagacataagcatgtttcatgactgaaaacttacccctccatattgctccagggcaccactgttgtgatcctttgacattatcacaagctgttcaggagtaattccaaaatcaccagccggagttgcaggcccagttgttttttcaactcctgaagtgagaaaaaaaaaagaccacatcaacaagtttatacaaaaagactttcttctccacattcagaaccagataatgcacaacaccaaagtacacagttagccaaaattacctgactcacgtcccatatccataaaacgattcgccgcctaataaagaaatagaagacgctaatcagtaatttacacaatctcatgataaagacatgattaaccagcttccaaataaagttaccaaaagagcatgagcatgacttctgatcttctgtctcatttccctcgtttcttgctccttcttcaagtccaaggtgtaccggaatctccgggacgcattgagaaccagtgcagctttctgtaataaacacaattcactgttagctcaaacacagataaacaagcattcttatctcacaatatgaaacaacatcagacttaagaaggatctaggtcttactctccactgttgaagccgctcaatagaagcattcttcgatgggatgtagaaagtgtcgctatcagagtctgcgtgttcactcttcccagactccacatcgcctccacggcgtcgtccaggcgatgacttcaagagactcgtcatcgttgcagtcgcaagagacaagaagaaaaccactcaaatccctaaatctcaaaaccactgagaaaaaatcaaaagataagtaagtttgcagtttaaaggttgcttctgctttcgacaaccacgtgaaatatcaagcaagaaaaaagcaatttctccgggataaaaaaaaagtaagaaaaaaaaaaaagataaatatcttcttcgaaacaaagtatcttcttctctctgggaaaaatccagagtgcgacaaaacagccacagatattttctcagatttcttcaaaaatccttgacattagccttaaatcacaacaatatcatgtaaaatcggaaaaaaaaaaaaaaaaatcgatgaacgcgaagtcact

SEQ ID NO: 63286 - DNA, 136 bp, Arabidopsis thaliana landsberg
ggagaagagatgatactaatcatagggaaagttgctctattagtctacaaaaaggaaacttaatcgacggggcaatatccatgttcgatatagtttatgtcttcttcaaacaagaatactgagagaagcgtataca

SEQ ID NO: 63287 - DNA, 451 bp, Arabidopsis thaliana landsberg
tacctaactgtaccctcctttaaatcccacaggctcaaagggacaaaccggacactgtttaaaacagactactctaggtgtcatcacaccagggggacaggcatctcctaattatcatagctgtaacccatgtgctctctgtgctataaaacagactcatttcttccacaaaaaaaggaatatgaatgtctgcatctgcgggtgacagaaagatatacacatatagactaccaacactggttgaggtgcatgactatggctgggggctggatagatggcctactaattaacatcgctggctgctctttcatagggtctgagttgtaatctcatcacccacatggtggataacagggcctgcctcctcaccctcaagatatctgatgactacagactctggggggactgggcattcacatggtgcacagacactcatgcaagcggcacaccc

SEQ ID NO: 63288 - DNA, 2012 bp, Arabidopsis thaliana landsberg
gctttgaaaagatcacatctttctgattgcagccaatagctggtgctcttgtaatgtctgaccgtgtacttaactttgtcctttcttgaaagtggtgtgtatgtttcccctttttttcgacagttatgggagatctgtccaacggatgagcgttgaggagaaggatgaagggaaaaagtggttgaatgacaccttctatcccataaggtaagatattcagccttgtagaactcgactctccgctgatgcaaaataactacctaaagcccaggaagttgtgcaacttggacatgatatgttaaaattttggtgtttgggttctcatgactaatcagatgtgagatggattcacttccaagtattgattgggttctggaacgtgcaaaagcagctgttcttcggtatgggattcgaggacttgttatagatccttacaatgagctcgatcatcaacgtactccacgccagtgagtgaagaaaatattttcactgaataccctctttcctttctgaaacatgaaagattaatattcgttttgataggacggagacagagtatgtcagccagatgcttacaaaaatcaaacgcttttcccaacaccactcctgccatgtctggtttgtcgctcatccaaaacagttgcaacattgggatggcggtgcaccaaacctttacgatattagtggcagcgcacattttataaacaaatgtgacaatggtattatagttcacagaaaccgcgacgaaaatgctggacctcttgatctagttcaagtgggtaccaatcccttcatcttcatctgtaatgtattattttaaaaatggccttcttattgtgtaaagttactaacctttttgtatgttttagattggtgtgaggaaagtacgaaacaaggtggcaggacaaattggtgatgcatacttgtgttatgacaggtacataaacttttcaactaccttcttatttctacttatctaacttaacggactaaacaagttttcacaagaacttatgatagtattttgttactttggcatcgaaaactagctgaagttattccgaagtacccaaagcgtagagacctttgcctagaacaccaaacctttatcaaaactctgttcaaagttacaatcgataattctactatgttggttcagtaatgaaatctttattcgacaggacaactggttcctactcggattctccagtgacgcctggaatgccagagaggagatcacccaagcggtactgatcagtttggtgaatttaaaggccgtcaaacacggtggacatagcgtatcgataacatttgtcaactaaattttatcccttttgggttaccattggtgaggaaaaagatgatcttgtgagattcttacctttgtgttttaacagactgtcaagattcaagaacaagattatgtctctactatgtaatgtggaattatgaatcatggtgtttctctattgtgtctggtaggtctgatccaaaatgtgactgaattcgatttttgtacagctctgtgatctttttgtgctctgtctgtttctgtagtttgttctgtttctctctgtctctgtctcctccttttgttgcggctgatttggtgttgtgaattagctgtataactgttgacttcaactacctctctgttataattatgcaaactctttgcaaattgattcaattatttccaatgttatactgctttgtgttacgtctatctagttgatttctttgagtattaatctaattgtcacgcaaatattttataatagaatcagttgcggcggtgcactataaatgtcgatcatatataatcattgcgaacgtaattaatatagggaatataggtgaaagttgtggaaatagtttattctcgtcaaaggatatgaccaagaccaaaattattgggattatctaaatttatcaatcccattggtttttttttcaacacattttgcttaatttctgaatattattttaggtaattgggttttctaaattta

SEQ ID NO: 63289 - DNA, 1531 bp, Arabidopsis thaliana landsberg
ctcttcttcttcttcaccgtcttcttctctctgtgttttttccatcttctctgagtttttctattttccactgatttggttttctgttgttttctggatttctaattagtttctatggatctgagtttgattgtaaaaaaacttgagattgactctaatgtcaaaaacttttgatctcctccagatttcgtcttctttggattcaccagtttttaactaatctcaatttgatccaataaccaaattgtttttcgccttttgaacaaaaacaaaataatctcagagcttctccgtcaaattctgatttgggttattttcaattaaaactcagaagaattttgagaagattaactctaaaatctcgcataaaacacagacacatttttacaatttttcacagttcaatcttccttttcgttttcatgattttgatctaattatttttgtgtttttgattaggtatcagagagtaagcccagattgtcttcctctcacaaatggaggtaagaagccttacttacgaccatcaccatcaagagcaacaaacgaagacaccaccaccaccaccgtcattaccacaacctcaatcgccggaagaggatttaacggcggatcatgcacaaccaccaccaacaacacctcatctctagacggagtccccaaaggattccgattcagatccactcaacagcagcaacaacaacaagatcctagtcctagccgtcgcggcggtgatgtactgttacagtggggacaacgaaaacgatcgagagcctctagagctgagatccgatccaccaccaccatcacaaccaccgccgatgattcttcgtcttcttcaggtcaaggtaagatacaatcaaacaaaccgcaaagaagatcgatgaatccttctatgccacctccaccaccagctccgccgattttctcgggccggagtacaaaccctagaaacggtttcgttatcggcaaggaatctttcttcccttccaggtttagcctcaaatctttcttcattcaattaaatttccatattttgatatatttacttaccttaaatgttttagaatcgagtttgatttgtctttttttacctctaatcgtttagattttgttactgtaaattaatccatatgatcgtgacttcattagcttccatatatttctctttttgttcatccatgttatgtgataaataatgtgcccttgtttttatttttatataaagtaaagctatttttgattttcaaggtttgatatattcaatttaaatgattttcgttttctggtttttcatttttgagatctaaacaaacgtttggtttcatcttctgttaaagctttaacgaaagtttggtgatccaaaattcctttttgggaaatgacagtaatacccttggaagcactaagaagcagagagttgtgtctctttttcctcaagtgctcagtttcttaggtttttcacttggtgtttagcttttggggtgaaaaatatataaaccgatttttctcaatctaatttttttttttt

SEQ ID NO: 63290 - DNA, 1276 bp, Arabidopsis thaliana landsberg
atgtaaaagagttgaagatgcttttaaggagaatgtattctttcttacaatttaaaaaggcatggcaaccaaaacagcttaatatataaaaatcatgaacattaaattattccaagggaagtgattacattaagattgagaaagacctttatgtatagtgttgttaataatgatagagagtgacattgtactcaacgatagcatccccattggtcaagttaacgtaatatgtattgagttgagccactcctctagccatcctaaaccttcctcggcctcccacaactgcaacctccctctctttctccgttatcgtattcctcgaaaacacggttatagaactaccgttaaacttgcccgatgtgaacccgaagtcgacgtacatggtcaacgtggggacatgttttccagaggaaacgtacatccctctagcgttcccgaccttctcggatttcgggtctggtccaacggtgagagggtcgtcgagagcaaaaagagaaccgaacggtgagggagaagagtcgttgtctcctcttgcgtgagtaggcttggcaatgaggacggctgatgggtttggagcggtgagagtgtcgtgaaagaagaaatggagatttgtgatcacttgttgtttcggtgtgattggacgagtttctgaatagtattcgccgagtgcgaacgtgatgcaaagataaaaactaactactattcctaaattcttccccattaatcttttttggtttacatgtaatgttttttgttagaggttttacatgtattgtaatataaaagagtgaccaaagattgcaattgaataggaagatagtgactcaataggtcaggctttagactgatttggagtcaaatccatgttacatttctttaccatatgcatacagtttatattaaaataaagtaagaaacaaatcaaatgattagaatttgaaagaaatcattattatttaattctcatctagttatgttttgctataatgaatactaatatgagagagtaattatgacttatttttagtatcaaatcacaagaaatatataataccaagaacaagaaatttgtttttgttgtaatttatatgtttttaatctgttttttataatttgtatgagaataaaaattatctatttctacacctaaattacaagaaagtagatcattacttgtctatatatctagacaatgtaaggtgagtacatgtggcttactttcgtgtcaccttcctggatatgatagtacgtagatcattacttgtctatatat

SEQ ID NO: 63291 - DNA, 484 bp, Arabidopsis thaliana landsberg
  unsure (1)..(484): unsure at all n locations
aaagcaaagacccctcctgcggtagtggctgcggaagaggaatcattgtttcactaggccccctcaaatccagttgtggcgggagggcattccctgcggcctttcaaatcacattttaatattgatgaaaaaaaataaaaagtttgcctccggcctgctgttcgcctccatcctgatctctgtaacaggttgtaagttaacgcagcccgtggagcaacgcgcacagatcaaaaccccggcaacattcgcaggccaggccgactctacgggtatcggggcactgcaatggaaaacgttctttaacgaccgccacctcgtcgcgctcatcgacactgcattgcaaaataacctcgacctgaaaatggccgtccagcgcattgaannnnnnnnnnnnnnnnnnnnnnnnnnnnnnnnnnnnnnnnnnnnnnnnnnnnnnnnnnnngtatccggcggaggcccgacattcggcgattacaccatggat

SEQ ID NO: 63292 - DNA, 342 bp, Arabidopsis thaliana landsberg
ctacgcattttgtttaccgaccaaataagatgggtagaaaaagcatgaaatcgatagaaatgacttgacaataatgctctcttaacttttagtaaagtctagtagaaggcactgcactaattaataattttcaaaactcagacaataaagaaagaaaaattgctagaagttacaagcaaaggggtacctgtaaactacaaaagattgtttcattcaaaaaaaaaaaactacaaaaacatgcttagcttgttagcagcaataaattatatgctaatgtttacatttccctatgttataagaataattcgaataataacttaatatataagggatatgcctttg

SEQ ID NO: 63293 - DNA, 1361 bp, Arabidopsis thaliana landsberg
gacaagtattgtaaagaaagagatattttccttggtataccattaagttaatgctgtaccagttcaaagatctccaagtaaatcacttttggatcaaaaagacagtcaaattcattcacagatgaaaacttgtcataagacacaattgaggagagtctcaccctgaacatgccaaagactgcctcgctccaacttgtttttagcagctttctataccgatttggatttaaaagccatatgaaatcgacagcgcatatgttaccccgatgattccggtggcttacccactgttaaaccaaagataacaacaacagtttcagaatcccgatcgcctattcaaaacatcaaaaaaatctacagcatacccaaaagtattcgccatatgaagaaagacagtgaccttgtgagcatctgagtctgtgtaccgatgagcagtatcgtaagacgacacaaaaccctgtgacctgagaaacttgtagacatgtcctcgcttacttccgttccaatctctgccacagacacaaacataggagcttatagtactgtaatcatcacatctaatccatggaaaagtaaaatccaaacaagatagtttcccgcaaagaataataggcatgggactgagattaacttccttctggtaagattctacatactgaagaatcttatatacctatcaaaacaaaatctttgtttagaaatatgcaaaatcatcacaataatagtgaagttagtctaagatttaagacagaactctacctgctgcaatcttactatggacaatgttgaatcatgaggaaacaacaaatgagtattgacaatcaaaacttcttgatgagcatcatactgagagtaaggaggaactaattctacatgtagcaactgagcaactctatcaccacaatcattaaaaagcaaatccctcgagttcacaactctaaaataatccttatgaacagccgtaagcaaacctattaaaacacaatgaatggttaaaagaatgaacaaagcaaacatcaaaaagccaaaaaagaagaagattcacagaaatgtttatatataccatcaccacgattattagtacgaccaagcttgtaacttagataaccagcgtctccaagtctcttctcatataaattaacaagctcttcattgcctacccaaaactcctatcaaaacatcaaaaatcagaacacataaaccagaaaagtcttcatagaggaatttcgtcgaacacctgtaaacatatgattgaagatctctcatataataaccaatcaatgattcgatgattccaaccaagccaatacgctcgattatcactttcacgaagactttgatcctacatttccacaaaattc

SEQ ID NO: 63294 - DNA, 1760 bp, Arabidopsis thaliana landsberg
  unsure (1)..(1760): unsure at all n locations
gagcagcttatccaaattaatgtctcatgtgtcacatcattcttcgattgtatgtctaaatacgtacaaatggttggcataggataccatttcatcaacttaaaaataatattttcatttcataattgatgtccactttccgactcgcccctttggaattattcgctccttcgcagcctactatataaaccaatcagataccgccatgtcatcctccactgatttgtgttagagaattgctcatgttactgtagtcttttctccatgaacaaaattacttacaacttacaaggctaaatgatgtttgataggtttaacattttaattactctgtgctctatataagtccacaatttgaataatcaaactgaaacctgtattttaagtttgtccccccattgaagtaagtatatggttatgttggcatttagtgtttgcatcgaatggtcgtttatgtcaatgaaagacgtcccgtcgctgccattgaacgtacgtaataagcattaaatcttaacagtgtgatgcaaaatttctcttatagctcatcatcctcttttttttttttcttaagaatttgttgcatgtgaagatatttggtcactagagtatcgtttctatagatgttcaagacagtagtagttggaaggccgtattgaaaacagtctgagatggtagaaagaaaatcttattttacattgatctaatagatgaagactcttctgatgatgcatatatatatttccaacttcgtttgcgctttattcctacggattgtcaaacttttaagagaactatgttgtccttttaggttgttattggtcatcagggagatgtaggggccatgactgtacattctttttggcctatcaaaactcgattcttttttttaactcattggattcgtgctgatcatgctctttgagaatgtattcttatagtcaaattcaaaactgttgtagttaacatttgttaaacaattaatggctttaaagtcatacttttgatacctactaaaataaaacgttattaattatgttgcaaatggttagaaggtgtaagatatacaatgcaatttggttaggattccagaaaaggctaaagaacagtgacactactagcaaaagtgaaagaaaaaaacatggccatatttatgtatacaaagtctacgcttaagaggaaaatgaaggcaacagtaaaatagtgaagaaaatgacaatcttataactaagaagatagagacatataaccccatttagtaaagaggaaagttgtaatgagaatggaaaaaataaaacctagagactcagttaatgggttgaaatttcaggctaaaatatgtttctctactctttgtttcgtcttcttgtacgactacatataacacacataacaaaactaaaactcgtaaggtgtatgtgtgaaactagttgtgtatatacataagaacaaatggtgaaaaccagtagttagggatagatctctgtccaaacatattcttgatcgatcttagatcaatcatgcactcatagagatctacttcgtttgtttgtttattagactcattatctctatgagtgattgagtattatatgaatccgtttctaaacaaagatgccgaaggagttgatgttggggtctgatcgcgccagaaaacttaggtttttctctctctgtttgaaccaaaagtcgtggaactccccctcacagatctaataatctctanataaccgtagtagtaaaaaaacagcttcaagttcaat

SEQ ID NO: 63295 - DNA, 417 bp, Arabidopsis thaliana landsberg
actacaaaggtcagccggacattgtttcaacgtaatcgatgttttctctaaagttcagagacgataagcaaagttacatcatcaaagccaaacatggttgccatatatgaaacacgtagtcccaattatatgaagtccccctaaagctattctatacactcaaacatatctcatctttcaacagacaatgacaaatgttaaatctgtttctgagtgagcagatgaaagcttctacataccgagaaatggttctttcaaaaccgagaattgccttgcaatcttccacttgatgataccccaagcatcggcaccgtctgtctctttctgatgtaaatagcagctacgttaacagagacagtgctagcataatcgactgtccatttattaaaacaatctaacattagcacatattctaaa

SEQ ID NO: 63296 - DNA, 1857 bp, Arabidopsis thaliana landsberg
  unsure (1)..(1857): unsure at all n locations
aggttacgttagggcgcgtaacacttacgctttgtgtgatctatgattcttcggatgacgtcatattcgaagagctcttttataatatgctttgtgttactgctcgataatcgatatatgtatgatcgaagtcaaccgaatcaggggatttttagaagatgctaagcatatatgatataacgtaataataatatacagagaatacaacaatatctggttaatagaatgttcaagttgaatgtaaactaaatcagcaatttatttaattttctcttgaatataagtatcaactgtacgtcttattataaaacgagatatactttattttaaatttaactgaatatactattccaagagttaaattagttttaacgttaactaacctgttgttgaccctttcgacctattttatcatcgaagacgtgggggcaatcaaggacttcaacaatggcttgtccacatctattgttatgtaaactacaaattaatatcattttaaacgaccgatatgtattctctactcatccggaatagatcaatgaataaattttaaatctatattctctaaattaagcatacgcttatctaggacaatggtcagctagatcaaattattaatggtccaatacattgccatacttccgacatcctaaaacagttacgattgaccatatgaaacagtaaatataataaaactcaaatgtcatttttagtcaagtttgtcgaatttcctaaatagacatcaggccatatccgctaattatgttgaagttcgaattaatagcatatacctcatcgattataattaaaaacgagtagaaagcgacatatgaggaagtgcaaaaaatgaaaaaaaacaaaattctatttgggtatattcctatatcagagaaaatagtttcgtgatagaacattcttatttgatagtatataaattcatagcttaaatttgtaaataaaaaatgaatcaactatgccatttagatgtatattatatttttttaaatggcgatttaaaatgcataacgggcgccacacaaaaacaaatggttaatacagaacttaacaaataaatatattttttaaacatatacaaataaataaatgataattataaagaacaatgtattattgaccttttggtatgggcttaagacacaaattgactttgtgcgtgtgaagaagacattttttgggtcacaaatagattatgtggatcttcaattgtcggttgagatatggtatggcgtggtgcactgcacacaactacacctcctgattttcatccgttggatctcatttttgattcatgcaaaacgtcccacaggcttgatcgtcgaggttcttgcagtatagtgggttaaatttagaaatgcacacttggcgtgtcttcttcgagtgtcgattaccaaaatacccatctttatgaaaaagaaggatttgtccgcattacgattagaggaagggtatatctgtctctgcaggaatcagacaactcacttgaccggtatcccacctggtccccccaaattggttcgttgttaatcgtcgatgccttctatcaacggtcacattttgctgatcgaagtgcgagagatgcctacccgttgatctaattaacatctactaaaggcggaagaaaacaaaactaaattaacatttactaaagttttgctcatctattttagtcttgtgaaaaaaagatcaacattatattttttttacgagtaaactaaactaagtagactatggacatttataaaagttgacaaataactactacaagttnttttaacaattgaatagtcatttgctaatatttctatattcgtttactttttccggattaaaatttac

SEQ ID NO: 63297 - DNA, 110 bp, Arabidopsis thaliana landsberg
acctgcaaatattaatagtctatattagaaaattgcagatctggtatatccggtatacacaatataccatgttgtatgccttgattttttaccattatgaactatgggct

SEQ ID NO: 63298 - DNA, 546 bp, Arabidopsis thaliana landsberg
agccaaaaccgaaatctctcgactatttatgagacatactgcttcgtcagacatgaggccttcgtcttatgaatctgcaggcatggaggatgcctaagggaggttctctgaaaccgaagaagaacgccattgtacatacacctcttgtcaaagaaggactgctagtgaggacagaacatactgtgagtgatctgtgttaaaaagaggcacatatgaaggatgtgaatcgtgcgctcacgtgagggattatgtgacaaaagagtgtgtaatcatatggataagctttatttctacactatgatggtctgtccttgatactcggatactctgctcttgaagctaactactttagacattgatcttgctttttatacccgtctctgattggacatatgctcttgaattactcatactgccccaattgtgacataaaagcttaaagatgctacatagcatgcaggcaacaaaatgaagatgacctgaaaacattggtccgagattcggacaaagtttatgacaatgaacatgaacacatatagagacata

SEQ ID NO: 63299 - DNA, 115 bp, Arabidopsis thaliana landsberg
  unsure (1)..(115): unsure at all n locations
tctcggcaaacaatatcgttgcctttttttttggtgaaaaatatatgttgnaccaatcctcgtttgcaatcttggctcaccacctgccctatcaaacattgtgcggacagaaaaa

SEQ ID NO: 63300 - DNA, 709 bp, Arabidopsis thaliana landsberg
gcaaaaccaacataaggaagaagattggatttaccgaaaggaaaagtctctcaagcacgccttttgctgagacgccatgagttaggctcgtggtaacggtcatacaacggctcaatccgttcttggcgcttacgcttgctcatttttgttgggtcagacactttgaagaaccttggagctaactcaacaagccactttgggtcaatcacagtcacttccctcatgtactctttcgtagtcatcacaagatcatgatatataacccagtctggttgtctctggaacagcgcgctgctcgggtgtatatacaccggttgattctccaccagcgtcctgtaaccttcctgtggatcttttcttgctccatggaagaagaatcctgccgtgattgctttccttatcttcgtgaaattctttccagcagttacgacgtctagtttatacctgtaaaatcaaatcacacgttaataaacagaacttggattgtcacacatcattacaagctataaaactcaatactagtttagctacttacttgtccataatgctgagaagtttgtttctcacatcttgagcacgtcgtaacgatcttgactgtatgaagttttcgaaacaccatggacctgagaaggttttagcctttcaagctttatacacagctagcaatgtcaagtgatcacctttgggctggaaaaactttgcccgtttt

SEQ ID NO: 63301 - DNA, 449 bp, Arabidopsis thaliana landsberg
ggttgaacaatgccggctccactacaccgggatcggcggcattcagattttggaccgtttttgcgaagagctcggccgtaccgttggaaaagccaagcgctccgtcgatggaaacgacggagccgaccaagtccggtcggctggcggcgacgcgtgctgcaatctgtccgcccatggaatgcccgacgatgatgaattttctgccggcgtgtctcgaggaaatcagtgcctggatgtcggcaacgtagtgagccggcgcatacgcgccggaaggaatgacttccgacctgtcatgtacacgaagatcgggcgcgatcacgcggcacttgctttcgaattacggttgttgccagttccagtcattggaatcgaaagtgcagccatggagcatcaggacgttcttgtccgtacccgtgtacgtcatgaaaagcctggccgtcggcctggtt

SEQ ID NO: 63302 - DNA, 146 bp, Arabidopsis thaliana landsberg
ctcgcagcatgagtactcgttcctcttcttcgcagcagtaaccaataagtttgactaaattcgggtgttttagctgttcaagtattatgaccttacactgcatatgaaccaaaaacatattatgactcaaatgttatacattcctt

SEQ ID NO: 63303 - DNA, 209 bp, Arabidopsis thaliana landsberg
actcccaggaaatgctcgaacgaccttcacacaaaaggtatctctgctccagcatcctacacaggtgggttggtaaagattttgcgtctaggaagaagctatgacgttgactaaaatggctttgttagcgtaaaactattattgagggggagaaaactcgcaaagggggacatgaactgctcgaaggtgtttatatatcgtacatgagg

SEQ ID NO: 63304 - DNA, 250 bp, Arabidopsis thaliana landsberg
  unsure (1)..(250): unsure at all n locations
ctatgtaagatacaacanagccctcaacaatatgctttataaatttatgtctcatttcccaattcaagaaatggcttcgaattccacatgcaaaagtttattattagattgaaatcattttatcaagtttatagctagcatagaaaagagtgtaaaaagtaaaaactaactaaaaatataattacttaagctagcgttttctgaacaacattattttttttgaacaacatttttttttttatgttggggt

SEQ ID NO: 63305 - DNA, 437 bp, Arabidopsis thaliana landsberg
aaaaaccgcaggagacagggaaggcgatgtgaacataaagggtttttccaaaagactggagacgtctgcgagaattcctggctcaggggagcttaaggatggtcacgctgcatgcctaactgacattgaatcactacctacatgcgcaagcctgaggaggccatcatacacagacataaagacactctgggcaacataacctctagtatcttatgacaaccgatgggaagagataaggattgtgcaatcaggagaaaaacgcatatctacggaggcgttgggtcatgatgagatggagctgaccaaacttaccactctacgccgtacacatgtacagcttgcaggagttgatgctacatcaacggcacagaagaatcagggaacaaggctgatctactagccacttacagggagatacttgtcagaggtgaacccac

SEQ ID NO: 63306 - DNA, 1401 bp, Arabidopsis thaliana landsberg
agggggcatacccatcagtaatccatggttaatataaccatgaagagacgattgcaactgcgtcttttgcaggaaagtacatcattgtaaagaacatgaatgaggtgtgacttttatattgatcaaactttggatatccatagaattttgcaagatgagttactgatggggtaccttattactgagcacaggcaaattacgtttgagattacattctctgtggccaatacgacggatctagctccacaaaagaggagttcatggaggtatgtaagcttattttgctaattctttgtaacattctggtttttttaatctctatgtcggcgttgtagaaattcaaatacgcaatttccaagggttttgatcccgacaatgaccttgtcaaagttggtattgcaaaccaaacaacgatgctaaagggagaaacagaggagataggttagttactctaccgtttttttacatgacaatcgtcttttatccttggaaacaaaaacaccttagtttgagtctcatgccaaaaaccccacaggaagattactcgagacaacaatgatgcgcaagtatggagtggaaaatgtaagcggacatttcatcagcttcaacacaatatgcgacgctactcaagtaaaattcccatacctcaaaaaccatgcatctagacaagttttacacttgaggaagtgtttattcatcaatactataatctcttcaggagcgacaagacgcaatctatgagctagtggaagagaagattgacctcatgctagtggttggcggatggaattcaagtaacacctctcaccttcaggaaatctcagaggcacggggaatcccatcttactggatcgatagtgagaaacggataggacctgggaataaaatagcctataagctccacgtaagcgcatttcaaaactaacttactccttaccaaactgcattcactgattttttctattttacattgatagtatggagaactggtcgagaaggaaaactttctcccaaagggaccaataacaatcggtgtgacatcaggtgcatcaaccccggataaggtatatatatatttgcagctatatttttgtttggttctcttgtttcccacacgaacatgagtgaaaatatttgtgaaaaaattacaggtcgtggaagatgctttggtgaaggtgttcgacattaaacgtgaagagttattgcagctggcttgattcggcattgtgatcgtattcaaatactatttgtcatgtcaagagtgtactaaaatatatgtagttgtatgatttgtctttataacttttgtaagaggttttgtaattcaaagtcaacaacactcgttatcttaccccacttaatgttcttaccataatcgcaattagactgatatagaactta

SEQ ID NO: 63307 - DNA, 612 bp, Arabidopsis thaliana landsberg
catactcgaagagataggtaggtacgagatagctactagcgagtagcgaatagccatatacacttaacttaaggaacaattttcaatttgttattgtttctatcttaggatatttcaaaacaaaacaaacaaacttctcatatcacaaattaatatcttcctaaaagcacaagtgttatacaaatgtaatgttgcatcagaatgttgatactatcaattctgatgtatataattcttcgaataccaggattaggataagtggataacgagaataagagatcattacatcgtcaaaacaaatataatagagaaaagagctctaaattttcttaaccaaatcataaactaaaataaatcatccaagaaaagttagaaaccccatcccagttttttaaaaactgataataactatttttttaaaaacataaaaaatgggagtctttttggtgaaaaaaaaaagtagagcatttgcattttttttgtagattttctctggcaaaagatgagctctggcccaatattattatgggacatattggaaaaagggccaaacccaccatgataaattattggctttatgggcccctaagtgcctctgttattttattggat

SEQ ID NO: 63308 - DNA, 574 bp, Arabidopsis thaliana landsberg
acaaaatttactactctatcagtctatctgttgtcttatacactacacctttattatgcactgttcctatcccaaacaccaatccctatgctcagtccatatggtagatactactagagatggtaacccaacacatatgtgttagatggccccataggcagtaagcaaaacattactttttacaaccatatctttgtttataaattttaaaagctacgtgaatttaatttagtattactatcctggatcacaatcttgggccaacaaaagaaatgtgtatgggccaactgtgatgaaagaaaagcccaatggatcaaagttcagatgctttctgtagctcttttgtagagaagtttttgtaagtttagttatagaagcaaaaataggtaaaccacaaaactgaagcccggttgactaaatccttaaatgtgatcatgtcacacagcaacttggctacatgttgtcgtgaagcaatgaataaagtggtacgtggtgtattctagaagcgaaacgtgtcactaatcttatcacctttttagggtaaaatagatttgaaacaaacatttcttcaaca

SEQ ID NO: 63309 - DNA, 761 bp, Arabidopsis thaliana landsberg
cgctttatatctctgtcttctttcattctccttgaatttcttgaatattttgtaagtttttaattatcatacattggtcttataacaaaatgattgtttctcaccatgtataaattctttcttttaaaataggttcatattaggtgaaaaagaagattcctataattaaaagcgtttctaaatgaccaaagaaagaaaacataatcatgaaataaatagtggcctgacccaagttcttaccaatgttgtcaaatatttcgccacatgtacgaatcagaaaacacagagaataaaaactaaaaatagtaacacttgaattatatttatttcgattgtaacacttgtgaattttataaatattcctcttctcacttctccattatttcagagaaccataacctcgtgggctctgcttttgtccccttttaagtataagctaacagcctttacccatatgacctaaaaaacattttaaaatcattacatttttttctacatagtaaacacttgattgattggttttgcaacgctcacaattattataaaactcactaattcaaaaccaaaaaaaaaaatcattaatcatacctaattacttcccccttcttctcttgttttttcttgcttgagatcacaccaacaacttaacggtttaagaaaatttaaaataaaactaatgtttccaccttccaccactaatcacacattactttaattaaatcttcttcttcttccatttattaaactttagaagaaaaata

SEQ ID NO: 63310 - DNA, 1385 bp, Arabidopsis thaliana landsberg
ttcccaaaacttccatttttttccctttaaccatagttttcatttttgcattctcgctttatcagtactcgacttagggagtttgattcgatttcggttaaacgtggtaaattaagggaatcataaccgaataaatcaaatcaagctgaattggtgtagattaggaagaaacagaagaaaaagataacaaaagggaactggttaacacgtttatgtagtgtgtgatattagctttcattttagtagcgctatatgttctcatataactcaacagcagtcaaatgctagaaaacattattactacccattagcggtagagagaaagttccaaaaagtttaacataatctaaagtaacaaaaaaaaataaaaatcgtcaacaacagttcaacaaaaagcatggtagtacaaagtcaaggcaaaataagtttgactcaaacccttaaagtcaaatccaatgggccgagaatcgtttcgtcaattgcaccagtcccggttaaaaactgaagaagttttaaagaccgtcattcattggctgcaataataaataaataaacgtcgtcgtttatcctcgtcgtaaatgggcccatttaatgatgaggtccaattcgacggcatacaaaaataacccgcatactaatcctgacctcgtattatatatatatataatgatatattacaaagttatatcatcaccatcaaacacatcattaatcatacacacataaaaaaaagagggtctatatattcctcatcttgccctttttccttattctccaaaccagaccaaaaatatattctctcggttttttccagagcgtatattcaaattcttccttaaaaagtaaaaattaatctgattctctctactactactactacgatgggtgaggttagtcacttcatcttcttcttcttcgatttctctgtccgatctctctaacaaacacgtgattgatttcaatttctctttcgattttgcagaaaaaggaagaaacggcgacgaaacctcaaggagagaagaaacctaccgatggtggaatcaccaccgtcgttatgaagcttgatatgcattgtgaaggttgcggcaagaaaatcaaacgaatcttcaaacatttcaaaggtatttaaatcaattgatttctctttggatttgattactttcgaatttgaaaccctaacccgaattttaattgtaatttaggtgtggaagatgtgaagattgattataagagtaacaaattgacggtgatcggaaacgtagatccagtggaagttcgtgataaagtggccgacaaaattaagagaccagtcgaacttgtctctacagtagcgccgccgaagaaagagacacctccttcatcaggcggtgcagagaagaagcctt

SEQ ID NO: 63311 - DNA, 525 bp, Arabidopsis thaliana landsberg
aaatgcagacaacaaaaatttgttagtgaaaagttttttggatagttagtattttttattttaaaaaaaaaaataaactaaatgtttacaggtggtgtagaattatagttatcatgaattattcggactatcaataaaatcttgacatgtaccttctatttttacatttgtttcaatcatcatttcacatgcccactttttacacccactcacagtctcacacatttttttctcttacacacattctctcatctaatcctctaattaatagtgggaccgggctaataagctaattactttccaaaacctattatttatctccagaaaacccaacaaaaaaaattcacccccaaatcggcggatacttcttataactatgttatagtacttaaaacatttgtaaattatattggagatttcaaacatctgtaattcaaaaatttctatgattcaaaaattaacagagaggtaaaataacaaacccaaacatataaagtccattaaaaaatatactttgatttcaaa

SEQ ID NO: 63312 - DNA, 1422 bp, Arabidopsis thaliana landsberg
gaaaggtaaagtgaaagttgcagaagaagagagttctgaagatgatgaggatagtgttgataggtcaaggattctcgctaaggctctcttagaggctgcgttagagtcaccagatgaagaacttggtgaaggtgaagttagagaagaagatcaaaagtcgcttaatgtcggcatcatcggtccacctaatgcaggaaaatcttcgctgactaatttcatggttggctcatttccttaatttcacatttctgtgatttggtctttgagaatcaattgagacattgcgtatatgtttatgtagtgctgctatgactcttgattagtcctaaagttgcaatttttgaagtgattgtgtatctttgtttattgcatcttgatgagagttatgcttagtgtttcgttatgtccaagtgtaggttggaacaaaggttgctgctgcttcacggaagactaacacgacgacacatgaagtgttaggagtattgacaaaaggagatacacaagtcgtaagttttcccttatatatctgttgcatatgtaaactactcgttatggttagttgtggagatcagccattcgtagattgaatatttgatatttgtgaaccttgcagtgtttcttcgatactccgggtctgatgctgaagaaaagcggatatggttacaaagacatcaaggctcgtgtgcaaaatgcttggacttctgttgacctgtttgatgtcctcattgttatgtttgatgtccataggcatctcatgaggttagtcgtttactagtttttgtactttgttagctttacataagttatctcggaactgagagtagtatggttatgagcatcatcatcaagtggggtatcttagggtgggattattattactagcttctctgtttcgatatctttcatatcttgttcatctctccgagattatccataagcttgagaaccgtaaaccgatgggaagacacatctatttctttcttttgaagaaggcatcatgactgtggtttttcattaattacaagtagaaatagagttctcttagacttattttgtagtttgtgaattctgttttctctttgatttatctagtcccgattcaagagtggtacgcttgatcaaatacatgggagaagaagaaaatccgaaacaaaagcgcgttttatgtatgaacaaagttgatctggttgagaagaaaaaggatctattaaaggttgctgaggagttccaagatcttccggcatatgaaaggtggatatatatataccagactcagtttaaaaacaattaccggggaagtcttcgaattgattgaaatgtgctttttccctgtttgggtttctagatacttcatgatatcgggacttaagggatcaggagtgaaagatctttcccatacttaatgatcaagctgtaaaaaac

SEQ ID NO: 63313 - DNA, 343 bp, Arabidopsis thaliana landsberg
tacttgatttcttgattttgttattgcagttttaaaacagcattttgattttttcacacaacggactaaaaacgggcgggttttcataaaacggccattcatttatgggatcgatcttttaggagcctcaccaatcaacaaacatggtgcctaatgtcgggagacttaactactttacatcccagagaatgtatgcagacctccatggccaagatcttcaaacgatgagattgattgatatccaagaaaccatcaaaaagatttgaaaatttccctcaccttgtgagtacatgatcattgccgacggtgacaggaattggttcatatgcatcagtgtcaaggt

SEQ ID NO: 63314 - DNA, 1203 bp, Arabidopsis thaliana landsberg
ggaggataattgatgtagttaggcactatcatattgggtaagtgatagatggattaggcaaaaagagggttttctaaatcaaatacgtataaaggaatcaaactcactttgctttaccaaccaatgtctgttcagaagagtctgctaccttcattgattcttcatcttccaaattcacctccaggataggttcagcagaactgttctcaaacagaacttctacgcaaacatgtaatggagatacattagagacttcagataaaaaggcatagtctaccttcaagccactgccatttccagggtctacgagactatagcttttaggcttaactcggcttcctacatcaccaatggatatcttcgcataagagctctgattactatttaatgcagatggagtttggtttgatgtactaggctgatcatctaaccacaaatccagggcccttctggaccttagttcttcctggtcagcggaaacagaagtctctgaaatttgaattaaaggagcagctgggtcattggcgtcattagacactgttctttcatcaccttcactgctaaaatccgaaccattagaagattcagagtcataatcagaggagccattctcatcccctgtttcagaggattcctcagaaccatctaaatcagctgcggcctctctttgtttatctaaatctgacagctggtcctgttcttcatacacaaaactgcagggctttggaagaggttcatatccaggggctgcatgaagaactatctgtgacagagatccaggaagataaaaacgattgtgcagggttataggtgaaacagatttcagttttcttccaaagacatgttccacaacatgcgcagcaatattttcttgtgatgcaacactgtcttctgccggctcatgactagctaatttgcatgacagcagtttcttcaggaaacgagttcgatcacgaatatcatagcttaagtcatattcgcccaatccaaacacatagaccacaatccttttcaacatatgaaagtcaccagcctctgcacttgttagaacctacaattacagtgataatttgatcaatatcttctgactgtagtgagacgtgccacagtaaacgtactcactagcatgaaaagtaaagattttcatagcatgcctaagagatttcaaaggacagacaaatcataggatgaaatgttatcgtt

SEQ ID NO: 63315 - DNA, 594 bp, Arabidopsis thaliana landsberg
  unsure (1)..(594): unsure at all n locations
acgtcgacgtcgacggcattgcccgcgacttcgaccgtgcgagtgtcgtcgagtggcgccaacaactgattcgcgatgggaacgacgagtcgtcccgtcaccgagccgatcaccgtgctaaccgcggtatcgaggtcgaggctctgcacgatcgtgtcgggcacggccgtcaggtgnnnnnnnnnnnnnnnnnnnnnnnngttgggattcacgaagtggatgtcgagcttcttgtcgacgacgccaacggtgagtaggccctgcacactcacgcggtcggccgtcatctcgacatcgcgctcgccgtcgagacacgacaccgaccattgcagatgcatgccgacgtgcacgttggtgagcaccgccgacaccatgatgccgcccgcgctcggtccggtgaggacatcggcatcgccgacggtgatgctcgtgatcgacccttgcccgtagagacagtcggcaccgccgccgacgttgacgacgggattcatgccttgcgcgatgctcgtgagaccgccgctctccatgaacgttggcgtctggtggccgagcgtgatgagcgccgatggcgacagcgtctcgcgaatgccggca

SEQ ID NO: 63316 - DNA, 2789 bp, Arabidopsis thaliana landsberg
aaattcgtctcgaatcaaacgaccgacaaaattatacactatacggcaaacaaaacattcctaagatttgtggattggagttagatacgacatcatcaatatttatacatcagtaactcagttccattgatttaaaagttttaagaaagaaaaaattcttcttctatttaattttgcttattatgttttggtgacgaaagaacacacaacaaaataaaaaaattatatgtatagatagtgggggaatgcattgaacatcaataattccgttggacgaagggaaggtttcttgtcggtttatgctgaatatcggatattctttatttcccatattaattgaagaaagcaattatttaagttgggcagcgtatactacatcaaatatttatgccatcagaaatgtctgtcaaacaatatacgatattttgttgttatttaggcatctgggggttcttataacttgacgagatttcaacactcacacaaatatgtatgttgataatgatggacctatggttattaatcagtaaaaatattgatgcatgataaatctagaaaattatagtagtaaggtttatgtgtaatgtgttagctttctaatgaatagtaacaacatatcagttgaattaaagctaaaaaagtcaataatctataataactgaatatgatgacattagaaaagaaatataaaacctccgaaaaagttataggtggatcatggatggtttacttaaacacataaaaatggagtttttgttgttgttgccttggagtcaatttagacaaaaaatataataatggatgttttgatgggctataagaaagaagggtaaatagtaaaagttagttacaacgacagtccaattaggtattgaaacagtaaaatatggaaaaaagaatagaaaaggcgatggatgtgtttattagacttgtgtcccactctccttatatatatgaatctcacattttcgagctgtatttttgatatatattgaatatgtacatttgtgtgtcaatgtaattgcttgaaaatgacaagttctagatttggaacactctgtgctggctatctaaggaaagaatatctgtttatttttaatgctttacttcttccttcccatcaatgattccttcaatataacaaagttctaaagcaatgcctatctctttaattggagattttctaattgtgtatatatattcattgctctgaattgagtttttgttctcatttacttgtatttttttgggttggaagagcatataaaagtcatttggggaaaacagttttgacagaatcatcgggccttgatccaagggaatagcaaatacagtactagtattaaaaaaaatggttagagaagctgctagctagcaagtcagtgataaataagtaaagactatcattcattaaccattattaattcctcaactaaagtcattagaaaaaagaaaggctaattaattaactcgaagatgctggctggggttaaaaaattaacccaggggtttggttacaaacttcttacatcacggacggggagggttataataataaaggaaacttaacggccgtcagcgagagggttaacggcagattccttgcaaggacttggaggtagacttgactttcctgacgcaacaagacgttgcacgaaaccctctattctttctccgttactctccgttagtatccgttttaccccaaacggcgccgtttccacacctctctctttcagcaactcctccgctccgccgctcgtcaaaccgttcgcctgcatgcatccaccacattttaatatattcgagacattttgatcggtgatctctgtggtgacgagaaaagttgagaatacgtacctggattctaacgtaatcagtacggttccagcagaaagcgttccccagcatctgatcgacggtatcggaaacgccgtcaaccactatgtccaccacacttgacgtcgaacagtctccgttacgacggagtttcctccctggtgatgatgacatggtcgacggaccgtttcccaacgacagtacaagcaagtcatctacgccgtttactgacgggaaatctcgtttgttgtgtagcacgtgcgtgacggcagctgctgttggattgttcatcaccaaaccgccgtctacggctgagcatgaggttttcccgtccaccgacactacactgaacggcttgaagaggcttggtgttgctgacgtggcacggcagactttccacagctcgaagtcgaagctcggagactcagacgcgccggcgcgtgagaaaacgaaaggagcagaggttttgaggtcgtagcaaggaacaaggagaggcttacacgtgtccttcatcgtcaacaccttaccgtcctctctcctaaacgccgtctccaaaaccctctccatgctcttccccgagtatctcttgttcctcctgaaaactccggtgtacctgatctcgaagagctccgagttcttctccgcgacaaacttaaccgcgtctctggcagtgaacatcggcctgccggagccgtcgtcggcgacaaggagggcggcgagaatgcctccgatgccagttccggcgacaatgtcgaagaaatcagagatgtgagcgtgagggtcgccggtttgaaggcggatctggtgctcgaggtggagaatagaagcagcggcgacaatgccagtggtaccgccaccgtcgatgctaaggataagagtcttccgggaggagtcgcagtgagagagccatttctgttcaagctttgtgaaaatgtcaagagtaacctgct

SEQ ID NO: 63317 - DNA, 831 bp, Arabidopsis thaliana landsberg
gtttacgcaaacgggattaagagatacgaaaaagggaagaccaaagtcaaaggctaggctaggacccgttccactctttctctctctctcttccccaaagtcctaaaacgccatccaaaacggattccgaccaaacctcatgtgccctcttattttattcctaatttagtgtccaattaaattcattatcgattctactccttattttaaacaaaaatctaattcataagtatatgtatttatgcagtggtaattataagctttcaataaattgagaatataagtttatttgaaattgttttttttttttaataattcttatccaacgaatcagttatccagtgtttattaacaaactttatgttaatgtaggtaaaaatgatacaatatccaaaagtacttatagttcgaataaggaaaaaagaacatttctaattttctatatcaagaaagatttttgaataattccccaccattagggaaaacgtatcgtataactgattgcattcgagtatacacaaaatagtttccatttattccaaaataatagaaagaaaaataaaaccgacacaaaaatgcgaaaaagacaggaaacagccgttgttgtacgttgactttcaaaaattatgatctttgtttatctctaattttccgcataatgacgtctcccttctttttcctatccgtttccttcacatctctctctttatccttcctatatatatcgcaaacgtttttcctctcattcttaaatatattcatcaaataaacaaaaatctctgtatttttttttaaaaaagatggctgatttggatttacagaggaagatgg

SEQ ID NO: 63318 - DNA, 1833 bp, Arabidopsis thaliana landsberg
  unsure (1)..(1833): unsure at all n locations
ccctaagcttttgtctgaaccgtctctcttgctctctctccatccacctgctttctgtggcggctctttccttctctagctccgccattctcctccggcactctttctctctcttctccctctctatctccttcatctcccatgcatctctccattccttctccatcttcaccgtttgcctcataaactcctccaatatatcttttagtgtattacccgcagtttcagctttcgtaccactcgcaacgccttttcctttttttgcacgttttcttggattggtcgaagtactagtagtaatcacttctgtctctcttttctgtgtctctactaaagacaataattcctcgttgatatcttgatttggttcgtcaacttcttcttcttcatcatcagatgaaaattgatgatgttttctcttcgaggaagtgcttggttctgtggcttctgaccacagcattctttgcattcttgcttcaaaaatcgactgaatctcattgtagaatgggaactgctgcctaatagcatctggctcagtggtctcacacgcctgtcccatgaatattcattatgttatataaacaattatatgtaaacacgtaatagtaccgacgcaaaatattttagctaaccaagtatcttaactcgaaatcatatatcataggaaaacaaaaacacatgttcatcatctatatcacgtttctttgacgttaaatgggggtgtgaatagcctnccccaacgatcttcaggtgttcancagtaacggttcttattaaatcttatgcacccgttatataacggtaattatatttttatggcatattgtgttacttacttaccatgtgatcaacgaacaaaaagagagatattatggtataacggatcaaaatgtgaacatagacaatatcatgatgaaagctcaccaataaacgcgtaaaattctattctatagctcgttaccattaatgacaggacaatatctaaaaaacctaggcgattaggttaagctcattaattgatgtatatataatgtagttcacctatacatacaccataaactaggtatccatttcaatatgcataatttcagtctaaccacacaaactagtgatgaaatacatgatacacataattatagtttgtatatactcgtaatcatgatcatactaacatttataggtgtatatatcgggactatatatagagagaatcatcaataggattataaatagtggaagggtaaccttgtatctggtgacgaggttcttccacttgctcttacattgttctgcgcttcggacaaaacccttgtcggccatcttagcagccacgacttcccaaagaagcttattacgtttggtctccatgaaagtttgatcaagttcttctcttatagccaaaagctcctttgtctcctctatgctccactgtgggattctctccccacctcctcctcctccgccgggatccatcgtcgccgtcgtgctcagcggcggcggaggaagctgttgctgttggatcaagtgatgatgaagctgatggtggtggtggtgatgttggaaagggttacgtcggtccattatttggaatcgaattgtctttgtgacgtgaagagaagaaataagagggagataattttatttttttgttgggttacttataaatgaagagaggtttcattgaaaaaaagaagagaagacagagaggaaggagagaaaagagaagaatctaattaatttataaggatgtgtgaaaagaaggtgtgaaatcgtagagggacgatagaagtgtagtttttttgttcttttctctgaattaaaattattaagatg

SEQ ID NO: 63319 - DNA, 1490 bp, Arabidopsis thaliana landsberg
atcgatgtctcttggtttttattttattggctttagtttcatgtccttttactagcaagcttgaacaaaacattggcattggttctctttctccatctcaaagaacattatggtttaatcttgatttgatttatacatgtttacccttagtcatgtgtgtttcataaatcatatctccattttggatttgatctatttcatagaaaactttgctctatagttctagagctctagagtttctctttctacttgtcaaaaatcataaaccttaacatgtagtagtgatatctctgtttttcttttcttcttacaaaccttaaacaacaaacttttttttatcatgattttttttcttatttttaaaccctcaaaagtgaatatattgatatatctatctctactcgtcagcaagctttcctcatgcttctctcgtcattcatttgctttttcataatgatgttgtcttattgtctacattgttttaaggaacggttagctacgatttgtttatacatttaagtaggctcagaattatgccaacaaaagatagtttcagagtttattgcaacaaaaaatagtttacaaaaagggtcccaaaacccatttaatcatttaaatgatttagggtactgttactaattatgatatgtgactgttgaaaacttctacaatgtttatagcattttttgtaatggaactcccaaaaaccctgagggctcttaaagatcactaggttattaaagcagagactcactaatattgtcattatcttaagctgacaaaaacgtagaaaaatccaaaaaaataaatggcggaggaaattgaccaaaacgcatatataaggattatggagtaaaagcaacttatggtagttggagagaaattaaccaatagaaatactcaaagggcgcgtttattgccataatctacgccccctccatatttacacacaaccatatcataatattaccaaatatgaaaattatatgtgcattatctttattacataaacaataaatacagtttattattaatataagaaaaaagataatttttgattttatttttagagtgatcttggccgtagaaaatgaggtgatgaaagtgatgtgtcaaaaaaatcaggaaatagccatatcaagcatgtaatccctaattacggtctaaaggaattaaagattacggtctacttaaattcaacatatctacatgaaccttatgaaaggcttaagggacgaaattaaaataaaatgataacacaagggtcaattttatctacagtcaccaaattaaaaatcagattaagatacattaaaaagtcattatctcacaaaataaatcttttctttgctctttcatttgtagctcctctctctctccggcgctaacgggatgtcctcaccataacgccgttaagtctggaaaaagtttgaacggaattatcaaaacgggaaggaatattccgtttgaatggctctgtaacaattagg

SEQ ID NO: 63320 - DNA, 1475 bp, Arabidopsis thaliana landsberg
ggcctccatattgtaacgcgagctaggcatgtcgttgatctcctcggaggtgctctctgcttacctctctactaatgtatgaatgagtacggacccatttaccgtgtcggtgctggtcctcgtaatctcgtaattgtgagcgacccagcgatagctaaacatgttttgaggaattatccaaagtacgctaaaggcttagtcgctgaagtctctgaatttctatttggttcgggttctcgtatcgctgaaggacctctttggacagtaatttcatctcctcctatctcaattttgaagtttttggaattgtggaagtaatgtgtgactgtcttgtatgataagtaactctaattttagggtttagattccaatcttctctattgggcttagctgaagtctgattttttacataggcgaggcgtagagcggtggttccatcgcttcacaggaggtatttgtctgtgattgtggagagagtattctgcaaatgtgcagagaggcttgttgagaagttgcagccttatgcagaagacggaagtgctgtgaatatggaagcgaagttctctcagatgacacttgatgtcattgggttgtctctttttaactacaatttcgattctttgactactgatagtcctgtcattgaagctgtttacactgctcttaaagaagctgagcttcgttctactgatcttctgccatattggggggggggtttcctgtgttttttctgtggtttgttgattgtgtggaacaattggattcttgttaattgagagggtttggttgtttttttcagatcgatgcattgtgtaagatagtcccgagacaggtgaaagctgaaaaggctgtaactttgataagggaaactgttgaagaccttattgctaagtgtaaagaaattgtcgaaagagaaggcgaaagaatcaatgatgaggagtatgtaaatgatgctgacccaagtatcctgcgtttcttgcttgcaagcagagaagaggtttaaacttttttccttaagtttataagcaaatttggcctttcattatcgcataatcgaagctgatgttgcattgtgagggttttcaggtatcaagtgtgcagttacgggatgatcttctctcaatgctcgtagcgggtcatgaaaccactggatctgtcctcacttggacactttatctcctaagtaaggtaccttaatgtatcttctactttgctatgctagagaatttacttggatgggagcttctctgttctcatttacctcttcaaattctctatgttcatagaactcatctgcattaaggaaagcacaagaagaagtagacagagtgttagaaggaagaaacccggctttcgaggatataaaggagttgaagtacattactcgttgtataaacgagtcaatgcgtctctatcctcatcctcctgtaagcaatcaagctcatctctctaattattcatgaactaaattttgt

SEQ ID NO: 63321 - DNA, 1736 bp, Arabidopsis thaliana landsberg
ccacgatcttttgaggggcagtgttaacataaacagaatttgctcacaaatccagccgagtacagagacttggaggggaggagttttaaccacgaaatgtgttaccattagaatcaacgagaagaaggcaacgttcattgctatgaacaacttcatagccgatatctgccaaaaacgcatattattcatttaatattcgtatttaattacatagcggaattaaggaggaggagaggggaataattttacccttttctccctggtggcgtaagcgaagaacatggctatgtagagagtctccacgacgcagccaaaggagttgatggtaattaggagaaaagcgtctttcttaatcaatgcgtagtagagccatagcatgcagctaaatagcgacacttggtacggtagcgactggaaactttccgtcgattttctcttgtatattctataaaaagttggcctgaatattttgaaaaacgaaatcatcagaatcattctcaaaactaacaaataaataaaatgaaataaaaaaagtaaattgaatctacttacactggagcgaggaatacaaggaaggatatcacgtttcctgtaattccatgtaaaaataaaaaaatgagtcaattgtataattaagaggcttctagttttgtggaaacataagtacatatgaatcagtacgggatctctaaccaacctcagcggggaagttaaattgtgcattaaccactatacacgtattgagtatgatataacatggacaacaatgcgtgacgatttcaatttaattaatagcttacgtattgatttattttttggtagtttgggatttaactaaagaattagaagatcatttatgatcccaaatgacttagtttagttaatgaagaaaaaacttgaaacttgttaggtgagtcatgatgaacactccagaatttcaattcatttcttactactctgttgtttaattaactctaagctagaactacaatggaaccctacacatagtatatattgttttgaaatcagaagcttagatgtaaagttgcaacattatagttgctgttgcaaattctttatgttaacaagtaaaaaacataagaataacagtaaagacaagagatgatgaacaaactaggatttggctttgtggatttatcattacctaagatgccgaagataaaagcgaggaaatggtgattgatcatgactcccattttctatagcgattgagaaaaaatttcctgttaggagatttctaaagggtctcagtttttttttttgaaaccctaaagctttctctctctttctcaatatgtctctctctagaagatgcttctttttatttcatggaggaaactgaggaggctcaggtggtttatatatagctccaaaataaccattgtagtcaaaatattttgattttaatgtttagagtttatttgaagcgtgtaacgtgttgagtttaataaaaaaatcaaaaaataagaatcgaaaaggaaaacgaactcagtctggttgcatgacaagtggagatattagtaggtagcgtttgcattttatcattcactcaatcttacttctttcctccactactctcatctcgtacgcgcgtcgtctattacgatttcattttcttcacgccttctttttaattagctttcataaatcacattcagtaccatagttttgtactttatagacgatagataaacatcatggtaactaaaagtcta

SEQ ID NO: 63322 - DNA, 521 bp, Arabidopsis thaliana landsberg
ctttgtcaaattgtcgtcagattttcattgcaaccgtgataactacaattgaaccaaacaatatcttccatataggcttctcatcaacagcaacaatggagtgtccaagataaagcaccaatcaaaagcaccaaaaacgagtcttcctcgccatttgttacttttacctgggaacgtccattagttttattaatggcttggtctaattgtggaagttcagcatatcaaagttcccaaagagggcttgaggcacaagaaacggttgctcctgcagagaagattctctagaggcagaggacaactgtgagcttagaagtacgagtcatatgacatttagaatttgcatattcctgcttttaaacctttcatgttttctttaggatatggtattaaactttttttcagtttaagactaaaattgtacctgtagaacaagagcgggttttcctttcaacgttaaagtgtagtgttctaagttctaacttctctttaacattgtttgtctggtgttagttgatttt

SEQ ID NO: 63323 - DNA, 493 bp, Arabidopsis thaliana landsberg
ccgacgttaagaaggaaccatacctgtctctctgccccaacggacgtctgcctgcgatcgaagacctttacactggtctgaccctttgggagtccggagccatcgtcaattacatcattgagcaatacgacaaggacaataagcttggctacaccgactttcagaagaagcatgatatccagcagtggctcttcttttaagtctcgggccaggctccttactacggacaggccttttggttcaccaaattccaccccgagagggtgcagagcgccatcgaccgctacgttggggagatccacagagtcaacggcgttttagagagagcactaggcgataatcagtggcttgttggtgacaagtgcacgcttgcggatctttcgttcgtggcttggcagcgctgggctcccaggttcggaggagaggacctttatgagaagtttcccaaggtcggggcttggatgaagcgcatggaagctcggccgtcggttca

SEQ ID NO: 63324 - DNA, 556 bp, Arabidopsis thaliana landsberg
aaaaagtgttaaaaatgtccaaaaaagtgtatacaaaaagcgttaaatgtttgacaatttcttccatgcgttaccattcagcgaaaaaacgttaatatactgtcaaactggcgttaaataatatatatagtatacccccccccattttcaaactttctgcacgacaaaaataggtaaaaaattccactttcttgcaactggggggtgccgtcgatcccgggggggggccaaaatccccctaataaaatgggcaagaattgccattttagtgatgctagggcttaccccccaatttcaggcctagtctttgggggttcaaaaagtccattttttgaccattttttcaaatatgaggtatcaaaaaagcgtataaaaagtgtcaaaaaaataccatgaatttcctagatgtaaaaaacccaaatatactgctaaaatggcgttaaataaaatacatagtataccccccttttttaacgaatttctaacaatttggggtctcaaaaaaggcgataaaaaagtgtcaaaaaaattcactagcttttccttgtttaaaaaa

SEQ ID NO: 63325 - DNA, 329 bp, Arabidopsis thaliana landsberg
ttgtcccacacgttaaaccaaggaaaatatttgtggtgctggtgcagctaaattccaaaaatgaatttatgggttcattttcagagttttgttttctaggaccgttgaataattttcttttgttctcggtgagtataataagaatcttgagtgaaacagataatagctctttgtagttatagatgtgtatctattagtcttgggcaataaggcaaaactaatacatactactaagttacatgaattgttcgagaaagtcttgtcttataaactcgtttagttttctttgagagtacttttttctttctttactttgagaggactatggg

SEQ ID NO: 63326 - DNA, 308 bp, Arabidopsis thaliana landsberg
  unsure (1)..(308): unsure at all n locations
gggcattccggggccaccatgggaataccgtgggattcgtggacacgacctgctataggctaagatccttgaaagagcgtgtccacgtggcagaacctgctcatggagtgtaaggcccccacagagggctgatcccgaggcggcatccatgcacgaataccgtcggttnnnnnnnnnnnnnnnnnnnnnnnnnnnnnnnnnnnnnnnnnnnnnnnnnnnnnnnnnnnnnnnnnnnnnnnnnnnnnnnnnnnnnnnnnnnnnnnaggagccctggtactgcaagctcactcatccatatacgaggtgcc

SEQ ID NO: 63327 - DNA, 482 bp, Arabidopsis thaliana landsberg
  unsure (1)..(482): unsure at all n locations
gagaagttctccacgacggtcgctcaggcgcttgagcgggcggggtttcacccggctcatctagtaggctgttagcaacggcagcgcgatggttgaatcaacataagcgaccacgcaatcgggcagcgtgtttggatnnnnnnnnnnnnnnnnnnctgcttccgctggggttgcgccgctcaggccgccggtgtcaggccgcnnnnnnnnnnnnnnnnnnnnnnnnnnntggcctttctcctggatccccatgacttcctgaatctggggctcggtttggagcatgaagtttttgggagatccgccaccaagaatccacacgctcgatttatgtttgcttgatttcgcttcgtacacgatcgccgcggtctggttcacgtcacggttcacgttcagcagcagtttggaatcgcgcatggacatggcggcaatgttcatgccgatggagctatcgcccgggctgctggtgaaaatgggaattt

SEQ ID NO: 63328 - DNA, 519 bp, Arabidopsis thaliana landsberg
  unsure (1)..(519): unsure at all n locations
aagaattatggaatacacaatccgtcaacaaatatataattcaaaaacattcattattttattatgaaactattatattgattattnccatttggggaaacgacatggagagattttgtaggtaaatcttatgcttcttttgatatttcgcctatacttttgattatatgtttttggttctacgcttactagttagatccatgtattattctttctctttattgcatttatttttatcattaaaactacaacattattgtttcatttcaatatcctaattttcaatcaaacaaatagtatcaattcccggatacatattaatttacttcatcttcatcttcaaatttatgaatttctttttctagttaactaaatttactttccctttctaataaatattatcattgctattgctattattaacaattagacaaatgtcaccgatcaaaatgaacttctgaatcttaattcccctatagttatctatttactccttcattctcatgttcaaaaatttga

SEQ ID NO: 63329 - DNA, 268 bp, Arabidopsis thaliana landsberg
cgtaacggacttggtatgttgcaccagcaatctttcatgtgctatatctaacagttttcagttttcggaacccgtgttcaggctctgcttatgactgctcccctctacgtatggggaactctttgcaccttcttcgtggcctgggactctgaccgtcgccgtgagcgtggcctccacatcatcattcccctgtcctgctcagtaggccggcttcgtcgttactgtcgctactggataatgctttcagttccgataccgccattgactt

SEQ ID NO: 63330 - DNA, 593 bp, Arabidopsis thaliana landsberg
ccaaatccttttatagccacaaagagaataacaaacatttgtaacttgcaaccttgattagagctggtcaactacatctttttttggtttgatttcggttagattcagtttatgtaaacaaatggatcttttttaacttttggtcatttagagaagtatataagttgaaactcaaagtataacatagttttcttcaatttcagttaggttgattgctatattggtgtcgaatattaaaaccagcttcaaatttttaacttattcatcaaattgattctataataaagactcagccgattcaagacattaacttgtttatccatgtaaccttcaaaggatagggcacaagtacaactcataaatgtacacaaccaaaaactgatcaataatctctacacaaaattacaaaacttccaacaaaaataaacccaataatttttattttcgcatattaattaatttagatgacagcagcttgagcttagagagggacccaatcattgaatcaagaaaaagagaaaaaaaaaagggcaaagagaagagaatagaagaaaaagtacgaccgtatatcgacagtgaggttaatgggtgat

SEQ ID NO: 63331 - DNA, 917 bp, Arabidopsis thaliana landsberg
ctactgataagatggtgagcgagaagctgtcatgacatatgcataagatcagattcgaaacttggtttttcgattttccgttcagcttttcacaattgctcccatgttcggacttctcctttagtagatgaacattttgtacctttcgctttattttcttgcttgtaaagtaaatgttttctctctttacttagtcttccttgatttgaaaagttatctacgtgtatcatttcttgtacatgtacatgcctctccaaaatgattccccatagatagatgatgtgcttgttaatatatatatcagtcactcttggaaaaaaaaaaaaaaactgtggctctatgtatgattgatcaaataaaatgggattatactaaaggaaaataagacacaaaaagaaagaaaaaaatgttgattgaaattgaaggagtaattttcaaagtcccaatgatacatgtctcaccattacaatagagaaacatttcattagtggcctccaaataaatttcttacacaatcttttttgttattaatgttaaaaaacaaaaaaaaaaaagagattaattatttgttttctttttatagtaactactagttaaattattttgtttcttaaagtaaactattcttaccctttttttgggactttgtgtctacaaaaagtagtgtaaaaaaaaagaaacaaaaatcataagtaattggaatataaatttgattacaaaagaccatatacataaaaacaactaaacaagtataacaaatccataaatacgaattaaaaatcaaagagttaattatagaaaactttccgatctctgaagcttcaacaccgtttgttcttccttgttctccgccgcattgtctctttccatgagagatcaatttcttcacaaagaagcttcttcttcttctactacat

SEQ ID NO: 63332 - DNA, 508 bp, Arabidopsis thaliana landsberg
  unsure (1)..(508): unsure at all n locations
agatggtgcggataaaaggaaacagcaggaattcctctttcttcatatgggccgtcagctttttcgtgtcttaggtcgaaaaggtcttttattgccgcaagttccggatgcctgcttccgtgcacgttcacgatcttttccaggaatgcccggatcaccggtatctgcgctgctgcatacctgtgatgctttttctcaataaaatcagccagcaggtccaggggccaggacttgtagtcgtttactgcatcgtttttaccggcgggggtatccattaccatttgcagcttatagaccaggctgtcgggtatgatatgccgttcgctgcatgcggcctcaatagtannnnnnnnnnnnnnnnnnnngtcaatgcctgattgttcgaatagagcttgagtcctgtagccttctgctacnnnnnnnnnnnnnnnnnnntcttttgaaattgtcatggtggttcttttaagcgttgtcaacattggtttttccgttcccagtttttcgatcg

SEQ ID NO: 63333 - DNA, 1503 bp, Arabidopsis thaliana landsberg
attaactaatatgggcctgttgaccaatgtctccatatacaaatgtttttcgatatttctaacggtgtgtatgattgaatattaacggtgtgtgacataggtggggttgtctagttgtatattgtggttctttcacaggaactaggatgagtgattggtggttagcgagactcgatgtttgatcaaggagtacaattttatgggtccatctttgttaagctatcaccatcaatctttggtaatctacaaagtgaaagtaacctacccattgattttcaaaaacaaacatcagaattgtgagtcttggaagctccttaaaaaaacatgaattgtcgtactcgtgacattatttctgtatctcaatgccgagaagactactactatattgtctatttcaatcatacactatggcaaacaaaaatagttcagagaaagtaagcatctaaacggctgcaaagacagattcttaaatttagcataaaaattactcaagtaacacttttgaattatgaaatcgacagtctataaataaatatattataaccttacgttataaaccctacaagaccttttctttacattaaaaaggttttcaagaatcatgaatcaataaagataaaaagactttccgaaacttatacctcaacaactcatacacttgaaccggtcatgtcaacatccgacttttgtagctgactgttcctttttgatctacacaaacacacctattgactagtaaaccggtataagagaagactggatccggcttagttctggtactatgacagaagcatcacaagaagcatagacaagacaaagatcaccaaacgtttcactccttcatcgtggagacctgaaagataaaaagaaaatacacatttcagatttcgaaagaaactttaaagagttctttttgtgaaatctgtgagatgggaaaaacttacgaggttgcgaggaggcagcagctggaagagcaggaattctaacagctgcaaaagaacaatacagaaaaacgtatgcaagttaagaaaaaaagagaggcaaaaatgtcggaaatcaagatatacgataaccacgcacgttttttacaggtagaggctgaggatagagaagatgaaggccacggagcgggaatgttgtcattgaggtcacaagtaaagcttatccccgtgtctttatcaaatatcgcatccgacggtaagcttggtaatagacaaccagattctttaaaccaaaaagaacaaaatactcaagttaacaaaatggtttttgagttttcgttatgatgaatatagaaatgaaaatcgaggaaattaatttataccttggtttccaactgtttgaatccaaccacgatgcatcaacaagcacgaaaaacaaacaaaacgagttagagacatatcttgaagtttgagaagtgagagaagttgtagtataaagtatgaaccttgaagagagaagtccttgagacttatatgacaaacactgaagatgcccttagcg

SEQ ID NO: 63334 - DNA, 1481 bp, Arabidopsis thaliana landsberg
acaggcattgggttcttatatggtaagagtgatcttctacattccatgcctccattcttaggtaagcagtctatctaatatttctttatgaaaacagtttatcatatctgtttaatcaaggatgggactggactgagtcccacttctttttttccttgtatttcgatcctcttttaggtggcggagaaatgatctcagatgtatttcttgaccattcaacttatgcggaacctccatccaggtagggattctacatatattagttactaatctgcataattgctgcagtttagaaataaatatatttaagtttgtatcagatttgaagctggaacacctgcaataggagaagcaattgcccttggagcagcagttgattacttgtcaggaattggcatgccgaaaatccatgaatatgaggtttgattttattttcctacaactagacgtcaatgacgtacatacagtcacggagattctcacatgttttctaactgtagattttaatttcttgtgtcatccaggtagagattggtaagtatttgtacgagaaactgtcttccctgcctgatgtgcggatatacggtcccagaccttctgaaagtgttcacaggggtgctctttgttccttcaatgtggagggcttgcacccaactgatttggcaacctttcttgatcagcaggtttgttataattgggagctatctgtcccatcacatactggttttctcttatcttgaacgtattcttttaatatgaggtagtacctcaagtaggataagggcactacctaccacctctttctcttcttagtgggtaatgttaccacttagtggtcaaagcgaatctcagatgcctaccttaggatatcttgtggtagcagcctataattgaggttgatcttctttattccaagatttaggtgaaatctcatgtgtgaacactagcctggactctgttgataactaggttaaaacaaaacccctagatcatctaggttacatgatacctgtccaagtacttgatccgagtgattctcatacattagtaatgagttcagctgtaagaagttttaactgatctagattaaacaaattcatcttgatcgttctaatgttaaccgtccacctcaaacccctactttactctctcatcagaatatccatagtgggatgaaaactgaaaacgaatattgtatgttgcagcacggagttgcaataaggtcaggacaccactgcgcacagccactccaccggtatcttggagtgaatgcaagtgcacgcgccagcctctacttttacaacacaaaggatgacgttgacgccttcatcgttgcgctggcagacactgtgagctttttcaactctttcaaataagtggaacaccttcctgctggatctctcggctggtttgtatggtatattgcttcagaggctactttatttaaatctgctttatatgatcaatgggagtggattttg

SEQ ID NO: 63335 - DNA, 2638 bp, Arabidopsis thaliana landsberg
  unsure (1)..(2638): unsure at all n locations
aacgaaacggccacattaatcatttgcaaagtaattaacacaaaaaaacactggaaagtgataagaaaatatgaataaaaacagaaatgtaagaaaagaacaaaaaaatctgtaacacgttgacggtcttcttctggtctgcaaggaaacggtcacattaagcggatgggtttaagagctaagaagacctaagctttttagtcatcnnnnnnnnnnnnnnnnnnnnnnnnnnnnnnngtggatgtctctctatacgccacgtggacacgactcaccgtgacctcaccagtgaaccatagttaaacacatctttcgccatcattactttttttctcacttatttgtcgttttgtgctgactcagattttcctttcttttatttcatgatgacacgtgtaatgtccatttctcttccaatacggtgcgttttggtctcactacctgtgctggctgtgcattctgttttttttttttttaattaaaatttttatacgcctaccgaaaaattccttttgctgtattttataacaacgcaaattaaataatacggagtatttttaaacagtagactaggcgagatttttcagaagatttggtgcataatagtgtgtaggtgtgtctgataagccataattattttcaatataaccttttcgtttttggatcgattatgtaattaaggctgattattagtgattacacctttctggttgctggaaatataggaggcaggagaacgaaatgtcgtggagaatgtaccttcttcaaaagatgtgttgtcggtgattaccttttttcaccacagaagcatcaaccagaggctactactattaaaattgcatgatacgctaattagtgaaaggaagtaaaatttattttattctttggcgaggcccacttagggagctagtaagaccccactattttattctttggcgagcgaggcctacttgcccatcatattcaagtggatatggaatgagttgaaactctttttcagatgacaagagacgggcttaagtggtgaaacaactagttaggctaaaaggtgcatcataaggaacttttttaaacccctaaaaggtcacaattactctcttgacctttcctgatccacacaaaagtttagcacttcactagtgaaactgacccttacaaaaaaatatgtaactacaaaagggtcgtccgatttgagaccagaagccgcatcagtatattcctcctaaacacaagcaagaaagaaacagcacaagtgcaaattattcaccttttcttgtatattttgatttgtatgacatcaagcaaaaatatcataaagaaaccaggtgtttaccgagtcaaagttgggggactggatggcatgaaaccaaaattcttgagtctcactgtctttagaggctaaaagagaccttgtgtttttccttctaatctgcagttggtgatatttctgtctgaagcaaagaaagtaagtgatcatttggttcgtttagatgatagacatgtagataagagctaatacttacacgagagtgacaacatgattctgaaactaaggaagtttcagcttgaagttaatccgcagcgacttcatctcctccaattgccgctataagggtttaaggattcagttattcttaaggaattgaagcacacttttttctcatttttccaaacagttccaaacagaaactcatgttttcagtaaaatagtggcaataatcgtctagacaatctaattaccttagatacactttcagacgcctgctcgtgtctggcttggtgcaaacaccattccatggccatgtcaaattcaaggttgttaggctgagaagaatgtgatgtagccacggcatctctctggaaaaacatataaagaccaaagagcaagaagattagtaacgtaacaatgcatttttatttgtgtgcattatgcaagggaaagggaaatgaaaacaataccatctcccgtcgcgtttgagttttgtgtagtttgatatggcctgagaataatgacggcttccctggtggagtaatcttagcgaaagaagcaacaaggggcctgttgagcaaaaaaggcacagcagagatttctgagatgaaagtattccaaaaaaatggcactgtacagatctctgcaatttatcataggaagcttagagaaaaaagaagaatatgtcatttcaggttcacctcccacttgatagcaacaagcatccctcatctagtcttctaatcaccctttctgcaacttctcttgttttgaaaatgaccaaagcttcacctgtatatcaaacaatatgaggtgctcttcattccatttatagtatgtgagaatcataaattagaacccggtgagtaaaatggtagcttaccaatatgaggaatagtgactgatgtacgctctatcatcctcgcttcgcattgctggttcaaagcagaatagactatatcctgaaatacaattcataaatttcttaggttgcataaaaagagaaaagaagggaggtttccatgaagtaaatcaggaaacaactgcattacattaggttacattgagtaagcatatacaatatacattttaagagactcctaaatggtgttgaaaaaaaaagagactcctaaataaactgtaatacct

SEQ ID NO: 63336 - DNA, 545 bp, Arabidopsis thaliana landsberg
  unsure (1)..(545): unsure at all n locations
tggcctgcttccacgcctcatgggtgccgaacaggccgcagccagacagcaccaacgtcgaaacggccaaggcgatcaaaagttttttcatgggaaaggtgtgtccgtcaaaaaannnnnnnnnnnnnnnnnnnnnnnnnnnnnaacatggccgacaaggccgcacgcaggcggtcgagttcggccccattgtccagtgccaccaacggcgagcgcaaactgccgtcgccgaagcccagcaagctggttccggccttgaccggaatcgggttgggcgcacacgtcagggcatccagcaattcgtccagcgccgccagcggagcaaccgtcgcatcggcatcgcccgtgcgcgccgcgtccaccagttggcggaaatgccgcggcgccacgttggccaccaccgacaccgtgccagcggcaccggccagcatggcctgcgtggccgtgtagtcgtcaccggagagatagacgaaatcgggccgcgcaagttccgccagcgccttgatgcgttcaggcgtgccgactgcttccttgatgccgatgat

SEQ ID NO: 63337 - DNA, 1785 bp, Arabidopsis thaliana landsberg
attacgatcttcaactcagtggaacaatacctagttacatacaaaattggaagcaactcgagagactgtaaaaatctatttatacataactcttctctgttttgttagcactcagtgatgatattcttttcatactttgtagtgaaatgattgcatctggtctcactggtccaatcccatcggtcatctcagttctgagcaatcttgttaatctgtgagtagacaccactcttttgacgttcattttttcttcataaacttaatttgttttcatttatatcaatggagatgatacttttattataatgacctatttttttcaggagaatcagtgatatacgtggaccagtccaaccattcccttcgttgaagaacgtgacaggtttaactaaaatgtaagttagttctgtcatatgccttcgtgaagctgtttattctatctgattttatataatttttgttgatttaatctttgtagtatattgaagaactgtaacatttctggacaaattcctacttatctttcacatttgaaggagttggagacactgtaagcacgtcttcctgacattttcatctagtctcagcgaactagttatagattattagttgatataccactgaagaattatgaacttaaagcaagttaaaggaagagtaggtttgtacatgaaacacaacatgactgattaatttttttattgtgttggtgaatagggatttgagttttaacaagttggttgggggaattccgtcgtttgcacaagcagaaaatttacggtttatgtaagtgaaaagattctactgtcatgtatgttaaaagttctatcttactttgacttaaatttattatttgactgttttcttttgcagaattttggctggaaatatgctcgagggagatgctccagatgaattactaagagatggaatcacagtgtatgtatatttctggagtttgcaaattgccttcaacattgctttttcagaaaactaggaatccaagttttttttgttgcagtacatcttcattttgatgtcagtttacttgttgatgcagagatctttcatataacaatctcaagtggcagagtcctgaaagtcgtgcttgtcgcccaaatatgtgaggatatcgtcatgttttcttcttttacgtttttggtggacataattggcattttagctgacaatttatccgacttctcttgttttaggaatctgaatctaaacttgtttcagagcacttcgacaaaaaaatcgtatggtcttttcttttgattatctttagcatctagaggctgtgtttgtatcttatgtatacaagctagaaagtgtacttttcggaaaaataatattccacaattgatacggatatgcaattcccaattgatgtttttgtaggagcaaatttctgccgtgtatcaaagatttcaaatgtcctcgatgtaagtacacttatctacataacagtgatttatttgctagcaatcacataggactaataatgatagatcgtttcacaagagtctcgcatttgaaaattgaaaccaaccacgtgctaaattgccttctactttagtcccacgtcaatattgtcatttcctgtcttgttatcatcataacatagaaatgttgatgtgtaaagatcacttgattattctctctcaatttatgcaatttggtatatctggcagattctagctgcttgcatgtgaactgcggtggaagcgatatgtatgttaagggagaaaaaacacaagaattatatgaaggagatggaaatgt

SEQ ID NO: 63338 - DNA, 1281 bp, Arabidopsis thaliana landsberg
ggagcgtgattaagaaatgtaaatatgacattgtatcaaacttttgttttaagtgactcaactgtagtatttgtctacatgtcaataataattcactatatagttttataatttatttccattgaagttaagttttaattgatgaacctaaaaaaacagttaatgagagagaagaaaggtggaaaaagaattgatcaaccactcaagaagtcatatttcatgtgcatgtacataactttgagtagataacaaactaacacccattattaaatgttaatcactgttaaatcaattggaatctgttgagaatataggaaaagcaaaagaaaaatatttgatgatatgcatcagatcgtttaaaactcgtaaacaacattatttcactaattaataatcatcatcattcagtcactacttatttttaaataatataaatacaacggggaaaactccgagagaaagcagaaaaaaaaaagaaaacaaacatcagaggaagaagaagactagaatcgtcttcattagtctcgttttcgttcacacgtctgaatcgtcaatagaactttgatagatccatttcaactagacttctctttactcacttctgaatctcccccaaaaaaaagaaagaatctagctctgaatttctcgattcagtttccagaccaagcttcgcatcagacagaacaaagtgtttcggatttggtgtttgctccggagaaagcgaagagagttgagaattttttgtataatttctgagattatatacatgtgatgtcgggatattcgccttctgctggcctccgaggatttgcaggtaaagtttccgattctcggatttcatagagctaagttttggttctgcttcgtattcttagggttaaggttttattcatttggatgttagcttcggatctgatatatatttgatctctggtagcttaattttactaatctactgatttagagttgttgaatctaagacttcaaattttgtcgcactagagttatgttttggatctacagaagttgggttttgtatatttacagtgttttagaagacataaagaggataatgaagaagaacaacaaatacaataagaaatcaacatctttgcattgcaatgatgcaggaggttgcagatattcattgcttactattgtttggaccgtcgtcgggtttttcctgggggctcatcttatctctctgtatagcagaaaagataacaacatccatcaacaagtttcttcagatcagttacaagtagtacatcatcttgctca

SEQ ID NO: 63339 - DNA, 1290 bp, Arabidopsis thaliana landsberg
  unsure (1)..(1290): unsure at all n locations
tttgtgatttaatgatatattaactaaatttatacagtaaattgagctatttggttttgtaaaactcataaataaaaatgacatatattaactatactcataagtactaaattgtgatgataatattttaaaactcaaatatcaaatcaataaatgtctaatatcaatttcattgataattcatttttgaattttatttctatattaatctatttaaaaagatatgtttaccgctagcctccaaccactagttagaggttaaccactgtagttctaatttcagttcatctcaatttttgttttggttaaaaagtttaaaccgatcatctctacactaaattcagattttagtttatgtgaacaaataattccgaagcgacgtgttaactaatatcatgaaggggaattagacagaagcttaacgatgagaatataggctaaaatttatgtcgtccaaggagtaattgagtgttgcctacttcacgggacaaataagtaaacctaacaataacatatagacacactcgacgccattagccaaattccatttgagccatccaatttcttagtggatcttctttgtctccagcccatcttgtctccttatttttctaatgattactttataaaaagtgttttatcaaacatcacaaaatataaaaagaatttccaaatacttttgatatttaactattgcttttttgattattagccggggtaccaagatattagtttttaatttagtaatatacccatatgtttaatattgatatcgatattgatttattcatattatgaaaatggattagttagagaatgtgaaagaaaggtaaagtaaaatattgaaaagcaaagattaggggacagaagagaaaaggtatgtctctgccatgcccatccccaaaagtagagtgccacatgtagaccttcttcttaagatctaactcagatgctatttgtacaagtaaaaaatgtggcagactcagtttctattcctccatattttactttaatcttcatgaatcataaaaaatgaaaaatcaagcacatgaatgtcactgaaattattcaacaatattcttattcatcagctattttaattatttgactatttatgtgtatgctgttatctacaatatgtccgcgtcaatcagtcgaacaaaaaatactagattctagtgatgtagcataaaatataaaaatgttgaaaaacactctaaccattaattngcattattttaaactttccatatgatgagatgtattattcaatataataataaaaagaat

SEQ ID NO: 63340 - DNA, 528 bp, Arabidopsis thaliana landsberg
  unsure (1)..(528): unsure at all n locations
aagnnnnnnnnnnnnnnnnnnnnnnnnnnnnnnnnnnnnnnnnnnnnntagggttgtgtgcagtttgaccgaaatggtgcggtcgaattgaccattcaataaagacaccccaagaatgtttgttatgtatgagccgctcactgttagttctgggatttttagggagctagtttaatagataatggagttctgcttacggaaattgtataacccaaatggagcattataaacgactttcttgttctcaagctgcaccgtctccgaaggtagttggcgtgcctcatcaagcgtattaacaccagctgcagtcaagaaagtcttgaataactcccctttcagcaatttagattgtacggggttgtgaacagaagcactttgcagaacagcttgttgaaaaggtaatttgccaggtccttgggctcctccatttgcagtgatatggtgctttatacttccagctccggcagattcgccctttacagtcacttttctgtagccaccaccaaacagattaatattcttttgaac

SEQ ID NO: 63341 - DNA, 346 bp, Arabidopsis thaliana landsberg
aataaggttcggggatataatggctagtccttcaagattctgatttttttaaataaatagagagtagatatgaccagtgtcaatcacatggttcaatctagccgatagccatcagtgccagcgtgaaaataaataatcgataggaaacatactacctgtcaggaaataaaaagactatggatggatgaagcctatgtatggtaaacacgtgtgaagagaacgttttatgagcccacagatggaactgggtgggcgggtttgatggacttaagcgtggatgaccgtcatgggggcccatttgacttcttatgccgcgtgggctgaaaatataaactgcaaaaacttt

SEQ ID NO: 63342 - DNA, 1465 bp, Arabidopsis thaliana landsberg
ttttctagtacccatctcgatatctctttgtcccttgttgcaaaaatttcgaatctttcatatgtctcatgttgagtaaaagctgcatacaaagtgttcgtaaaaatgccgcaacgaaagttacttgacattccagatcagattattatttttacatatagtatgcctatagaattatttcttgaaaatttgggcatgtcaataaattcttgttgcatagcgcattagcagattctaagtatagcacagtaagtaagttgcaatttggtttgcatatcgatttagttttagtatggtcagcttcttattaggattatcaaggaacttaggacttgcggtctatgtggtgaagcttctgtgatgatctctgaagtgtttttgttgaggacattatgagagagagaggtatagtctccaccatgtccaggataggtgtgttcttgtaatagggcttctggtaaaagaaaaagagagacttttccacatgagcttaaatctgtcgcattttactttctgtgattgaactttatatgcaaaactgtccattaaaagttaatttctgcttgatgcttgtgttggagtatggcttatggttccagtttggctaaactgtgtttttctttatctttggcatagaaagaagatccctgtttctggttatgatgtctcgacagagtcagttatttacattgcttaggagaaggtttcattcaccgtctaatgatgcgccaacggagaccttaagaaagaagatagccgatttgcaaaagagtaagaagcgaaggaacccaataaagaaccagtttctagttgaggttccagaatcaagatcatatttagacacagcaacgatgcctatgttcctcgctgttgtaggtatcgcattgtttgcaaaggtgctaatgatggtaagccttcctttgtcatctctttgaatgcgtctttcttgtcagtgactttagcagctgttaagtagaagttgtttcgtaattgagctgttagattgctttatacttttttgtgcaattgaattaggaaggatctgtggaaattgctgattctcagtattggtttgttgttagatcgatgattcgaaatcgcaagaaatgattgaacgcaagataaagaatgcaccacaggggcaaggcacggtacgaatgatcgagcgtgaggagtgggatgagtttagagaagtaaggccaagaacaccttttgagtcaaagcttgctcgcccaaatgcacaaataagaactggagaacctgtgcgcaaggtaaaccgctctattaaatcaccaatccttgcagtatcttaccaaatcatatcgtcactcgatgaccaaaccttttgcttgtttcctttttaatcaggatgacttgaaaaactggacaatagacgtgctgacaaatgctcttgaacgaaccgaataagtgttcgccgtggttccagttagattttcttcctcat

SEQ ID NO: 63343 - DNA, 1839 bp, Arabidopsis thaliana landsberg
  unsure (1)..(1839): unsure at all n locations
agagtagagannnnnnnnnnnnnnnnnnnnaaaggttgaatgttcgagagaaacgtctcagagactgtgaaaacaaaaaatcaaaatcctcagttacagacgatttggtcccctctcttctctctctgcgtccgtcttgtgcgtcgatttgtctccatctccctctatctccgcctactttctcagaattactccaattcgccgacttcttctcctctgttctctgcatttggattgatgccacttaaatactttgaggatctcactctctctttctctcttcgctgacttcgattgcttcagtaccctttttctcaggtcagctacgatgatagctttattcagacaagaagatcaaagttttgatctttttgttttggttttcttaagagatggttaattaggtcttgagtgcgctgttttgaatcgttcttcagtgtgattaaacaattggttttgatttgactaatcatgttgccattaaactaagtgaaaatctctgctttttttatattgcatattgatgattgagacattgatttcttttctatttctttatttcccagtttctaatttgggaactgaaatgttttctaatttaagcattacaaagtgtacaatttttgtttctggcaagtttttcttggcctaattcgtctattttatgaattcacctctttaggatcaagacttcgtaaaagattgtttctgtaaaacgcaacaccatgcctctgtttgagcttttcaggctcaccaaagctaagcttgaatctgctcaagacaggaacccttctccgtgagtctcattcacttgtctctctttaagtctgccatgtttcaagttcatcaaattcatgtgttcttttgttgtgtgtgaaaaaaaaaacagacctgtagatgaagttgtggagctggtgtgggaaaatggtcagatatcaactcaaagtcagtcaagtagatcgaggaacattcctccaccacaagcaaactcttctagagctagagagattggaaatggttcaaagacgactatggtggacgagatccctatgtcagtgccatcactaatgacgggtttgagtcaagacgatgactttgttccatggttgaatcatcatccctcccttgatggatattgctctgatttcttgcgtgatgtgtcgtctcctgttactgtcaacgagcaagacagcgacatggcggtaaatcaaactgctttcccgttgtttcagagaagaaacgatggcaatgaatcagctcctgctgcttcttcgtcgcagtataacggcttccaatcgcattctctgtatggaagtgatagagctagagatcttcctagccaacataccaatccggatcggtttactcagacgaaggagccactaatcactagtaacaagcctagtttggtcaacttttcacatttcttacgccctgcatctttggccaagactactaataataaccttcatgacattaaagaaaagagtcctcaaagcccgccaaatgtgtttcagaccagaattcttggagctaaagactctgaagataaggttcttaacgagtctgttgcttctgctacgcctaaagataaccaaaaggcttgcctaatatcagaggactcatgtagaaaagaccaagagagtgaaaaggcagttgtgtgttctttctgttggctcgggtaatagtctcgatggcccatccgaaagtccttcactttctttaaagagaaagcattcgaatattcaagacattgactgtcatagataaagaaagttaaactcatgtcattttatgcacattacaatctcgtttctttgttgttttcttcagttttct

SEQ ID NO: 63344 - DNA, 513 bp, Arabidopsis thaliana landsberg
ttgcaatagcttccgctatcacttccaccccaattattttttttgcttttccgcttacaaatataccaatgttgccggtgccgcagtaaagatcgtatacggtttcgtcccccgtaagctctgcaaaatcccgtgtaacctggtatagtttctctccctggcggctgttggtttgaaagaatgacttggggccaattttatacctgaaatgttccagttgttcaattatataacctttgccgtaataggcaacaggctccaggtcgtatatggtatcgttcttttttgggttgatagtatacagtaaagtagtaatggcaggtactttctccaagaggtgatcaaacagctttttcctttccttcgcattgtcctgcccaaagcaaatgttcaccataatttcaccggtggtacatacgcgaatgatgagatttcttaaccagccggtatggttcttaatatcgtaaaatgcatatccctgttcctgcgcaaattgcctgatggtgttttaat

SEQ ID NO: 63345 - DNA, 473 bp, Arabidopsis thaliana landsberg
tttagtgctctcaagctatcataacggtcttgttgagatgttcgtagagaggatagattcaacacctccctgagctatggggtgataagtttctcgagctttctgcaaacacctgttttgccagctgcttctcttctgttccaccagattgtgcaagagcagtgaagagtggacgcaggtacttcatccttcctacctcttttagtgttttcttcacttccccatggtactctctgcacttggatgtgactgcaagttgcagaaacgagaccttcacttcatagtctttcgattctgccagtctgtaccgcttgtccaaggccatgacctgattcatcaatgagcaaagtgtggtgttagccataggtttgaacctgatcaccaatccttcctttgttgatcagcattgtcattaacaaacaagataagatcctaactcttgcaaagccgatacactttccacaatcatgaac

SEQ ID NO: 63346 - DNA, 533 bp, Arabidopsis thaliana landsberg
  unsure (1)..(533): unsure at all n locations
gctcactcgcagaacacacgacacgggcaaacagcctcatcaatacgcaactgccgcgcgtantagcgtttatttcagccgcgtaatcagcggccttgaagatggccgagccggccacgaaggtgtcggcgccggccacggcgatggcgccgatgttgtccgccttgacgccgccatcgacttccaggcgcacgtcgcgcccgctcgcgtcgatcagctggcgcgcgcggcgcagcttgtccagcgtggacgggatgaagctttgcccgccgaagcctggattgaccgacatcagcagcaccagatcgaggttgtccagctcgtaatcgagccagtccagtggcgtggccggattgaataccagccccggcaggcagccgtgcgaacggatcaactggatggtgcgatcgacatgcttgaccgctttgggatgaaagctgatgcgcgtggcgccggcctcggcaaacgccggcacgatggcgtcgaccggctcgatcattaggtgcacgtcgatcggcgcggtgatgccgtac

SEQ ID NO: 63347 - DNA, 565 bp, Arabidopsis thaliana landsberg
gatgtttgatatgtagatcatgatttgaatggatgttttctctttttatgcctttgacttggctgctccaaatccttatgtacagagtgtggcgtgaaagatacgattctggaaggagtttctagactttctgcaagtagttctttgtaatcacttttggagacccctgtgagatgtaaaaatttcaaagctatctagatgcaactgaaagcaagaggtgtgtaaccaagcaaaatcttcgtgatttaatatacatcatagcgagatccataggttcatgtgttggatgccttggcgcctgaccgcccctgggcggggaacttgtcagggccacaccgccccagcgtttccgtgttcttctgccggcaggacgagctctggctctggcattctggttctggctcgggctctcgcttcacgctcttctctttccagcttccagcctttgggaccccccattcaatatctcctcccacctctacctccccatcatttctctcttttctaccacgctactcacctcaactatcacacccattcctcgtcaacatcgtcccggttaacg

SEQ ID NO: 63348 - DNA, 396 bp, Arabidopsis thaliana landsberg
  unsure (1)..(396): unsure at all n locations
nnnnnnnnnnnnnnnnnnnnnnnnnnnnnnnnnnnnnnnnnnnnnnnnnnnnnnnnnnnnnnnnnnnnnnnnnnnnnnnnnnnnnnnnnnnnnnnnnnnnnnnnnnnnnnnnnnnnnnnnnnnnnnnnnnnnnnnnnnnnnnnnnnnnnnnnnnnnnnnnnnnnnnnnnnnnnnnnnnnnnnnnnnnnnnnnnnnnnnnnnnnnnnnnnnnnnnnnnnnnnnnnnnnnnnnnnnnnnnnnnnnnnnnnnnnnnnnnnnnnnnnnnnnnnnnnnnnnnnatccaaacacagagccgtgtatgcctgctcatcgcattcatcttgatatgctctatatcattagacccaaaagtgctctttgaatgcccttcaattgatctctgccacgcatcaaaac

SEQ ID NO: 63349 - DNA, 541 bp, Arabidopsis thaliana landsberg
ctgagccctctgacaccaccgcaccagaggagagccttttatctatattggctgggcgtggataaagttggggagggcatctacgtccctgattatgtcctcagcgaccataatctcgttcagaagccgatcaagctcgtttggctgtccttgctgcgacctagacgcttcgctcagcgcctgggcaggtccgagggcgggcgccatcttgtattcttcctcccagattgtacgtgcgtccctaatggcagtctccgcccattcttccttccagtgcatattaaggtatcgcgctcgcttcgacggatcgaggaggagggcagttgcatagataggtgactccccagataaagcatagtacttatcaagtacaaaccagcccatatcaatagagtgcagcatgagaggatcatgtgtctcctctgcttcatagagttcctaaagagatgatcagtaactagtttggttttagattatggccgaaaagatgaagaatgataccctttcttttccttgggcttttcaaattaaaggtgggggg

SEQ ID NO: 63350 - DNA, 294 bp, Arabidopsis thaliana landsberg
ccattcacaaactgtaatcacgaaattgcaactgagaacctttcaaacacaactttttatgcatacgactgcgtatggcatatttgatgggaccggagagggatcgcgtacctccgacgttcttaaacagctcctacagatgccactccgatccgccgaacggcggtgaaatgtctcagctcgagtaccacaactgcatgaaaccgcctccagttgtctaaaagctacactacttagaccctctggctccttcgctctctatacatctaactgcaacttacgcggtgagatatg

SEQ ID NO: 63351 - DNA, 1197 bp, Arabidopsis thaliana landsberg
ggttcttgcactgtcccctctctctttcttaatccattttatagtcatcgattctgtcattgcagatactcattctgatatatgtatgttcaattttcttatcaggctatgcaaatggtatcattcaagcttcatcgctccgtacttatcacacaccccttaacaagcagggtactttgccatctcataatatataaagcaacattgccatgtttggtatctctctttattatcgtgttactttatactgcagtttgttttcaggttgactttgttaattcaatgagagctgctcaagaatttagtgcaaaagtttcccgttccttaaaggtaaaaagaatatacaaacttgtcttgataattcatcctaagcatggtctcttctaaagtttggtcttagtgaacttaatgtctaacttgtagtttactctatttcagatggagatatatccttattcagtgttttatatgttctttgagcaatatcttgacatatggaaaactgcattaatcaacctctccatagccatcggttcgttaatcttctaatctctgatcttagcttgagtttctagttggtaggtattgtgactaaacaaatgaactgactttgaaagttccatcattttacagctgccgtgtttgtcgtgtgtttaatcatcacatgcaggtataacttattctcactgaaatttactccaacctctgtgttagatatggttaagtctgattgtacatatctttctttttctttctctctgctttctgactcagcttttggagctcggcaattattttgctggtgatcgcgatgatcattattgatctcctggtaattcactctcattgctactcatgaaaaaaccgataactgttttcgtacactcaagttactaatgttgtaccctatgaacacttgacttgaaaaatgctagggagttatggcagtctttcatatccagctaaacgcactatcggttgtaaatctaatcatgtccgtgggcatagcggttgagttttgcgtacacataacacacgctttctcggttagtcccctctctgtctgtactagcattatacacaagcaatttgctattgtcactctgactgtacgaaatgctcagataagcactggggacagaaaccatcggatgaaagaggcgttgggtgggatgggagcttcagttttcaagtatt

SEQ ID NO: 63352 - DNA, 2063 bp, Arabidopsis thaliana landsberg
aaactgatctgtttgattaatggtgtggcaactgcattaaaggaaactaattggcttttacgcaaaatgccagaaaaaatagctgacaatggaagcaaggatttggagttgaagtaaaaatctaagacggatatatgtcactcattcaaatgttcacttcaaagacaagaaggaagtgttgtaccgtaagtggtattatcctggctataacttgaagatggagacgaatagacagacaagaggactgatttgttgagaccagctttcaatatgctaaatccaattggagggcttggtgtatggcgtacaattgctgaaaaggaaaatagcacctcaaaaccatgattatggatagcacagaagcaagctagcaaggctatctccaagaagtcccaagagctttcagacctaaggagacctgcaaagattcatacagagagttgtcagtgagaactcttccctaatccttttttcccgcaaatccaagatcaccttgcagctaactttcaaagggaaatccgtgaatttatcctataacttgaaaaatacagaaagagaggcgtacctaactgaaatagaacttctctgctcacagagccttcctgctttaaggagttcgacaccaggtcaatctcaagaatgtagagaagtgcaaaatgaacttcacatagtagaatcaaggacttgcgtatctttctgttgatgttgtggctcaacagatacataaggaagaatatcactgaaagaagtccattaagatacagtatcatgaacaatgtttttcacaaacacccagatacatgaatccttgttataaaagcaaatgggagggggataatcataccatatacggcatggaaaaacccaggtttcatagcaatgagaaaaatcagtgcaagcataatagcccgtgagcatttccgcaatccccaagcaatggtcgcgacgaccaacacctttgtttcttcatcagctgttattgatggtaatttcagtcgttaagaaaaaattgaataaatagcagaagattgaaatcgcaacctaaaactaagcccggaataaactaagcttgccaatataatagtaattttaagattttctccttcaaaatcacacagtacataacattttccatgatattctatatcaaaaatttctttaaaatatattttggatagcgtgataactctttaattgtctttagatggtttcagtcagaaaagatgataggttgatcgcgataaacaagtacacccattttctcaactttacagttccgacaaccctggaagttggaaaacatcagataacttgctttgcagaaccgaatatgaggcgattaccttcaacgtaagatctctcattggaagatctggagctctcttcagacaggtacagaaaaacagaattgtttacaagattacccaacgcgaccaacatccccaaaccaaactgtgcaagcaaaaagaatccaggtatagtataatgccaaagtcccaccatctcccaaatttgcatgtcctgtatatttaagacactagttgttaatttacatcttagttttcttaaagtagttgaagattttgcgcatcgagaatatattacctttccaaccttagtgttcagaaaagaaaaggccacattgaatatatacgtactgacagcccataagagtataaatacgagaagaaggccatttaatctgtgcaactggaacaatgacgggaaggcataaataatgtaaccaacatatgcaaggaggccaaaagcacacaagctcgcaaagtgaaaactccagaacgaaagagcaaatagagagacctggcaatcatgaacgcaaataaaaagagtgtgagtttctgacacattatgttgctttagctgacacatacactttaataccagggatacgaatatatgcgggaaggccatatgtgaagaaattaatactaaagtcttaaacacagctcccctcagtaaaacattggcctgcctaccccggccctgaaaatttggaaaaattaaaaaattaagttgagtgtaactattatccatctcaatgc

SEQ ID NO: 63353 - DNA, 1042 bp, Arabidopsis thaliana landsberg
cgcgtagagataatgagagtttcgccggcggcaatactctcagtctctttgactattccactacctagtacttcaactaaagctcgtttctccggcgacccttttcgattcaaactatatgttttgaatagtcagattttttcgcgaccaagacatctcctctcagagaaacccaccagaagatggaccttctcctgcaaatgccgtaacagaggaagaaatggttacgcgaaattcgatgacgaaggagaagatttcattgttgttaacttctatcggtttgtatcaatcggagatcctgaggctgagattgagaagcacctctcattcttaaaggtccgtcttttacagaatgtgaattgtcaagttgtttgaaaaaccaaaattcatatacatgtagattctgaaatgttctctttggtttaaaatttgaatctttttcaatggtttttcgtattccaggatttgaatatacgaggtcgaatttatctcaatgaacaaggaatcaacgcgcaggttctgttaacatatttagctttggattaatctttcatcaaactatttgaggatgcctgcaaatcaagctaggacaaatcttgtgtgtttacatcttgtaatccttgttttctgcagtacagtggaccatctaaagatgctcttgcatatgttgaatggttgaaaggagatgatagattctcggatctgcttgtccagatgtctcctgctatgaataggcatgcattccctaagttgaagctacagaacaaaccctccttagtgcaggcaagctacatcccacaacaccactttacttatagtgcaatgccttgaaatatggtgtgaaatatggtgtaagattacttaccattagttgcgtttcttttttcctatagtatgagggaggaatttcacaccttcccctacttgatccacccatgcgagcaaaacccttagagccatctgaatggaaaaggaaactgaaagacttaaaagatgatgatgaagcctcaccttcaaatagtggcaaaagttcaggattttt

SEQ ID NO: 63354 - DNA, 1784 bp, Arabidopsis thaliana landsberg
ctcgaaacccttttctctctattgccttcagccagcgcacttccttcttactcaatgaagtttctcttcttcatgtattctgtgatttcgttcaaccaccacgtccttagtcatatgattctctattctttaatttagctacctcttccccaccttcccttgacgaaaattcttgcataattcataattagaagaatttcctcccaaggtactcgtgctaacccttttgattacatactttcttttgatcacatacttatttatttgatccatttgaatgttctacatccatcatgatttttttttgttttacggtatgcaatctaaaatcatgtgttctccatccattcgctactgatttaataattatctaagtttttcaacaaaaataacacaatttataaacatagacaaccatgattagtttcggaagtcaaaataaaaagcatgttaatcaattgtcttttatctcgtatccccaattttacttctcaaagtactaaaatagtctaaaaacaatcatacgtacgtaataagaaaataatttacttcctgctgtgtttaaacaaaacttctatgagatgtaaaaaaagaaaaagagtctacgatgaatgatcaagcgtaattgctttgttacgtctaaaaggtgtttaacaaaactatagcgcagaaaataatcagtttaattaactaaacaaaaacatgttagtggattaagccaagaattagtccgatagaactataaaatctacaaaatatctcaaatctcaataatacgtatataatatctcaataatacctatataatatctcaactccaatcagaaagctaaataaaatatcagcataagttatattcgcttccaaaaaaagtctgcctcgttacctacctctcacactcaagtctctcacgttatttgagatatttaggagaagcaagacgacaacgagaagaaaaaagagtgggtatggtcaagaaaaagacaaattatgattttagtggaaaatagaaagtaaagagtgaagtgacgcgacacgtggtacgagactccacagcgagccacgtaaggggggacaaagaagagaaggtatggacaatggtttccgcggtcgagccacgctttcagaattctgattggcactgggttatcttgtggaacccatctgaaagatatttttggttgtcgtacggatttgtttatttcgggtttgttgaattagtttgtttcggttttatacactattttaggaaacttttttttttattctttatagtgaactggactgaatttttttggttgctagattcgagacgagccaatttatgtaatattttgtggctttctgttgctaaattgtaagatctgtaacttacatgagatacaataaaataatgtaatgcacgtcttgtggcatatttacaaacatcatccacgtgtaatgattctgtccacatattttgccttgaaagcaactacaatatgacttttaatatcttttccgttaaatatttgacttttaacttatgtgaagcaaataagtagaaaacgacttgtctttgtattgaattattttccactcctttctacaacaataaaataaaataaaatgaaggaaccattctaaaaaaggaactacaatattttcaaactatactacaaaaatggaaacgactatcgaatattagtaactccaaaacgacacgttaccatttccttccccgtcataattatgattcccttgaacacacggcagctgcaaaagcatgctttcaaccatattat

SEQ ID NO: 63355 - DNA, 1438 bp, Arabidopsis thaliana landsberg
caatgcacctactagaacatatcaacatcatctagacatgaagtgagaatctaccaggcaccttctggttattttttcctattagcttcagcactcgatcagtttctacttttttggagaagtttcctgcgaagtaatgatcagaatgtctaaggattaggcacacattccaatttctctaaactctaaagatctattactagcttcatctattaggagatgaagaaactatatagaaatcaaccataaaagaaacaaacatgataggaacataattaatctcacaagatcaggaggactatctctcaccctgccaaaggttatcttgagtaacatttttcttcagctcagacatcagtgtagttgtccatccgcaaaattcgaacagaagtaaagccttatcagatgattgaaggaaatctttcaaactctttggagacttcaaatgtttgagagggagttcttcaggcgtagatgtcagataaggatgaatagatgacaatatattcgaggctcggagtttccctagatagttgtaaggcacactattgtgatagtacaaaattgttatcccattgacagcagcaccaatggcttgtgctaacaccttttctgagtttctgtatacaaccattaacttcaacaagccaaactcttctcttctctgaaccatctgagtaatttcatacttaagagatctggactcaccacaccctatgaaatcagtaatgaaaccaatcagaaaacaaataaaatagtgatacatatctccataaaggtaaacctcagcaagtgagaaattcagcttaacaagcaaactgatctgaggaggagagtgagagtacatggagtggtgacaaagaggaggacgtgagggtggagacggatctgagaagagaagttttgctccgtgaggatttcccattcgccatggcagcttgagggaagaattatggatacgaagaccaagaatggaaggaggaggagcgtcggcgttttcatcggaaaacagctcgctctcactcgtcgcgtcgcgtcttcttccttgtttcgacgtcgcgatcccgattctctcctggttggttcggtttaacggatttaaattgtcgaagggtcagcattttaccggttcggtggacgatggtttggttgcttcccttatcacgtgtataataaaaagttgatagaagttcagaaaattactccaaaattattgaaattatctggtggtgagaagacaaacatttccgacactcatcaattcgagtatccatggaactaataacgatatggttcatcatcaatcccggttcagattcttgaccaacgagtttgactgttggttggtcttacgagattcctcagaattcgttgttactagattcactccaacttagctagattcacagagtctctagagtcacaagcagcaacgtgc

SEQ ID NO: 63356 - DNA, 220 bp, Arabidopsis thaliana landsberg
acaaaagtaaaaaagcaaacacacaaagcaagaaaaaaaacaaaccaaaaaagggaaacaaaaaaaatatcaagccccaacaaaaaagagccaacttggccttccacctaaacagggacaaaaaaaaaaagcaaaacaaacaaaaaagaaaaaggaaaaaagaaaaggaagaaaaaagaaaaagaaaagcaaacaacaaaccaaaagaaaaaaagacaaa

SEQ ID NO: 63357 - DNA, 664 bp, Arabidopsis thaliana landsberg
  unsure (1)..(664): unsure at all n locations
ctgttgctactcttcattccgttttttgccctcgtcgcctttcaatttggtgggactaggacgataaagtttcacggtccgcgcaatttgcccgactgatactgaaccagtggcttcctccaaacgtagaatcatgtcctctagctctccagggcatgttctgtgtattttcacctattcattgaatcgatcaagattaagtcaagtctcaggattgaacttcaaatacatttcattgatcagacagcaactattccaatgtaaccaccattccactacctaaacccaaatcttggagagattgtgacaataaagtttannnnnnnnnnnnnnnnnnnnnnnnnnnnnnnnnnnnnnnnnnnnnnnnnnnnnnnnnnnnnnnnnnnnnnnnnnctacaagttgagatttaagtttgtcacccaaactatgtgcgtaagaagcaagctttctcttctcctttgcagacaactccaaagccgagcttcttccgttttctctcatggacaccattgtaagatccgaccaatcttcttggccatcatcgttaatctcgttaaaagaggctactaaggacacgttgtcttcgtcttgttctgattcatcaacagaagaagaggattccgtacgaggagaagagagaagctgatattaggacgtggaaga

SEQ ID NO: 63358 - DNA, 483 bp, Arabidopsis thaliana landsberg
  unsure (1)..(483): unsure at all n locations
aagaaactccctaaccatacangtttatataacattgttcacaagaatttttttctctccaccttagactcgactccaggaatcaggaagcaagaagcgggaggctcaagcaccaaccagattatggctctctgaagcaatatcttcagaaaacaaaataaagtttttatttgattttcttattaccatattatatactattaaataagaaatccaaagctttttatttaccatcctttctttcttccggaggagggagagcatgatatgggtctttcacgtgtgacattgatgagatgatgaattcaaattatatctcataccaaaaaaaaacacaaccaagagaaagaggcgtaaccttctgatttccttcttttaagagatcaataaaagctttcacattttctaatctgcaattcttttcaagatttcgttggctcctccaacaatccatcagacggagcagtttggcctccaggcaac

SEQ ID NO: 63359 - DNA, 1653 bp, Arabidopsis thaliana landsberg
ggatgaaaattgtaaagaagataactcaacatcctctttatcttatgcactgatcttgaaggagaagggaaaaggggtggaacacaaactcgaggaagctagagctgctctcgaggcaaaggaagctaggatccaagaactcgaaaactcaaagattgaatctgaacttgaatgcatcttccacagaaagattgaaactgaaatcgaacatttgatgctcacaagatctctgagttcactacaagtactccaagaaactaagaagttacattctctgaaagaagatcctgtatcaaaccgtggaaacatcttaggaaaaacatgtaagctcggtttctatatcttgacacaattgatcttgctcgtctctatacttcggtttctcgtcctacaattctctcctgcttcacgattagtaataccaacttgaaaaattccttctccttgttgtgttaccgaacattttttttgtttctccagattgtaataaataaggtctctcaaggatactgtccccattgttatagttaaattacgatgtttaaatttcccatcaacaactaaagagacattattattttgtgaactagatttttgatatcgaatccgatcaccggttataatggtttgccgacggtttttgtgatttgactcaagagtgtaataaaaccttaacttaaatcttggtttttgattcaatctagattcggttaatcaaccggtccggtctggtttttaaaacaataggccattgttgtagggagtagtttaatcggggcagaggcttatgctatgggcttggactctcaggtttcgtcttaaacctaatcaaagtaatttaagccgaaaacggaagtaactaaaattggtgtcttgactaaaaataatataaaggacataaaattaaagtccccagataaaagtttgtatgatttagggcaaaatctcagaagataaaatcattcaaatttgtgtgaatttcgtttaatccttatccaatttgtcccaatttataatcttataagaaaaataaaaatctgaaatacggtggtctcaattgctcttacctttaccaagacggccataagaaaaaaaagatgtcgaccgatatttcaccaccctactctcaaactcacgtggagcccgttaatggttatccttctgacaacaagagatgcgacgattcctctgttcctgccaaatatgatgatcttgtccgtaactctgctctcttctgggaaaagctccgagctttcctcggattaaccagcaagactatgaagtcagtttctttcttacccttttctcatttttgtgagacctttccgtttggtttaagattgtggaagaaaaaacccaactttgtttgtttgtatctctcccgaagtttggttagggatttaaggcttgaggtgttgttatattgtttggtgagattgaaagcaatagaattagattttgttgctcagtgaaatgttgaaaattgtcaattagggtttagtggattccggattggtgaagtttctgtgtgtttcgtttaagcaggaagtgcgttatgtcatgtgtatcgtctgttgaattagattgatcgtattctttacctgtttatattgttcataaggaaatgaaatcaaactggatttagtatttact

SEQ ID NO: 63360 - DNA, 320 bp, Arabidopsis thaliana landsberg
aatccacggggccaatcgggaagggtcgaagcaccgaaaaaaggtgtaacggcaatagctcgaaccaacccctgttcacacaagggcacaacaagcggacatgaaacccactgcaaaggatgggagacgccggagcactgggcgcggctcagcaatgcgctaaacatggagccaccgcacaaaaaacactatttgaagacggcgatggtgcaaaaacataccgcgctcttaacccaacccaagccgaagaaacccattcaatggtcaccgctaaccgcttttggccacaaagcctaggggtcgcacctcccaacaaacga

SEQ ID NO: 63361 - DNA, 957 bp, Arabidopsis thaliana landsberg
gaagctaactagcactaacatacaattaatattcagtatcctggatgtggaagccgcatgtacaagccatagctttaatcaatatccaagtatgaaactttctcactatactccccaagttctgatgtaaaataaagtgatacttttactaattgcacttggaaatgagaaccaaaaggcatagtaacagtttgactcaaatttttgctgttggataagcattatttaaaacacttagcctctaagttagatacatgaagttagttccatcttagggactcatgttaactgtgaaagttaattccatcttagggactcatgttaactgtgatgttctacttccagttaatatgaaatacatgagcatgtaaaacagggaagaccttaatattttacctgtacaaatgagtcgtgcattttcaattcttccatcacgcttttcctcaaatcagaaattgccaatttatcatcatcgtcatcagcacaatctgcggccagttcatacctaaaatcgcagaagcacaatgtttataaagaaaaccagaaaaactatgaaagcctttaattgaaaagtttatacaaattttaaccatttcttcatatcttatcactgataagctaaacaaaaaaaatttctcacatccattgtaacaaaatcaaatcatttgatcaactgctaaagacgaaatgataacgtggcactaaatgagagcagcttcccagaccaccaaaacaaatctcattgtgaataagaatcatatcctatgtcaaggaatagttaggtagtaaaatcatttggcagacatgaacaaccaaactaaatatgaagcgagaaacagccttatagaatctttaaaatcattctaagggaacctagagtctatagaatcattaaaatcattccagtctctaacattatctatctacattcatcttcacttgaaataaaaggataaa

SEQ ID NO: 63362 - DNA, 547 bp, Arabidopsis thaliana landsberg
  unsure (1)..(547): unsure at all n locations
gtcggtggtgccgggcggcgccgagaccggtcaggcgctgacctccaaccccggtgtagacatcttcttcttcaccggtagctcggccgtcggcaaggagatcggcaagcgcgccgcggacctgctcaagccgtgcacgctggaactcggcggcaagtcggcgtccatcgtgctcgaggacgtcgacctggcatcggcgatccccatgctggtgttctccgggatcatgaacactgggcaggcctgtgtggcccagacccgcatcctggcgccgcgctcgcgctacgaggagatcgtcgaggcggtcaannnnnnnnnnnnnnnnnnnnnnnnnnnnnnnnnnnnnnnnncgggcgcccaggtcggtgcgctgatcagcgagaagcagcgcgagcgggtcgagggctacatcgccaagggcatcgaggaaggcgcccggctggtctgcggcggcggccggccccaaggtctggatgggggcttcttcgtcgagccgaccgtgttcgccgacgtggacaactccatgacgatcgcccaggaggagatc

SEQ ID NO: 63363 - DNA, 471 bp, Arabidopsis thaliana landsberg
  unsure (1)..(471): unsure at all n locations
ggaactaaccacgaaggcgaaacacccgagaggaacaaatttgcgccccgcgttccaacgcaaaggcgccaaaggcgaaccataacgggaaaaaagggngcgccgagcaccctacggatatgtcagaacagacccgaacactagccccacatcgactcccagagcaaaatagctcgacagaaaaaccaaagaaaatagaggaacagacggaagatagaagagaaagaaaaaaaaacgctaagcatctatcatccggccactaaccacccgagcgaccggtggcgggccacaaagaaagtgccgacccgaaagaggaggactcaacgcaaaaccgcccgccggaaccagaagtcaaaattttggcagaaagggaacccaaaaaaactccttccgaggaacgggctaaaccccggcactcctcaagaaccacagccaagggacccgagaccaccacttggaaccggaacccac

SEQ ID NO: 63364 - DNA, 1904 bp, Arabidopsis thaliana landsberg
  unsure (1)..(1904): unsure at all n locations
cccaaaagtattttttagctccaaaactatttgggccgagaatctggggctttatttcataaaaggcccataagacgtacacacaaatccagtttcggctccgtcttccacacacgcgtgcgtgaccgtctccgtcgacgaatcggagagagatggcggaaaatctattctcagggctgccacctccttcttcatctcagcagcaagagctaccaatttctccaataccagacgagtcaaagattgaaacttcctctccagctccgattctggttctcaagagtgccctaaagcgatccaaaccagaagaatctgcacccaatgtttcaggtatgcttaattctcgaacaatttatccgataatgggtctatgttatctaaattcaattccttttggtactgtgttttacaaagcagaaagctttattgaggtatctgttcttactaatctgatttaatgctccaatgacacagctcctcctgttctcaagagcgcactaaagcggtcaaaaccatcagaatctactccggaaccagtaccagaaccggaaggtacaagtttgagctacttgtacttctactcgttgctaattagaatacgaatggaactatgaacttgtatgaatctttgaaatttctgttgcagctcctaaaaagcgtctacagtttaagacatcaaccgatgcatcagaggaacaagtgatagaagcgatgcagaagataacatctcacatcaagaacccttccaaattctccaaagcctcaaagcttgctatacggctgatccaagctggtagtgtgaagccagaaacaagcagctattttattgcgatacttgaagctgccatgtcgtctaaaactccttgtacagatcgctcggttcgagcagactatcatgcattgttctcggcagctcaggatgtagccgaggtaaacaaatagaactcatggttaaagttattcttcagctttattattagcatgttgatgaatgttcatatgtttttgtttttatctagtgccttgataaaagccagaagaatctgttgactatatggacattcaaagcagttgtggctaatgacctcttcactgatgacagctttatggtatgaaccttcgtgtgacttataccaatattttggactttgtttggctttattacttaatttcagagtattgattgcctcgtcgctgtgttatgacctgtaatatggatattgttgtcttgaactatcatcctctgaggttttcatggtgtctcacttacattgttttttggtttagttttccaagactgctactcgtataaaggaggctatatctgatcttccggtttcaaccgaggaggatgatggggaagaagcagctgctcttgaagaagcggcggtgaaagacaatggagatggccagacaacgcaggacgtggctgaagctgcttcagctggagataatgaggctgtcgagtctgatccctttggactagatgcctggattcccagttctggaaagaaaaatggtaaaacaaagataaagagaacaaatgaagatccagatgccgaagagaataagaggtttctcaggtcaaaaagagaagctttgattacatgcttggagattgctgcacgccgttacaaagttccatggtaagaatgctgccatgattcccagtaattgatctaaatttatcccactgaacttgttatcatgtcaaaactgtgaaactgaggaatggttggattaattttcaggtgccaaacagttatagacatattggtgaaacatgcctttgagaacgtgtctaggttcacatcacagcagagacaagcagtggagaaactctgggcttctgttcgagaacaacatctccgtaggaagcagggcanatcagtcacaggaaaact

SEQ ID NO: 63365 - DNA, 1475 bp, Arabidopsis thaliana landsberg
  unsure (1)..(1475): unsure at all n locations
cctaacggaatcagctgctccttggctgcgatggtggttaatcactggaaatgatttgttttgtttgtagttgactaagtcataagagggcggtggatatgtgatctttcttattcatgataagttcgttgcaaactgcaaaacgatcgttcttgcaaagttcttctatcttgtcttcgcagtgtgtcatctcaaaagaactccgattcacttggcttctattattattctttattatctcaccatgatcatgagcgtcttcttccacaactttcactaattgtgatcttcctttcatcttcatcatcattttctccattgttctaccctttgctctttctctagctttcgctctctcctccttggacaacttctttaaaatgggcgttcgcggttctggcctctttctcttccctctcatcgatctcccatcgaccttgtttcctcttgtttctaatgtataagataatttatcttttgtaacattttgatagaaattaaagtactctatatataattgtaaatcagaaaggcaacggttaaggtcgtaccggtcgtgttagtattgctgcctctatcgtcgaccgtccacatggatgcaagttcacatagatcagaagatgtgtccatggatcctaacaccggtccttcattaattacgaaatttacaattttcagattaagacaaaaaaaaaattcatagaagttgaaaacttgaatagacttaaaactagaaaagaatggatacttacggatatgagactcatcgccgtgctgaagcagccgtggtgagaaagggttgtcgcgatctttatgatctcaggttttgcttgtgtaagcaaccattcaacggttttgctggctttgtcaaatccaagcatgtcttgtaagccaaacaactctttggcgacatctagcgagagtctcatcctacgatctcgtgtccctttggccgttttgatcttgctgtgcctgtccgttctgcttggtttcttggcttttttcatttttgggtcttgagaagttgagattctctgggaatcttctataaggtttatagtttccgagggctcagtgggttgttctacaatggtgttgttcaagggaaagtgaagtgatggatgatgattgtcgtttgggatggtttggttatcatcatggccattgatttctgggtggaaagaggtgaggagggctgtgtccggggcaaatttcaagtgagaaaaaggaaaaggttgttggaattgatgatgatggtcgagatgattgtttgatgtgttagaggtggagtgaattaagatgtctgttatggaagaagaatggctaaaagggagcaatggttgtgaggaataatggtcattataagggaataacatgtagtctgtcttgaggtggtagaagtactgaaaatgtngctggtcatgcctttctaaggggttttgaagtacaaatttaattaaatttaaaaacctatg

SEQ ID NO: 63366 - DNA, 1272 bp, Arabidopsis thaliana landsberg
  unsure (1)..(1272): unsure at all n locations
acattctacatatttttacgatggctgaaatgttaatgcaaagtacgaagacaagaataagaagaaaccataaaggtttaactaattgtggcagtgaaagagtcacaatcaaaatctttttatcttactaattggtgatataaatataattaacagaaatcttgttgggaaagaagatgttcattattaattattacagcaatcattatgatcgaaaatcgatatttcttctaacaattggtccaaccaaacaacatatcatttaattttttgttctcaaacaaattaatgatcgaattgtatttttaattatcaattattcggttttactgttacaaaatttaaagcctttttggataagagaaaacgtggaaataaataaaacacgaactaccatttctcaatcaaatcaaatactagagagacgttaaatactaattcgaattaagtaatgacacctacttatactattccctccaatttctctttctaaaagagtccctcgtaaagaccaaaccttttttatcactctctctctctatctcttcatcgaccagaccaaacgcttcttcactctctctctctctcttttctcttcaatgtcagattttgaatgccacaacaacaacgagccctaaaactagttgtgtgtgattgggggaaaaacgttgcaaatgactacaatacccttctgcttcctctttgtagctttcttcttctcttcctccaccgccgatcaacgtcaccactctcgtcacttacttcaccaaccctttttcccggtcgtaaccgccgctccaccaccgtatcaaccacccgtctcttcccaacctccatctccttccccacacacacatcaccaccacaagaaacacctaacgacgacgacgccaccacctcacgagaaacatcttttctcctccgtagcaaatcctccacctcctccgccgtctccgccgcatccaaacccttttttcccttcatcagacccaacttccaccgcctctcaccctcctccagcaccacctcctccggcctcactcccaacttttcccgccaacatctcttcccttctctttccgactcacaacaaacaatccaagcctcccagcaacggccacatcgctaggctcgtcaccataaccgcctccgtcatctccgccgctgctctcctctctctattcgccgtcttcatcatcttcatccgccgaactcgccaccgncgtcgctcctcccctgcagacgacaccaaatccacgagatcagacgctc

SEQ ID NO: 63367 - DNA, 373 bp, Arabidopsis thaliana landsberg
  unsure (1)..(373): unsure at all n locations
acctatctacccgaccctcgttgttgagcattcgccgtgatccagtccagaacgggtgcttgtcggaggtgacattgaccacgagcagtgggttctcttgaccatcggtccaggttaccatgcggttaccggtagcggtggaacgggtgaggaagcggtgtccggtgctggagtccttgaagacgacccggtgattgtcggggtgaattcccggtttcattgtacttcttttgccgtgggtgccgaatgcgtgggcagggtggtatttgaggggtcttcgcgccagttaccgaatgtatcccggtcagaaggcccatgacttgggccgacacaannnnnnnnnnnnnnnnnnnnnnnnnctgtatggcgcggt

SEQ ID NO: 63368 - DNA, 218 bp, Arabidopsis thaliana landsberg
  unsure (1)..(218): unsure at all n locations
cggcctgctttaaacgcgtanccagtcaacgcgctgccacaccctgtaaatggcctgacagtcaccaccgaatgcacaacagaaacggccaccgtgctgtaagagactttgtcaccactcgtatccttctctttttccttgacgtcaatctcgtccttccatacttttttccagcgtgtgcccttaccctgaactggcgggtgccaggctnctggcac

SEQ ID NO: 63369 - DNA, 321 bp, Arabidopsis thaliana landsberg
ctccactccatcgaaacactaagcttttctgctcttcataccgaattaacactcgatgactgcatattttgatcctttttaaggtttgaaatgctaatgattctatcactagcttctccggagagtacattttctagaagctttcccactcatctctattaaagctgaatattgatatgacattgatagtatcatttcttatgaaccaataaactatattgtgcttaccaccggttttctcttcttcaaacgtcaaaatattctgctcctaattgaacttatctttctcattttattattttcttataaaaaaacaatttt

SEQ ID NO: 63370 - DNA, 2233 bp, Arabidopsis thaliana landsberg
  unsure (1)..(2233): unsure at all n locations
aaaatcttcatcccagaaaagctttttcagaaagtaatttaagtggaaccatgtaatgtacgtttttaaaaataatactttaaatttccaagatatccagcacttgtaatttactaggaacttgaaacgcttgatcacagttcactaatnnaccttgaaacttgtttgctacattgaatacgggctatggtaataaatcatcgtatttatgttttttgattaataaagcaagaatagattaatggaagtagtggctaatgatgttaggaggaaagagcgaagttaggaggaaatgatgagtgttgtacagacagacgtacaagtgagaagtggccagttcatgtctgagcagtgatctggtgtgatctactctcagccgttttccacgaacattctctctttctctcccacgtgacgtttgtatgattcttctctccgtacatatcaatacagttacaaattgacgctattggctactttgtaatactagattttcttataaatatgaatatatgatattgtgattttggtgaatttgaattcgtaaaacattaaagtgaattaagtacaaactatggagctaaccgttttttttatttttgttttttcctggcaaattgtgtggataagtttttgcaatccggccctaagtcatttcctttaaaaaataatcagtctcaccttaggaatgaaagttaaacatggtttattaacgataaattaatccgttgtaattgctatagtcaatatatatacagatctttaaaagacaagacatattacagatttacctttgtatactaaataaaatataacttcaaaacagacatttttctttagctatttttatggtcagactcaaagtcaatttcttatataaaaggatccaatgcttagtatagcagaagctgttcctgagatggatccatgatttgtgtgatgatgaataaaatattctctaaaatataactatattctgttttcaatgttgttaaatgaagaaacaaaaaagctatagatttaattaaccaaaaaaatgcatatagattttcatcacaaaggaaagaaagccaagattgacgtatcattttaacaaaaaaacaaaatataagttagcagatgcatatcgtaaagaaaatgataaactaaaaaatgaaagaaaggaagaactccatgtgatataacttgtgagcactatgttcattgatcgttatcgccactaaaattgtcatctcaataatcgttacaaccactaaaaactatgactcacaaaacacaacacttttaaaatttatttgatcatatactccttaaagagaaaaagtgtgaatatcattccaagtctcaagagtgtctaaattagctaaataacatattttgatgtgatatagtaccattttaattgtcaccaaaattatatacttaaacaatttttcaaaacgttaaacatttctatttatttatttttaaaaaattttacatttacattgatgatccacaatttaaagtttcaaactaaatcttgaagttttaaactaaatcttgttgatagcactaaattatgatatactataggttacgaacggtgtccattgacaaaattggaaatcgtctccacgtataataacgcacctctttctctagaacaggtcaaacgtcacgtgacccttctctaacctttttagcttcttaactcttaaaatagaaaacaagcgaaaagaccaaactaaactttggaaaaagatcgtcgatttttgggcattcatcatcgtggcattgattgattgattggcatctcatactttcctttttcggctaatctctactcccaaaaatagaaagtctcattcactcaccaagcgaaaacagaacaagaagaagattcaagatccgttttttctgattcttttctttgacgagcggtttgcttttcctgaatgtttccgtttggannnnnnnnnnnnnnnnnnnnnnnnnnnaggaagacggttgtggtggcggtagtgatacggagggtgctaatatgggccatatgcgtaatgacattactctgttttctcaccgtacacatctatgttgctcctttcaatagactccctaagcttcaccttaaccaccacaacactcgcgtacgtaaccataaccatctctgttttcttgatctgcgttagtgttcttattcagtttctgagactgggtcgtttcttgatttgattctatgtttaacagcgag

SEQ ID NO: 63371 - DNA, 399 bp, Arabidopsis thaliana landsberg
ggacgccgatgccggggatgatcactgccatgattcacatacctcgaatccgaacagaccttgaaatcttttctaactatattgaataaaagactaaaaagcatatattgtcagtatttcggggcgatttatactgatgtatatatatctatatagcacaatcgatacaattcaaccattctttaatctccatgcaagcacatataataagatttacttgaggatctatatcaattcataacaaaagtgactgatagatgacaatctaggaacattacacgtattcttatgactttacactatgtatggacatgaatcggcatccatgacaatgcatcaaatctaatgctataccatagcgctgctttccatgactttgaggagagtataggaagtgaa

SEQ ID NO: 63372 - DNA, 134 bp, Arabidopsis thaliana landsberg
cgggcaccagtacccgttgggctcgcagcaatggggcgtacgccgggcggtgggtatccggtgccgccgctttcgtagcgcggacaccgacaacatgactcaggttcgggttataggcggtagacgactaacca

SEQ ID NO: 63373 - DNA, 2272 bp, Arabidopsis thaliana landsberg
cccgacttttgagaaaaaggacataccgaggagctgatgttaggcctttcattggaagttgtgtttctacaactgtgcatgtgatatgcttagggatagatgcagataaagctcttccatcatacagctgcaactgaactttcatttcctctgtcaaacacgaggaaagaagggacaaagagatacatgacaaatatgttagtatttctagcacatgcactcaacttgctcaacaatgactgtctgcactcaagagtatccatattgttgttgagacaaccatcaacaaaggaaataagtatgacatgcaccacgaaagatatcatcttgctaccaaccttttaaatatacagcagcttttccaaatatgtccaatggcacttcaacttgctcaaacgtattaggcctgttggatttacataatcaaggaaatcaactttagcaacacaagatcctacagtgtttaagttgatataaaacaggtaatgagattacacaaaaaaatatggactcagtcaatcagatatgcagtatctccctatgcatacaagcccgtgaaagatttctcttaacaaaaacttctgcagtaaattgatgcaatcaatcaatatcacaaaaaaagtaatcgacctatcctacgatgctaataccaaaatggttagagaacccaaaaaaaacaacttttagtagctaactgatgaattaacactaagctatggaataagcaacatactctcaaccgactcctcagatccaaaacgcaagttaagcttattcccagtgtcaacatcacgaagctcaacctgtttcccacagagaagagagtttaggctaagagacggaatatcaacaacagaaaaatatgaaataatcgatcaaaacattagactgttgattaaagagtttcaggtatgcatacctgtatggaagctcctcctctaccttgttgcttatgctctgcttctacaacctacaacatcaaacaaaaagataattagcgtttctcaatacctggaactaaaaaaaactgaaggtagaaaaccaaacgtccaaatgactaacccggaaagtacgccctgaatgtgcaatggtccatcaaaattttgttaaatcatactcatccaaaaacgttcagatgtaaggagaaaacttcaaaaagctaacctgttcgctcaattacatttcctgcccttagctgaaattaacaaaccaagaaatcagagtgcgaacatggacacagatcatctttactcgtgtgagctcaaaaaggttcaataatagtttattccctagtcaaatgagtaagaaactttaatctctgcagttaaactttacctgaatcgcgttaaccttaacaccgcggcgttgcagagcagaccacggagaatgaagcggaggcgtttctcggcagcatccaccggcggcgtacggggttgatgacaacaacgacctgctcaaagaatacagcgacctcctagtcgttactgccccaggataagtggcattagatagggataagagagatcgagagattgagattctcttgaaatggtgcagccctctcatctccgtttaacccttgcaatcggaaaactgattctcgctcgctactccattgatcgagaaaagaattgaaaaaaacaacaaaacaacacggcgtcgtttgctatgctgacgtcgcaaggacgccgttaagacagaactaatggttacggcgccgttttcgatgctgatgatccggagctaatgggttcgtttcacgagcggaaagacggacaaggccttctaattataatgggccttaaaaagtagcccattacacttgttatactttcttcaaatacttgagatgaaagcaactgtcatgaacaacaaaaaaattcaatacattcttgaagttcaaattctatttatacagattatattaatactacttttcttagaagatgtcatgattgtaaagcttacaagttgtttgcttgttgtccccctcccactataatgctttgagattaagatttcaactagtttaatttttatttaattaccaaactattgaaataatatgattatcactaacagcaactaatgatttctcaaactacatttttatttatttatgattttgtcaaagctacgctgaaaaaaataaaaaagtgaccgagataattttattgatattcaaatgtggaaaatcttagaacagtgcataagaatgaaaaacgaaataaaaaacaagaatatgatttttataacattaaaaagacaaaac

SEQ ID NO: 63374 - DNA, 162 bp, Arabidopsis thaliana landsberg
attacgtaaagaaacagaagactgaaagaaaaactacgtttggaaacaaaaaatggtatttgcaggaattgtaaggaatttgggatactagaaatgtatggatctaagttagaaaaaatcaacaccaatttgttgaaatattatttataaagccgggatgcc

SEQ ID NO: 63375 - DNA, 126 bp, Arabidopsis thaliana landsberg
gcgaccgaagcgaaagcgaggcaccaacaccaacaccagaaacaaatagcaaagaaaggtgcgcaaagggaagaccaaacacaccagcggaaacaagagcagacgaaagagcaaaagaagagaccg

SEQ ID NO: 63376 - DNA, 1713 bp, Arabidopsis thaliana landsberg
  unsure (1)..(1713): unsure at all n locations
tttagctcatctgttttcctagttttctcaatttctgcttcacacttctcaagtttttgtttaaggtctccgttctcctgatgttgcaaaaactaactatctcaatagaaaataaatttcaaaatgcgtatcccagaaggtaaaatgcactgaaaccactttccacaaaaatcaaagaaagaattctcacctgaaaaaaaatataaaaaaaaaactagtatctgaaaatatctgaaagccgataaaatcataacttaaagaaaacaatcaaagaatatcaaggtatcatactagcaattgggtcgacacgcaacaccttcagtatatgttgaaaaggatgctgaaaacaagttaccagagctaagcaataataatcgataaagcgataaacttaagggtctcagtaccttctctaacagctgttttgtagacacttctttatcaagtctctccttgtaactactctcgacttggctcaagcgtgcctgcagtcatgatttgaaactcaagaggttaacatggtaacacaaaagttagaacactatcttctgatttgtgatggcaaacttacctctaaggccttaataacaccctcaagttcaccagcctttctagaccattcctcggaactttccttgtacagatcaacaagcttgttcgcctatatgacagcttgtgggttagattcgaaaaacaacacctatgaagatctatttcgaaactgtgaaatgcctcaaatgacatacttagctctccagtcagctaaaaagatgtaaagaagttcaatgtttgaaaccattacgatttgagaaactcacagtgaaaagttcagcagtgtattgctcttcagtggtcgttgctgcatctttgcaagagctgaggtcctttggatatgaagagtacaagtaaatctcagagtcatagagcataacacgataagatatgaggagataagtgttacaagccatacatacctcttgtaatgaaccgattttcgtttcgagctccctcaatctttccttatgccaatttaacgaactagagcactcaatataatttttctcaacctgatagaagaaggaataaggagaaaagaaaacagagagacaagtattagaatagaaatatgatattggccttacatctacaagctttgctgacatttcagattcaannnnnnnnnnnnnnnnnnnnnnnnnnnnnnnnntgtcgactttggctgtcaactcctcatctagccatttggcatgcctttcagtgagttctttctcctgtttccatcaaaaaccatatgtcataaacaatgtaaaaggatcaacatattttattacatgacatcatacaaattcaggtatcaataaaatcaatcaaaatcatgagcaatcaaacataaatcttaaaatgcaatcaataatctgacctgagataaccgactacacatagcttgagaacgggccaattctgcggtggcttcagctagtcgggcttccttctccgaactagtatccgtcagcttaacctgagaaatggaacaagagttagggttacacatttgaaaaatgcctgtaacacattattagtaacaaaaatagtgaaacactcacaattttatctaagtagctcttgatagtggaattcttctcgaaaaatctcggcatctttctgctggataantncagcagttgcctcttaggcttataagctcagacatct

SEQ ID NO: 63377 - DNA, 1153 bp, Arabidopsis thaliana landsberg
atttatccggtaacattttgaagttgtagtttcatatagcctgcagatactgtggtttttgtttaattgcagtcttttgattcactctttgttcgtcgcaaacttgcaatacttatcagattttattttgcctgctaattatctctagttcatatctttcatttcacatattgtgtcgattttttcaaattgatatataatagttgagttccttttttcaaatttgtgtgtgtttacgaaagaagaaaagtaaacgaacgaggccaaaaaaatgtgaaattttttaatacatacaaaaaagatgtgaacaaaaaaagcgaagtaacttggcgtgaggtagagcaacttcactaacaaaggtgtcagttgcatgcatggacaggacaaatactctcttcagtcatgtgtcgtacacgtcgatctcaccactggacccactctttaatacacaatcagattacgttgtaacaaaatttctattactgccaaatgcatttctttggcacgaaagacaaagctcctatttatgccggtatagccgtcgtatccctcatgatcctcaccggtttaacctttgccggtacggccgtggctctaaccgttatgataccggttttggtggttcttagtccgattctcgtaccggcggtaatcacatcgagtttcttggcaacggggttcctagcttctggtagcctcggagcattggggatcgccctcctcatatggctctacaagtaattacttaagttaaagtaactaattaactcttctaatgctttgattgtaccaattgaaatttgttcatacatgcattgaccacatttttattttgtgtgttagttaacattatgtatgtgtgaatgacacttaggaaagaagagtattccagagctactttgcatgcacgaggaggtaggcctgatgggcctaataagctggcagaaagtggcaagcaatcaggaggagataatccgttgaaggaagacaagccgccagaaagagataagctgccgagaaaagacaagccatccaaggaagacaatctgctgaaaggagatcagccggccgaggaggataaattgccggctgaggaagaaaaaccgccacaaaaagataaaccgccacaaaaagataagccggcggagggaca

SEQ ID NO: 63378 - DNA, 1496 bp, Arabidopsis thaliana landsberg
gagtttaagaatctatcggaagcaatttatcccagaaaggtgaaagataggtagaatcttacgtgcaacgctgagtacatggcccggatcttttgtcaaatcaatggtggagtttcttggaatcttatactcatctttgaagaggctagtgaagctgcaagtgatatcaaagtaaacttattaagcagccaaatacagaatcagatgtgaagtccaacgatcaagacgaagctgaaatgtaagtgagtacctttgaagcaactcgtcattgtctgagccaccgaacttcttgagtctgtttccaacagactcttggaaagcattacgcacggatcggatgttgagtttgccgtagacaatctgtagtcttatcgtcatcttaatatcggcttccatgagatcatccatgaatgacttgtttcccctgatctctgaagctggaagatttgcgtacttgtctcccacaagtttcttcacatcatcacaatcagcatacacgcctggccaatgccagaaaagctgaatcaatcaattgaatggttccaaagcataacttttttctattgctaaaatatcaaaaccaactactttttcactccagtcctatcctttaatgccgtaaactgttgatagcaattcgtaatgacaaaaagtgagatctgttacttagacttccgacaactaaaaatctattcaccaattccaattaaagaccaaccaatccgacaatttgcaagctaatgacggacaaggacaattcaactaacatgagtttcggaaatggattaaaaagttaccgaaggcgtagacatcgatgttcttcaatcccagtaagctcttcttcctcaggccgacgccgagtaatcgccgggaatctccgattgaagcgggaaacgagaaaccggtcttaggttcgacaacggattcgtctgctagagttatagatccccatggtgaaagagacgaacggtgagaggagaaggcccactctagaatcggatggctgggattccgggacgccgcgatcgcagctccggcggctgcggcgccaacggtgacggagacagcgacagcggaaatggagaatccggagaatgacgtggtggcacgcgggggctgagaaaacgagaaagggaagcgaaacgaaaccatcgtcgtctttttggtgtgagtgttgtttagtagttcaccaacttttttgtttgtttgttacactctttcttcttcctaggcatattgataaacacttcacacgccattcccttgatatgattcagcgacaataactcctgctttaattgacacgtgtattgcacgtgacctcgattcttccggacatgctatgtttgggctttcctcgttttactattccggacaggatctatttgggctttcttttgctcattttatagaaaggcccccgttgcttttttttttctggaaaaatattggggagatgaatcgaatagaatattttaatcaaaatccaattaaag

SEQ ID NO: 63379 - DNA, 1362 bp, Arabidopsis thaliana landsberg
acgtcactgtggtaactatctattcatctttgggagaggaagttttttgtttctcgctgaatgaggtagcccttgctcctcttttctgctttctctttattatggcgacctaaatccatgtcatatatgctctgcggttgtttatgtcctgattgtttctggtataagagtcacataggttggaatgagctctatgttatcatgtggattagtatttttcatatttgtgtatgcttacctttcatatgttcatgattccctttctttcactttccagacagaggtcacaaccgtaatatgtggtagcaaagaactcaaaaagctcatggacataagccaacagcttgaaactgtgaaacgtgtgatatgcatggatgatgaattcccatctgatgtgaacagtaattggatggcgacttcatttactgatgttcagaaacttggccgcgaaaatcctgtggatcctaatttccctctctcagcagatgttgctgttataatgtacaccagtggaagcactggacttcccaaggttagaaagttttcgaaaccagttgacgtgtacaactgttgtctcagaataaaaatcttgtctatggttatcaaaattgttctatcagctatttgttattggtcctgcaaaatttacttaatctgactttcccacttcccaaataatgtagggtgttatgatgacgcatggtaatgtcctagctacagtttcggcagtgatgacaattgttcctgaccttggaaagagggatatatacatggcatatttacctttggctcacatccttgagttagcagctgaggtatcttaaaagttcattactcaatgcgtttatatagcagttccacacttcagagtatttgaatgcggcctaattccattgttgtagagcgtaatggctactattgggagtgctattggatatgggtctcccttgacgctaacggatacttcaaacaagataaaaaagggtacaaaaggagatgtcacagcactaaagcccactataatgacagctgttccagccattcttgatcgtgtcagggatggtgtccgcaaaaaggtttgtgcatgttagatacacatcgaaattctttggttggctatcctctgttaaagcagttgagctcgtgctcgcctagctgtttaaataattccggctatctcccagcaaccaagatgtgctaaattgtcttcattctcttgtgagtaaaacattataattgcataagcactgacaatttatgaccatcaggttgatgcaaagggcggattgacaaaaaaattgtttgactttgcatatgctcggcgattatctgcaatcaatggaagttggtttggagcctctt

SEQ ID NO: 63380 - DNA, 1091 bp, Arabidopsis thaliana landsberg
gtctcagttcttaaaggtcaagtcatgacttcaccttagaggacagcaaaaaatggccggagtttacaaagcttatagatttctcatacatacccttttagttttatcatcgagtgattccttttcctcgtcatccgaattatctagattcccctcatcatccacaatactgcaaattcttgaaaactttctcctatcagttttcccataagtagtcttcaagcagaggctatgagagaaagccagtcgtccagagaaacacggaccgcaatatctcgaacaagaaaccttagatattgttcctataccgctacgttcgtgtataacagattgttgacagtgatgatgacttgatacaatgctcatcatatcctgtaaaccagtgaaattccaaaccatgaagcaatttgcagaatctaatagaggatgaatctaatcctcaaaccaacagtgaacacagtgatacagaatctaagtagagaaccaaagcaaaagttcctgataaagtgatttcacagacaattgcgtagtaattgttaagaatatgaatctcgtagcatcataatcaatctcactccttttatattctaagagattcatccagaaatcgctgttctgctaactaagcagcaattatctgaggattcatcgagaagcgactaaacatgaacaagtgagggagataaccagtgaagcagagactcaatttaagaatttagcaagaagtagagggagagcgtaatcttaccgccggaagaggtggggaagtgcacggcgacgatgcggaggaggagattaatagatgggggacaaagagatatcacacatatcagtgaatgaacggtgaaggaggaaacaaaaataaaactcttaaaactttgcgtatagttttcattttcgctatatcaatgatatcataagatttgctaaaaattatagtagaacaaaaaaaaaagatagcatgcacaaaaacgtcttaaattaaaatacatgacttataaaaagacaaaaaaaaacacatatttatccaaattagtttagataaatatgatatttaattttaaaattgctatgatataaaaaaaatatat

SEQ ID NO: 63381 - DNA, 163 bp, Arabidopsis thaliana landsberg
tatattgtaatatccacagttaagctaaaagatgatttttcaatattactatatttagagaagagaagatttttctgttagaacaaaaaagattgttatataggtgaaatgaatgatgacttccttgagatctgtcctccttatccatttcttttgataaaga

SEQ ID NO: 63382 - DNA, 434 bp, Arabidopsis thaliana landsberg
tcctatataacaaagttccacctcctttccattaacccggagtctcaatcacagactactaccccccttctctcatcaaagtttcttcaagaaacaaaaaatacccagaagctgccttagagccctatcacagacctatcgatcgtcttcgatatggatttactactagtctgatgacattgcgattcttaatgactgtggttgcgaggataccaatccctatagaaataactgtctcgaggacaagcctcaatataaggctgagagctatgtttctgaaatgcaaaaacaaggactcgtataaataactcacgggattgctgttgttctccactgcgcgtatgatatttgagaactatgacatctgaatctattgtgccatatggtccgataaccataacttgggatccacgacgtggatgagtgtcaccatc

SEQ ID NO: 63383 - DNA, 641 bp, Arabidopsis thaliana landsberg
  unsure (1)..(641): unsure at all n locations
tttattggagactgttaccactactagctttcattatctataacctaagtctggttaattcatgattatgtcaacagtttctttggtcgaattttgatatcgagtttggtttctaggttttagtttccttaaatgtttgtctttacaatgaagtaaagttaaaacaacattgagtgagaaagtggccaactaattctctctgtaccatcaatccaaaattaaattgatttgatttgattaatcaaaaaggtggtcagagaaaaacaaaagaaaaaaaggttttaaatttcttcccgtaccagctagacccagaatcaaagtagcatacttttgctacatattcaaagtaatttaacccccaaaaaccaaaaagaatgtgttagaaaagcaacaagaagaagaagaaagcaaattaatagacaaataatctttcttctctggttgcttctttttatttctttctctggaacagcttttctttgttactttacttctttgagaaacttcataatcaaagaggtaagtgattcatgttgcttgtgattattccaatggttttgttcttttaggttctcggaaataaataattattctaactaccgagtngngtataatttgtttttgtagtttctctgatctat

SEQ ID NO: 63384 - DNA, 658 bp, Arabidopsis thaliana landsberg
caagcatacatatatattaatgaataaaactctcaagacgtttacttgagaacatttattttagttctctccttttttagaagtgtatatacgccaccactaggtgtctctcactcaaggagaagcagatttgtattattaagctcattgcgcagtttgtggcggggtatgggaaggtgtttcaacgggatttgaaggcgataattgttaagagccatgagcagtttgactttttgaagccaactaatagcaacttcggtctttttaatgcccttgttacttcgtattcacgagtattaaaacattccaagggttctccctcctttcttgatcgtattttcgaccatcttcgattggagaagctggaggagggaagggatacggttatggttgatttgtttgactttgttggaggagggagtagagactgctgcgatcgattaacatgcttttgtgagtggtgttgaccgtttttctcacattgctgatgaagattattctgctggcatgccaccacctgaacgcctttcggtgatgatcatgaaccgagtagcacaaacacagcctgatatggttttgcagctttcactgggatctcagcttactagtgaatataaagtgttcgtgattctttaggtcttctactctaaaagactaa

SEQ ID NO: 63385 - DNA, 503 bp, Arabidopsis thaliana landsberg
caagcgcaagtgctggtgctagtgcaagtgctgaagaaagtgctgcttctcaaaagaaagagtccaacagcaaaagttcatctagtagctcatccaccacatcagtaaaagaagttgagacacaaacttcctcagaagtcaattctttcatttctaacttggagaagaagtacactggaaattcagagctcaaggtcttctttgaaaagctaaagacttccatgtctgcttccgcaaagctatctacctcaaacgcaaaagaattggtcaccgggatgagatctgctgcttcaaaaatagctgaggcaatgatcttcgtgagttcaaggtttagcaaatccgaagaggtacgccgtaaaatgaaaaccatacttcaaactctaatattatgattcctttaagattgaaataaaatgatctttgttttcttgttttggtaatatagaccaagacctccatggcatcttgccaacaagaagtgatgaagagtctcaaggaactac

SEQ ID NO: 63386 - DNA, 740 bp, Arabidopsis thaliana landsberg
cacataaaacaaaaggtacagtatataccataaatctccgagattcttttgatgtatctgtccatttcattattacacaaactaggaaactgatatctctctattcacattcctctgattctatttctctttatatatattcacccattaaccatctcaatcttataaccctcaaaatcacaatcttctcttacaaaaaactttgaaagatgaagattcttctagcatcattgtgtttgatcagtcttctcgtaatcttgccttctgtcttctctgcttcttcttcctctgaagattttgatttcttctacttcgtccaacaagtaataaaatcattctaagaatgtttctgatgattttttataatcatctaatattgttttgtgttttattgtatagtggccaggatcatactgtgacacacagaagaagtgttgttatccaaattcaggcaaaccagctgctgattttggcattcatggtctttggcctaactacaaagatggcacttatccatctaactgtgatgactctaaacctttcgatagctcaacggtaataagatcaaacatttctgttttaaggtcaaaaatatggtttaaggtaaaaaatatggaaagttttgtacataaccggttggtttgatttggtttggtacagatatcagatcttctcacttcaatgaagaagagctggccaacactggcttgcccgagcggttcaggtgaagcgttttggga

SEQ ID NO: 63387 - DNA, 744 bp, Arabidopsis thaliana landsberg
gatggcgatggcgaataatctaatgaaataagattaaacgagagcatcgaaatggccgatacattcacgattgcggaaaccaaggcttcggacgcccagtacgaggcggcacttcgtctgacgcgcccggaaatggctcacatcgaaccgcgcacgacgtatgtcgatacggaaacgtatctggatgacgaaatgtttcatcgtgaccaggcggcgctgttcaacaagctgccggtgccggttgcggtggggcaggatctgccggggccgggcacctacaagagcgtcgaaatcgccggtaagtcggtgatcctgagccgccccaaggacggcaaggtcaaggcgtttctcaatgcctgcacgcatcgcggcacgcagctggtcgaaaagggcgagtgcggtaccgggcagaagatcagctgccgctatcacgcctggacgttcaacctgaacggcaagctgatcggtgtgccgcgcgaggaaatcttcgagcagttcgaccgcgagcagtatcatctcgtcgaactgccgtgcatcgaagccggtggactgatctgggtcagcctcgaccgcgatgccaaggtcgacgccgacagcatcggtcgcgagctgatccatgacttcgagtcgatccgcctgccgcagatgcggatcttcaatacacatgaatacgatctgaaggctaattggaagctggttgccgatgccttcctcgagggttaccacgtcacgaggctgcactcg

SEQ ID NO: 63388 - DNA, 449 bp, Arabidopsis thaliana landsberg
atatgtcacatcaaaacacaaaaacactaactttaggggaatcatatgaagacattaagcatcactattttttttatgttcattgaaagatagcagaataccatatgaagacatatatggcaatataccaataaaagatagactgataatccagaggaggaattttcatttccaacattgatcgccacctacgctgaggtcgagatcaccgaggggaacacaaccgacgtagatcgatataaccaccaccgtacaagactcattacaagaaaaaaaaggagaagacgtttccaccacacttcccaactttagcaaaagataatgtttgaactagatggttaggtagaaaaaaaaaaacgagcaaaaatatgcaagaagtagatggtcgactaattaaattgcactagacttggaagttggaacataagagcacataagtgggtaacaca

SEQ ID NO: 63389 - DNA, 463 bp, Arabidopsis thaliana landsberg
ccggaattgagaagattagacaggtaaaagttattctctatcaatataaggtgcaagtcgctaaatgcttctactgtcagctaattcttgtgtggttcttatgtaggcttacattgagaaagaagatggtaagaaattgaagcaaaagcaacgggagagaatgcaaccaaaaatgggaaagatggacattgactaccaggtttctattttttttaatctttgttttgtgatgagtatttgccgatatctgttctataactgacaagtgaagctattctttcctttctcaggtacttcatgatgcatttttcaaataccaaacaaagcctaagctgtcagctctaggcgatttgtattttgaagggaaagaatttgaggtaattccttgtgacatgttttttcagctttatctataattacattgcttggtttcattggtttgtttacctaaaatctaattact

SEQ ID NO: 63390 - DNA, 449 bp, Arabidopsis thaliana landsberg
  unsure (1)..(449): unsure at all n locations
ataacgatnnnnnnnnnnnnnnnnnnnnnnnnnnnnnnnnnnnnnnnnnnnnnnnnnnnnnnnnnnnnnnnaaattaaaataaatacgttattcaacacatttgacgtttacactaccgacatgcgttagctctccgcgtttatctgtgggttgatgtgacctgtcaaagggatatcaatctcctgtgcatgatgttgatggggtcgacgttgcgcggtgcgtgcggacggagctgcttacgcagtgcatgttgttgcatgctgtcgctgacagatagtgagcttcaatcacgaacgccagttctaccaacaaacctccctctgacggatggctaccacgcaccgaagccagaaccgataagtaacgcgccgagtaagtcaagcaggtggttgattgtcggtgttggctatncgtctttctactagcatacttaggataacaccgtaca

SEQ ID NO: 63391 - DNA, 1665 bp, Arabidopsis thaliana landsberg
aggaaggtaaccactaatattgttcacctgcaacaaaagtagaataacagtcatgaacagtcgaaccgatcaagtaccatatcgagattaagactagatgaaatagccatgtgaaacgccaatttaattttacagaaacagacagagacgtacttgtatctgtccaccgttcccactgaccatatcaatcattttgatgtacgaaccttcttctacaggctcataaacctggcaaaaaaaaagagtaagctcaacatttgtcttaagtaccaagacgatggtgcatcaaagaaaagttaactaagctttaaaaagtaattaggacacgtttagaaagtgcaggtttgtgtaccgaccttttcataattggctaaacggtctctaaagtctcgtactccagcttcaaaatccattctgcagagtagcataaactcagttgacccgtgaaagaggacgagaaaatattagttatagagcgagcatagtactcttctgaatagtcaggactttgctggattttaagacgtatgtttctttcaataatgcgctcatcattgcatagtgtttccagaaaaatgatctgcataagagataaaaggtaaatcagttaggaggataattccaaatccgatattagtcgaaggtagccatgcagcattacaagcgctgcatcaaagcaattctttgaaaatagaaactgctaaccaagcatgctttccgcagaagaataaccgtgccattaaatgagaaacaacatcacagtatatcaaagcttcaataccttacactttccttcagccattttcatcaacatattccgtcgaactcgtgtgctattagttgcatcaaagattccaacctacagctaaaaactatttacaatgcaagatataaaaaccaggaacttacatctaaaccgaaagatacttacttgaccaccttcttgcatccaagctatcatgtcctccatagcaagtgctgctacctagtggcatgtgatacattaaaactatgtgcaaagaagaagataaacagtgttaacattaccactgaattaaaatatgacgaatttaagttaaaatatcataaaaacgatttacacacacaaattagaagagactgtcggaaaatggcttaactaaattattcgatttttcatttacctcagtccgtgcctctacaccttcaggattatcagctcggaagaaatcagcactctacaaaaggctcatgcgttgtcaatcaaaaatcgtctaaaaggaggacagaaacatataaaactcagttttaagaaccaagccttaccatgttaactccatgtttaagccgtcggtactgcaaagaaacggagcaatgtttgagtcaatctttccaacaagggtcgcgtaatgacaggagaagctaaaaaaaatcaagaatcattgcaacaaaatagctaacctttccaacattaaaatgtttagtatcatgtcccaaccagcgtagatatcttgtcaactttgctgcagtaaaagtctttcctcgagcaggcaagccaacctaatacaattttgacgggaatggtgtgaatcagaacatccagtcttttttttttttttttccatttacgtttataagttaaataaaataggcagccacaacaacgtccagctttcttacaatcaa

SEQ ID NO: 63392 - DNA, 441 bp, Arabidopsis thaliana landsberg
ggacttgacctaataacctcagactagggctagtgggacttgtctcaaattatggatgatactgaactccaacatataatggatgagctagaaactgaatcacctgaagaaacaaacaagaatggattgtgattgacagagtgagagatggtgtgtttttcttatctaatcttctattacctgaacacgtttccctgtatcatctttacccacaaatcttaaaccacctactcaagtgcttgagctacttctggattcacctaacatcatcaaacaaaaacaaccttattcacatcattgctacagatagatacattcacttagaccagcttaggttacctcgtaacggtgcctatgcctttcgtctacatatgaaacttggccgcatctggtgaatgcccggagaaaaaacaacttgccgtctttaaaaccgtgaactga

SEQ ID NO: 63393 - DNA, 294 bp, Arabidopsis thaliana landsberg
  unsure (1)..(294): unsure at all n locations
gacacgagaagcacgacaaagaaataactcagcgagtttgtagttctccaaacagggaaaacaggaacggagaggcgcagaggaaagaacaaaaccggcgangcgcggacaacaaaacaacagagcccaacagagggagcaacaagcaacagtaagagcacggtaagccggcacaccccacagaacttaaccagctagagacaaacagcctctaaaccccaatgagcacaagaacaacagggaagtgcgaatgacatggaaaaatgcggtatgccggaagaaacaagggaaaaa

SEQ ID NO: 63394 - DNA, 170 bp, Arabidopsis thaliana landsberg
acggaaaaaggaaaaggaacaaaagaccgaaaccgagaaagactaaagaaaaaagaaaaaaaaaaggaggattttatggacgcgggaccagagaaaaaagaagggataaaagaagcagaaaggggggcaaaaccagaggatgaaaaaacatggggacacaaagaaaaaag

SEQ ID NO: 63395 - DNA, 589 bp, Arabidopsis thaliana landsberg
ctatgtgtttggtttaatacctaatacttatgtgtgactattatattgtctagacttgaggttgatcagtatgtatctctgttctcaagccttcaaggtcaaagaagaataaatatacttgactacttgtgtttctactttctaaattgttcagtggttggtttagtaaatctaaattgtttattagtgagaatttactcttttatttgctaaatagtaatgttatagaatgtagttttttttttggttgaaagtttaagaacttcgtttttaatttaggaacttgttttttgtttaattaaaattgtattggaagctaaatattttaaagattcacaaaaaaattattaatttcattcttatatttaaattaagtttttgtgtaaatgaaagggagaattatttttttactggctttttaatataataatcgatatatattagatactgcattgaatagcattaactgcacacagtaaaatctagagctaagaagaaatctattgttgtgttgaaaaaaacagaacatggggggaaactggaaaaggctacaaagtaaaagaaaatgacatatctccacaaacaaaac

SEQ ID NO: 63396 - DNA, 454 bp, Arabidopsis thaliana landsberg
  unsure (1)..(454): unsure at all n locations
taaagcctttctttaaaggatctttttaccaatacttattttgatcaaaatcgcaggttcttctgtataaaaggaggaactaaacataacattttaagaaaaactttaaggggaactatactctataccctgaatgttgtccatatcttattacacattatctgtcctttacacacaataaaaaaaaatggctatgtctacagctcnnnnnnnnnnnnnnnnnnnnnnnnnnnnnnnnnnnnnnnnnnnnnnnnnnnnnnnnnnnnnnnnnnnnnnnnnnnnnnnnnnnnnnnnnnnnnnnnnnnnnnnnnnnnnnnnnnnnnnnnnnnnnnnnnnnnnnnnnnnnnnnnnnnnnnnnnnnnnnnnnnnnnnnnnnnnnnnnnnnnnnnnnnnnnnnnnnnnnnnnnnnnnnnnnnnnnnnnnnnnnnnnnnnnnnnnnnnnnnnnnnnnnnnn

SEQ ID NO: 63397 - DNA, 269 bp, Arabidopsis thaliana landsberg
aaaacaaatcacttggtagaaaaataaaaccatcaataggcacaacatggattttaaaacagtaacgattatattatttttaagtttcgtaatttgaactgaaaatactttcaaatttcaacatgttaaaagttaaaacccaatgtgaaaaatatatatattatatataaacaaaaacctaattataaatcattaaaaaaataatcaaatttcaaactataattttatggagttcatttaacaccaaaaataaaccaacaaaccatttt

SEQ ID NO: 63398 - DNA, 2302 bp, Arabidopsis thaliana landsberg
gactggaataaatgtatgcggcaagagtaaaatatagctcatcactcataaataagcaaattcaacaatctattatactcaaagaagttccagagtatatgatttaacttactctcaactgctctttccgagagtacatatactggttcaccgcattccccatcaggtgtcattggagtatactttgcaactatgtaatagcccactgcccccaagggtatacggaatgactggaaaaaccgttgagatgcaacattataagatatatgtcttccaaacttttctgatgagtattagacattaacctacctttgccacttttgatgtgctcaattcttcaagagaattgtctccttccaggatagaacaacttgatttgaaccattgcactctgcttgaaccttcagttcctccagtaacagtacctgttacagtgaccttactattctccctcaagtcaccaactatcttagcatctgttactttcgggggtgctggagtttcaataaaaaaaacaaaaaaaaacaaaatgagccaaaaatgaagagaaacagtccagcaaaaaaatccaaacaggcagttctaatggataaaatacgtcaaatcaaatgctaagcgttatcaccaagatatatatatatatatatatatatatatatattaaaaaaaaaagaaaaaaacaaaaaaaaaaaaaaacatgccatgcccaataacgagaactagtagacgctagttcacaacagtcaattgttagagcaacaagaagaacccgagcaacatgaatcagtatctttggaaaacatcttcttctataaaagaagcctgtcttttacaagattttagcatacctggcttgactacactggatgaagttgacactggttccccctctagccctgcaattttctagaatacgtcagaattgtctacggcctaaccctctataatttgaggctttcttctaagtaagaacccgagggaaaagaaacgggaagaaaaccaaccctcaaaatttgcaggtatgtacacaaaagttacatgtgtgccaacatcttcctgggtcaatgtatactcggaggttccagccgatatcaacgagagttctctgtaataaaacatatgctttaagcaaacatgaccaagaaacatgaaaaaagaaagtagagatactgcagtgacaacacattcagacactcatgtataggtaccctgtttccttgttcttccgtaaccattcgaacttgctaggaccttccttgcctccaaaataatctccaacccccttgagaacgcagccttcaacagcatctccagtaattcgaacattacttacagatggaggcgctgccaccagaatttaaagttagtaccctcagatcaggaaattcacagacagcggcattagtagtttaaaagatgaaaaataaagaaatatacaaataacaaccactacactacatgaatcagttttatcatgcaagttaatcaatctgaaaacagttgacaggaatttacactaatccatagataaaattagataaataagattattgctatcgtaaagaattcaacaactattcaaaagaagcaagcaaccacagagactttgaaccattagtcaataatgaaagcaaagaaacacaaatgacaatgctatgcgaatgtagtgaaaaaggaaaagatactatctattagaagttttttccatctacctgcttttacgaactctgtgtacttatactgaggctctcctcttgcacctccttctgtgactggtgtgtacatgaaaaccatacttgatcccacatcatctaaagataacatatattcctcatcttcagctccatcgatcaccacagggctcccattccactttctcctcaaccaactggttttaaaaaaggaaaccatacctctttggttattaatgataagtgaatcaacaaattagaatagacagaattattagaagctgcatataacaaaaggagatagcagaaaacacgatttacctggtaatacactttcctggtgtcccaccacaccatgcaaccactgcttgacccttgataatattcccctcaactagttccccatttaattcaaggctcacaacttttggtattccctttcctgcacagcacttcactgtgatattctagaggacaccaatagaaggatacagtgcaaagcacatgaaaatggaaagcgtccatatggcctattgtataactgaagaagcatacctcgttgaactggggaagatatggcaaatatggatggatattcagtctcagccaga

SEQ ID NO: 63399 - DNA, 199 bp, Arabidopsis thaliana landsberg
gtttatcgtggcattaccactcaccactggtggggccaatccaacatgtctccttagttgtgatactacaggtctggatgatcttagaagtgagctgcccttctgtagccgtgctcagggtcatagctactctatgagttgttcacctcttgttggctccttcttcttctaccgaaccatgatcggatactatggcata

SEQ ID NO: 63400 - DNA, 1058 bp, Arabidopsis thaliana landsberg
  unsure (1)..(1058): unsure at all n locations
tgttttcgaataaatgaaatgataacacgacttctactatagatagatgtttcccctacaaatgagacatttctaaccaaatattagataataaatttatatatatgtgcctccattcaaagatatatatatgatcgacgatgactttttcgaatgtgtatataaatattatgaagctcacaatgaatttaacaaataaatattagtaatcgtgattcttactaaattcaagaattggtcaacctcgaacagttagattcatgtataccctaagatcaatagctatctggtcgttagaagagacacaatctctctgtctctctctctctcttccctagtgttcggacaaagaaaactgctgtctaatgaagtttataatatgttttctcattttatatgttatcattttcttatctcttctccttaatgttttaattttttcgaatctcatataggattcgtagtttgcatgatatgaaacgagtttcataatcattcttaaaatccaatcaagaattttttttatatcaaagactatttgtaacaaaatgagcatataataatatctccggtgcaaagattagtgattcagtttaactactaatttacctgctgcaggccagatgacgtcactcagcgacggagccaccgtggtcttttcgggcttccaagactcccaagaaaccgctggaaaatcatcagaggaagccaccggcatagacacgccggcgcttttacttactcgccgacgattgctcgacgaccttaggcttctcatatgccttacagattcatcaatacataaaccataagaagagactcctaagaagtgatgccttttgaaaccaacggttaccattgatggcggaataataagattccggctatgaagctgtaagtggccggaaggtagaggcttcaccggaagcgaagccatggttgttgagagagtgttttgatgtaaatatctcaacaaagactcanaaatatgttcccttcttttcttttctaattagggatgacagagagagagaaaagagagaaagaagtggacaatg

SEQ ID NO: 63401 - DNA, 543 bp, Arabidopsis thaliana landsberg
  unsure (1)..(543): unsure at all n locations
actgcgccgatgcaccagagggatgnnnnnnnnnnnnnnnnnnnnnnnnnnnnnnnnnnnnaatctgaaggggtcaagggcgacaggcaaagactcatcagcgtagtgctgaacggattatcaggtcctatcaccgtaaaaggcctgccatacagcgaaaccatgcctgcacacggcagcttcctgagcgatgcccagatatcggaggtgctgacctatatcaggaaaagctggggtaataattcggacgcgatctctgtggacgaagtggctgcgatgagaaaagcaaccaagtagtcatagatttcctataaaaaagaagccggcgtatccagatttacgctggctntttttattcccttgagtatcagaacaggcagcgcattcccccggaatccaattatcctctcactgtcattttccgaacttcgtttgacccgggattgcaaaaccttacctttgcactaaatttctaaaaacagttaaaccaatgataacagtaggtcaaaaattcccttcttttgaaaagaaagcgggcagtag

SEQ ID NO: 63402 - DNA, 465 bp, Arabidopsis thaliana landsberg
ttactcagaactgggaacatttcctggaacactatagatacgtagcacatagccacatgtagacctatattttgcatagttttcatgtcaaattcaatattataagtacatttttattaacaaataggtagcagagtagtaaatcccaatagagactctcccaaacacccaattattaggtaatgttgcattcaatttgagtttaaaattttcatcctttagccttgtttcttcattcccttgatattagttttaatttaaattttatgtttcatgttttctcttgtttggtgtttcttagtttgaaaattatgctcttggttttgattggagaacctatgtatcttagactgcttcaagtctgttttagaatggatagcagttggcacagccacatgagtgttgggcccctgctggagggagagagggtgttcagggtacttggtgtcgcttctgcaaacccct

SEQ ID NO: 63403 - DNA, 566 bp, Arabidopsis thaliana landsberg
  unsure (1)..(566): unsure at all n locations
cgtgatggtcgtagccccgcttccagctgatccattacctgttccgccggtgccgatagaacaagtataggtatatcccgtacctggcaacaccagaaaaggaacaaatgcaataccgcctgctccacccccaccactgccggccgatcagtaccgccacctccctgcccccggggcctacaacatacatagatatccgggtagtaccggaagttggagtataggtagtagtgggattctgcaatacctgcactccgataagtgtgccgatagcctggagtgctccaccggaaaaactcatattggaacccagtgtaatatctgtaacattagcctgagaacctgttggattacccaccagtgtattggcagctccctgtctgagnnnnnnnnnnnnnnnnnnnnnnnnnnnnnnnnnnnnnnnnnnnnnnnnnnnnnnnnnnnnnnnnnnnnnnnnnnnnnnnnnnnnnnnnnnnnnnnnnnnnnnnnnnnnnnnnnnnnnnntagcgatattacttaaagtattgctggcgccgctgatggtttggtggtaagcgttttcgcac

SEQ ID NO: 63404 - DNA, 550 bp, Arabidopsis thaliana landsberg
gcctcactttgttgaggtcactgagccattcaggacaagaagggagctaagggttttttttattgctcgccttattattgagtccactttgctattatattaggcaaaacatgtataactccctaaagcgaaatcaaaaatatacaagtgaaccgacagggttaaaagaaaaaaattgtaatgtactgggtaaaaaaatgttttatccgatatttagaaaaataaatgatacaacaatcattttattatataattatcataaatgatgagaaagatgctgacactataaatttaagaatatctcttatattaattacaaacctaatatttgtaagttttgttcaaattatttgatgcacctacaaaaaatggtggatgcacgtgactttacaaaataatatatggttgaaaatcttttattgtgtgaaagaactgtcacattatcaaaacattaacttaaaaatgataataatactatatgacaatctgacatggacgaaatgtgtgtgtacacagtctaaccaatattcaaaaaaagaattgtatattt

SEQ ID NO: 63405 - DNA, 430 bp, Arabidopsis thaliana landsberg
caagtagcatgcaagtcatgctcatcccaaacgctgaagtctatgtcaaaatagtaatcaaatcaatatagactaatagatttgaatctgcgaacagccagaaattatttaaagacatgctcaccatcaagagaggacgtctgccccatttatcgacaagaatgaggccaatcatggcttttggaatctgcgaatagccagatattataccattcaatgcttacacgagttaaaagaaataaaaatactacatgaaattcttagttcaaagagttcattaaagtacgaaattttaacaaaataaaaaatgtcgttttttcaactgtgataaaatgtcgattaaaacgccaacatcacacaagtttagttgctgagtcacaacaggtttcagaatattttgcgttcatatagtcaaacaaaattttgacaa

SEQ ID NO: 63406 - DNA, 116 bp, Arabidopsis thaliana landsberg
acgatatacagatgtgactgttttaacagatctgccggtcgacgtattgcgagtactttttatatctatgggcttggtgcacctgtgttgacggatcgaacaactcgcgctgagag

SEQ ID NO: 63407 - DNA, 1144 bp, Arabidopsis thaliana landsberg
aatcctttttactccaaattttcgaaccatgaactgaattttgtattatgtaagaagattgagtctgggaattctagtataatttgtcttaaaaggatatcagaatcagaatcttactacttacaacatatattgccaaatcggccacaatttaagatagttttaactcaccgatccaaaacaattcattttcaacttctaactcaagtgaacaaattgctcttcaagctaatgtgaaaagcttggaatctaaagttaacaaaagccttcttaattcatctgtattgtttgaccataagaatgtccgagcataatctttgaggaacttgttgcagttctctaccttcttgccatgcctgtcctacgcatacacctggaccgatgtgccgtatgtaaatgacgacactgtcgttgaatggataaggatgtgttgctgtaaagagaaaacaaatgaagctatgaggtttagagacacctttgtctatatgctactctcaaacctgagatgtataagtaataaactcatatatgattatgtgtttctcgttttgctttactaaatgctcaatttctccaagctgaatgatatttcaatagaaacgctttggttttatagaaggttttgctaaagtaacgctcagaattgtctatatggtcacagtgggaatttactaatagtcttcttttgagagaaaagtggaagtggctaatctcaagtaagtataagcaatgagtcttacctggtcgagggaagccttgtgggtaatcttcaatagcaagaagcccatcgccgaatttgcacgctacatcgcagggttcttctgtggccattacttccattgcttctgtgacctcaaagtatagtggactgaaagcattggcaagggttgaaactaccggtccacctgcacgattgcatttcttcagatttttgagattaaactctcagaaagtgcgaatggaaactatatcacttgtttattttgaaagaaacattaattggataaggactcaccacaaactcgcccatagatttggccgttgttggagcgaaacaaagcctaccaagtgacacattaaactatgtcaagaaagatagcacaggatagattgaaatagggatggatgtaatatcagtccgact

SEQ ID NO: 63408 - DNA, 1163 bp, Arabidopsis thaliana landsberg
cggatctcttatagactttctctctcagggtttataatgggcctcaattgtctttcctcgataagcagccttctgcgagttctagactgaactttcgggttcccttgtctagagggggaatatggtattttgtacaatttacatagtgacctgaaaaaatttgtagagtaaattccaacacatactcaaacttgatatttagtgttatttcaatatcgtaattaatgggctgatgagtcagctaacacgtgtttaatgacgtagagttggtttgtaggtgtaagtaacagtttttaactaaacacataaatcttaactaaaactttggcacatatcaatcttagtaagatgagaagcttgataggagttcaagacatgactaaggccaagttatagcttacgaggcaaaatgttggataagattcaaatattgcttgcaacctaagatttctctaacaagattggttaggataagaatataagataggttttatgcatgtaatagaattaagagttatctagttctaatagaaatatgaatagcaaagatgtacaactactatatatatcagtgttgacttgtgaagttgagaataagagcttttggtgttttgtttttgagctagttttctaaacataagttagtacgtttgatatatttcttttgaattggtaccagtgcctaggtcgaaaaaggttggcatagggaggtgcgcttgggttgcatgtgcggtgtgggaggtgccctcaatgtaacatgaaaaagaaatataattccggtttgggaaatataattccacctaaaaccagattggtgcgcttggtttatacagaaatatatagagatgttatatcgttatttgttatatcaattcacataattccgtctcaaaacccttacaacattataatattttgtttcagcaaatcggagataggtttttttcataatggtacaaattataacagttgtataagaaactattacaacacactcttctattatttccctagtgatttgattacaactagaaagttttactataaaaaaaaaatcgtccaagttagaaataagcaaaagaataataaatttggttcttagcgacggcagaagaaatggaacggagttggtggcttagagtaatgcattgaaagaactttca

SEQ ID NO: 63409 - DNA, 274 bp, Arabidopsis thaliana landsberg
  unsure (1)..(274): unsure at all n locations
tggttagtatcattaggaggttgacgatgctatgatcattctaacatgaatttttaggtctgtgaatttttttgtggcgcatttaatacaaggtgaagtcgtgaaccccaatggagtgtatgtgatactatctactaatataacaccgatttatggctctggaccattgagtatcattcgaggtagtgaacattctttgttnnnnnnnnnnnnnnnnnnagcctttgtgcgagcgtagttgcattaggagcctagatcttgtgactctatattg

SEQ ID NO: 63410 - DNA, 240 bp, Arabidopsis thaliana landsberg
caagaacaggaagaccaaaactcagaaccgaatatggaaaccggacgagacaacgccgggaagggacaatgccggacgggcaactagcggtaccagaactcaaacacaaacagagaaatcgcgaagaacttcacaactatcatcaccagaagaaatacacagagaccataaatgaaaaacacacagaatagacataccaaagagaatatgcaagctggagaaatgaacccacaacccaaa

SEQ ID NO: 63411 - DNA, 569 bp, Arabidopsis thaliana landsberg
gatttgctgtttgattgacagaactttttttgttaaagggtttttgatatgacaagaacttacgtttatgtaactataactaatgatagagaaatcatacgactagtacacatatattgaatcattaattgatgtgttataggaccaagtcgagtttttgttttgtattatcttctctcggttgtctacgagaacgaaattaaaagggtccacgtacctacaaattagattatctcgagtcttgataccaaaacaagaaagaaagaaaaactgtcctacaaatattaaatttatggaaaataatcattttgttggcccaaaataattgttaaattaaatgaatgtagttcataattgttaagaatttaagatccaattaatattggacagcttataactaatcactctatgcacctcctaaactaattccaaattaaattaaaaccaacatgaccatacatgtttgcaatctttggtatggatggtcttttgagcaaaatctcgttttggtaaggacatactacaaaaattaaatttaaaaatggtgactgaatgttgaaaatggaaag

SEQ ID NO: 63412 - DNA, 1481 bp, Arabidopsis thaliana landsberg
gatttatgtataacgacaatttttagagattgtaaggggaggctacgcattagctaatgggcagatcgagaaacattaatactagtgtacactttttcacattcagttatacagatataaacaaaattgaatgtaaacctgactaccaaaaagtttgaaaacacgaacgtatctaccaaacctaactatcgagtttgagaacaaaaaaatgttacagatctaccaaatctaacaatcaagtttgagaacaaaaaatgatatgtgtctaccaaacctgagccaaatatctacacacttagaggccaacaaacattcatcaatttgtttactctaaagtagatagcacttggaacatggcaatgcatatgactttttcgtctatgagacgaagagctcgcaatttaagggaaactatgcatttaaaccgtgaatttgtctcataagacaagaaacatccacataatcattgactctataactagatagtagtacttaatacatggcaatcattgatgagccaagaaaatcaaattcatcatgattgaacacacatcataagcattcccaaatctcaaatttacctcttgtatcaatatctcattatgctatggctctcaaatagaggaaaacgaacaaaacacagcacaagattaaaactcacaaaaaatcaatgccctaaattcacaattgaaacttggtaacatccattgaaagtttcactgtaaactagatagcacttgggacatagcaacgcatacggctttctcatcgacgaaactgtggcgaagatctagatactcaagagaacgtatgcattcagctatattgtccctgtatatgactcataaacttctgtaactagatacataacaatcatcaatgacccaaaaaccaaattcatcactattaaacacacatcataaacattccccaatctcaattttaccaaagtctaactcaaaatctcaatttgaacacactatatatctcctcctcctatagctatcaaatagaggcataggaacaaaacgcagcacaagatcaaaattcaaaactcaacccaaaaacctaaaataaaaattgaaacttgattccacccaaaaaacccagagaaacaacaataaaggcggtgaaattgaaaccgttcccagaagttttaccggcgtaattgagagtgtacgacaagccgttgcagccacgagccttaacgcctaatcggagaaaaggtttttgacgctgttgcaagagatggtgaaccctagaagcagcttcgtccgttaaggttaatacttgcttccttaacgccggtccaaccctcgccgctgcagccgccaaaacttgagaagctttcatcgatcgaatccgaatccttggagaattacagatttaggggcataatttatcagacttaatcagaagctagaagacgacgacgtctccttttttttttctaaaccgaagttggaaaatgaacaagtctg

SEQ ID NO: 63413 - DNA, 599 bp, Arabidopsis thaliana landsberg
taggctatggataagtcaactctggtaacagaaacaaaagtgcttaaaaagaaagtaagcaaaacctttgatatggtgggtgagtccaaagcaattgttcagatccaggaaatgattgagcgggtggcgccaacagatgcccgtgtattaattaccggaggcaatggaagtgggaaggagctggtggcacgctggctgcatgaaaaaagccatcgtgcaggagcaccgcttattgaagtgaattgtgcggcaatacctggagaacttattgaaagtgagttgtttggacatgaaaaaggcgcatttacatctgctgtaaaccagcgcaaaggcaaatttgagcaggccgaaggtggtacattgtttttggatgaaataggggatatgagcctgtctgcccaggcaaaagttttacgtgccttacaggaaaataaaatctcacgcgtgggaggggaaaaggaaattaaagtgaatgtacgtgttgtagctgctaccaataaagatttacaaaaggagatagccaatggttatttccgggaggatttgtaccaccgtttaagtgttatccttattcacgttccgtctttaaatgaaagaaa

SEQ ID NO: 63414 - DNA, 237 bp, Arabidopsis thaliana landsberg
  unsure (1)..(237): unsure at all n locations
nnnnnnnnnnnnnnnnnnnnnnnnnnnnnnnnnnnnnnnnnnnnnnnnnnnnnnnnnnnnnnnnnnnnnnnnnnnnnnnnnnnnnnnnnnnnnnnnnnnnnnnnnnnnnnnnnnnnnnnntattttaaatagatttctcctcgtcaaatattatacattatgtgtatacacttaataatgttgtatggaaacaattataacttgtactgtttgttttaattgaaaatggttaatcat

SEQ ID NO: 63415 - DNA, 248 bp, Arabidopsis thaliana landsberg
agggatagaacaccgtcaaagagaagacccaaacagtgatcctagggcgtcaagaaactgtgtgagagggaaaattcatacagaagagatgtcgggaaagaccaaaaggaactcggaccaacacgctacccaacagggacacgaaaatgacaaggacgggatgtgagctaaagaaaaaagaaacgacaaacgaaagcagtaccccagacactgaactgcacacccctgcgccagacgacgtggggagc

SEQ ID NO: 63416 - DNA, 102 bp, Arabidopsis thaliana landsberg
  unsure (1)..(102): unsure at all n locations
agacacactcaaaagaaagtntcaacaaaaaaccctcatagtgcacaaagaccatttttgatttgagctcaccaatcaccggagacatgaagaagaagcaaa

SEQ ID NO: 63417 - DNA, 494 bp, Arabidopsis thaliana landsberg
  unsure (1)..(494): unsure at all n locations
tnnnnnnnnnnnnnnnnnnnnnnnnnnnnnnnnnnnnnnnnnnnnnnnnnnnnnnnnnnnnnnnnnnnnnnnnnnnnnnnnnatcactgcaacgatattgaatgtgctttcatagagctcggaggtcgaactaggcgataactctagtgtgtgcgctgttttgtcggtcttacggccgactgaaatggtcctggagttgtcgctctcgacacagcccattacttggtgacaaagcattcgcagagagttaggctaacactctctgttgctgttacggccagagtttacatatctcagagtttacattacttatagcacatataatagagaaaaactaatgaattataggacaaagagagagctcgtgaaaatgcgactgttctctttgaagtctaaattagaactgagggttcgggtccttaattcaatttattagaaatgattaatataatctacccccacttatcactcagtggtacgaagtggggagtgta

SEQ ID NO: 63418 - DNA, 127 bp, Arabidopsis thaliana landsberg
tcctctcgtgctatctactcttttggtttgcttgctttcttaaactctggtcgttgaatgtcttgaaattccactttagatactactgatagtgtgattgtttctgctgcgtttgtttacatttttt

SEQ ID NO: 63419 - DNA, 620 bp, Arabidopsis thaliana landsberg
ggttggatctcaccctcttaaaacttatcattgctcatgttgtgaatatgcattgcttttcctcttttttttccccctgagaatctcagctttatagtaaaactagtagcatttcctcatttttcaaggattttccagacgtacacatatcttccaagaagatgaaactcacgattagcattaatgattacatatatattgaaaaacagatgatatctctaattaacagaattaataagactaacagtagattataactttcgttgtcaaatatttttgaaactgaaattcataaaggttcagaaattagatgggagaatgcctatgctcgattttatatattctcaagaatacctacttcagaaagggaaaatatacctatgcttttttgcatgccgttaatttactaaagtgttgcgaataattagctttttcgtatgtataaatagtttaatatcttaaaatgttaaaatttttatatttgttacttacaattgatgcgttagatcgatgtaacctagcccacgtcaaaaagggagatataatctataacctataagttcctatagctggatttcatgtcgactaggttgcaataagttttcacgtcttggatactt

SEQ ID NO: 63420 - DNA, 237 bp, Arabidopsis thaliana landsberg
aaaaaaccgaaccaacaagaagagacagagaccagacatcaacgaaagaaaaaacaacctagcaaaatttagaaaaaggaaactgatatagacctagcggggacgggcaaagaaggcaacgatcaaagagaaccaagaaccagagaccaaaaaaaaacacaaaacagaaaagaacaaaaaaaaaactataaaacaaaaaacatatgaaaaatccatacaaaaaaccaaaacaaaact

SEQ ID NO: 63421 - DNA, 603 bp, Arabidopsis thaliana landsberg
  unsure (1)..(603): unsure at all n locations
taaccacgctcgcctccgcaagcctgatcaacaccaacaccggggtcgaaaccaaggtcaccggcagcctcgacatcttcgcagcgtcccgcaccacgggactggagttccgcctcagcaagcccggcggctccgcggtcaccggcccgttcatcctctactcgtgtcgcgccgagaacctggatgcgaaggcagggatcagcttcactaccctctacggcatcggcggccagtcgctctatgacatggcctatcagttgctcaacgtcagcccgacgttcctggccaaccacgtcatcgaagtccttcggctccaggtcaattcaggccttgagcctgccgcgacgttcgcgtggtggtcggcggcgaacgatcgcaacgaaacggccgcgccctcgctcggcccgaacccggccagccctgggaatagcagcgccgcctacgtcgacaacctgaccgccatggtcagcctcatcgaggacctgtggacggcgcaaggttggaaactgagcnnnnnnnnnnnnnnnnnnnnnnnnnnnnncccgatctcggaccccgatgatgcgcagntcgtcgactatcggaccgcggccagagcctatg

SEQ ID NO: 63422 - DNA, 1309 bp, Arabidopsis thaliana landsberg
tgttggtaattgtaaatttagattctattctccggtttaaaagtgaattatatgtatcatggttaaaacattgtaagtaagatgataataaaatgataaatttagttgatggataacgtgaagcaaaaaatgagatagatacatttgattttgtcgtattttgacatatgcggatagtgagctactcgcatgaagatcaagagacacttgctcgagctcacagagtgacgtgtaaaaagcttagactgaagtccccatgcaaacctaatcctacgtggctcaaaccacgagctcacttgacaatatataaactcctcctaagtcccgttctcttcatccatctctcacaacaaacaaaaagaaaatggttaagctcagcaatctcctcgttgcaaccttcggggttctcctcgtccttaacggctgccttgcgaggcagtcacttggggttcctcctcagctacagaacgagtgtaacctcgacaacctagatgttctccaagccaccgaaactatcaagagtgaagccggtcagatcgagtactgggaccacaaccaccctcagctccgatgtgttggtgtttccgttgctcgttatgtaattgaacaaggcggtctttacttgcccaccttcttcacttccccaaaaatttcctacgtcgttcaaggttcatacatgataattacccttccaataaaattaatgtatatatcatgtctaattaatgaagatataatcgattcaccatatgataactcttttttttcctctctacctaaaattaatttacaggaacgggtatcagcggaagagtggtccctggatgtgccgagaccttcatggactcgcagccgatgcaaggacaacaacaaggccaaccatggcaaggacgacagggacaacaaggccaaccatgggaaggacagggacaacagggacaacaaggaagacaaggccaaccatgggaaggacagggacaacagggacaacaaggacgacagggacaacaaggccaaccatgggaaggacagggacagcagggacaacaagggttccgtgacatgcaccagaaggtggaacatgtgagacgcggagacgtctttgccaacactccaggctctgcccactggatctacaactcaggagaacagccacttgtcatcatcgctcttctcgacatcgccaactaccaaaaccaactcgaccgcaaccctagagtaatctcatactatatacaaagacgcacatccgctattagaagatctaccatatcagtttaactaattcatttatgtattgcatttgttg

SEQ ID NO: 63423 - DNA, 1637 bp, Arabidopsis thaliana landsberg
cctttacactcctccaggttacttcacaagttgtgttgtatcactaaacctcacagagaaaatcttgcttgatttttttttctctatgctttctaattttttatttttctgtttcacttaaaaaattgttgggttgtgtctacaaggatctttttctttgtactttgcatacaaatgtaacaacctagtacgatgtgttcagtttcttcgccagtggcttgggaccatataatatcatttatgtaaacccttttgagggcgaagtttttggcattgctttcttctcttttggtttttagtgtttctttgaatctttagtcggttactttataagcttctgacacagtcagttgtttaaggcttcctcttggaataaataatactactaagacacttggtctctaaattttcgactatcagaattcttggttggatacatttttggcccctgagagtaagtggcccatttatggcagtggaggacctccttggctccttctccagtccagctcttgtatccatccattataaggctttggaaagaaagaagcaactgggtttggtctgcaacacatacttgatgattctcttggataaggaaccgatctcatgaactatattctataatactatatagttattcttgttatatttatagaaacaaaaagttactatatatgtagtccagtagtaattatgcttttgaaaaagttttgttagcctttctggtggcgaaatcttttttaattggtcattacgtaaaattggtgtgtcttattattcacgtctccctctaaaagatgcgttctctctttctttgttcctatttcaattacagtcacaccgcattataaaatatatttttttaaaaaatacttttattcccatagaactataaacaaaattatctcttaaacgtcggcttaattcaaaaatctgatactaagacaattttccgatgtggaccaaaatatatacaagtagaccggttgtagtaaatatattcacgtgatcttacagccaatttaatacatatggaccatctagttttccactaatcaaacataaacctacactaattaatttggggaatacttaattctttatgttgtcaataatttcaaaacaacaataaaaggaaattaaatggagtcaagacagatcgtcgacttggaaaaacaaaggtgggtcccatctaattcactgtcctgatttttcctcttctttccttgttcgtctccccccaatctcctcctcctctttttttgttctgaagagactctcgccgtccaatgggaagctgttggtctgatggctcttacgctggtggaggaatggtcggtgttggtggtggggctaattcctccgccgccactcctaacgacgccgttgactactatctcaagtctcgtggctacaatggcctcttttctcagatcgaggtctgtttcttcccttttcccttcttcaagacttgaaatttttagtttcactcatcttttttttctttgttcgcagttatctttctctgcttccaatttgcgagaccgggacgtgatttcaaaggttcgtttttttttttccagaaaactgatattcctggagccaattaagtgttataggtttgattcaaggat

SEQ ID NO: 63424 - DNA, 279 bp, Arabidopsis thaliana landsberg
accgttacggaaatgactttctaaggcattttcggtgtgactttcaaacgtatgtattgtaaataaaaaggacatgtacgtattttcaaacactataaatcatttgtaaatgtatgctttgcaagttttgggcggaacacctacataaaagttaatttttcattttcaaagccaaacacctatctttttagcttgtaggtgtatccttaatatgggtaggactttgttttacccgtgactttgctttttgctccatatctcaacacaattgcatctatt

SEQ ID NO: 63425 - DNA, 575 bp, Arabidopsis thaliana landsberg
aaccattgaaaccgatgtttggttctgcagtgactctaagccatcaaagaagctcttgccattgctaaggcaccttcataggtttggtttgcaccaatgaaaccactcatatgcacaaaaacacagcgtggaattgagctttcctctgagagcttctccttttataaacctctccatgctaatggcaaagctttacggctctcaaacctctctggtgaaaccgaaactgcttgtattctccagttttcgcttctatcatcctgcaccaaccaccacatacacacactcattgggttaaaaaaaaataaagggtacgacaacatagtaaaattggtgcataaacctggttgtacctggtaaaagaacatattttatgggaggatcaatcttaatttcttcttgagctcgatatatggagtttcactgtcaatgcacataaatcttacaactttgagactaatccaccatttatcaattctaatccctctagcaaattataaccccaaacacgacgtagatgatatatgttaaggagctcattttaactactgggcattgttactgagctcataatt

SEQ ID NO: 63426 - DNA, 608 bp, Arabidopsis thaliana landsberg
  unsure (1)..(608): unsure at all n locations
cgaaaaaataagtaatatatcttatgatataatgtttgatgtttcaagcttagtaattaatgattgtgtcatttttatttataactatgtgataggagtatgtaaactttttttttttaggtaggagtatgtaagatcaatatatgtttatttttatttttatctcagctttgaattatctaagcttcatatatcattgtgcgtataaaaaaaattgatcatgtcaaattatttttcttttaatttcgcaacatttattggtttgtcaaacattcatcgtaattgagtagcttttctttattttagttttcttaaagacatcattcattattgttgtgtgatatatttttcaattgatttttttgtcggaaatttaattgattaaaaaactatgcaagattgaaagtaagagatatattgttggacgtaaaaaaagaagacatgttgttggtttaatgtgtatataaacattttataagtagtggcaaagaacatatttcaacagctaaatatgattgagatgtaaaagcactagcggtgaatgatataagaggacagttggatcggtggttgcatgtaatacattntttaaaagaatttgtagaata

SEQ ID NO: 63427 - DNA, 149 bp, Arabidopsis thaliana landsberg
  unsure (1)..(149): unsure at all n locations
aaacccctcaaatccttacatacaaaggttcaagtaaaatacgatataactantatgattggctaggcgtgaacatgacatgattagtattgtttggcaggttaactctacaataccacaagaacatctggcatattaatcgggccatt

SEQ ID NO: 63428 - DNA, 723 bp, Arabidopsis thaliana landsberg
gtaattacaggaaacgcacacaataacagttacatcttgtaaatatccgactcatacctttgtattgatcctcgtctcttgttttcttttttttttctttctttctttctattcttagcaaaatagatttcattcttgttttttcaccaccacccacaaagtttgattctgtttttctgtttttggtatatatagagggtttggtttgtttgtttttccatttttttcgtaatttattaaccgccaattcatgcgcggcaataaattgtgttattagacctttgaatccattgtgttgaaaagttaccaacaaactaaaacatagcatcctgatagaattattgccaaaaggtttctttaaaggttagagaggcctgcgtttcgagaccggctaatttctaacaaatctggccccaaaaatatttatctttttgcacccgaaaacactttatgttagacgacaggagcctctgtagtataccacctaaggctttcttgacacgtcgtgtaatgggctgacttcagcaacacaccttcctatatagagtacttaaaaatgtggacaaaagaaaaagtgtaacaagattaggatttttttagatgcttcatgtttcaaactcttttcattaaacaaaatcttttttattggctggttaaaccaaggaaaaagtgtaacgcactcttgaagaacaagaacatcccaactggctaatttgctcttgc

SEQ ID NO: 63429 - DNA, 723 bp, Arabidopsis thaliana landsberg
tattttaatcgcacaatcccaaatttaccttttcactttgcttatatgttctttcatacttcatgtgttattcatatttcttcgaggttggaccacttgtggtactttaagattataaaactctttaatcatactttcgttgctccatgtacatgcagtgattaagctgaagtgtaagctcgatgataacttgtcttctataaccagccaacctagctaatagaaaaacagtgattctctcgattaatcccacttagctcaaacaaacaaaattatctttcttcttaaaaacataatacgatattgtgcggatccccaagcattctcttatgtttctttttgaacaagtcatccaccatttaccccgccatgatgaagaaagtctagctcccagtgacaataacttccataacacgctccatgcgggctgacttcaacagtcatttgttctcgaggaagatctcatttcttgtatatcaccaaactacgcccatgacttcttgtgtggagaaaagagcctcaaacactatcatatcctagcatatttaaaatcttatcattgtcgtgttaatgtgttttaactctccactatcaaatcttgacaactagaagatgcatgtaaactttaaacccatataggattcttaaagactcatctcttgcatatatacattttaaagtctcaaaactaatatgcgtaagaatggctaacacctctcacaa

SEQ ID NO: 63430 - DNA, 371 bp, Arabidopsis thaliana landsberg
  unsure (1)..(371): unsure at all n locations
gnnnnnnnnnnnnnnnnnnnnnnnnnnnnnnnnnnnnnnnnnnnnnnnnnnnnnnnnnnnnnnnnnnnnnnnnnnnnnnnnnnnnnnnnnnnnnnnnnnnnnnnnnnnnnntctttaccttaaccgaaaggaggggggtgccaaaggcagggctagagactggagtgaattcgttacaaggaagccgcactggaacgagcgattacatcaccttctttacagggaaagctaatgcttcttgggtatttaggcttgacacaaatttacacccaacaagaaggtnnnnnnnnnnnnnnnnnnnnnnnnnnnnntagccttgcttaagtaatcgactgtgaaataaaaccaaacccatgagtttattatactat

SEQ ID NO: 63431 - DNA, 704 bp, Arabidopsis thaliana landsberg
accgtgatttccctggagtttgcatctacaattagtatttttctttctgttgattcatgtctttgtacagatgacatgtgatttcttttacgttatcacctttgatataaaaatataagcctaacaggctaacacctgtttaataattttacaatacttaatataatcttaaactaaaggtaaatactagggtaaacatagtgtatttgtatataaaatatacaaatattgttaactgaatactccctccaaaatttggttatgtaacaaataaagccaacttgaaacagactccatattccagacactaaaaggtcaacaaaattttggtaaaaggaacattgaaccatttgtacattggaagcaaacaaaaaaatactaagaaatattgaaaaagttggttggtggtggaaaatccgatctcagactgctgcaacttccttatggcctcggaatttaaggttttcagatgcattttttaacaattaaagagaccataaaaggtgagtgccatttaatttttgaattaaaaacccttaccgatctcgcctttaaatgcattcaaatcccaagaccagtctcgctaccattaataaatatatgtccaatttaattcatactattactatatgtgtctccctgtatacatttaaggctttaccgtctagttaggagtaactcgcatatattgatttctgctagaa

SEQ ID NO: 63432 - DNA, 644 bp, Arabidopsis thaliana landsberg
catgattttaattcacaatattctaccgcattgaaaaaatttttttttgatatctcaggattcagtataaaaactttgactttttcttagattgttctctgataaattaatagcatatgagttacatgcacgagtttctttacgtagttatatttatacctaaatagatgctaaacaaaagtagacattcatataccaaatatatcataccttgaatccaactatattgtacaaacataaatactagtcagctttcatctctcatacactcaaaatcaccatcgcatttgaataacacaatgccattataatactctatgaataagatcattttggtgaagtaaaactaatcgtcgacagactcgaatctgcttatgaaatgaattaaactctgacaaaaagaaagaacaatcttatttctctattcgcaaccgcacaaatgttggcgctgctgtggaaataattaccaaggatcatcaccacctgattcttgattgattgctcaagtttttgatggacatatgaaagtctgtcactgtggttgaagtaagcgagttccacatatgcacatttacccttactttacaatgaaatctattttttttcaccaaacaacattttgaacaatgggagtggacaatata

SEQ ID NO: 63433 - DNA, 1190 bp, Arabidopsis thaliana landsberg
  unsure (1)..(1190): unsure at all n locations
gttgtgtattttaatgaaatactgatttttagctcgtctctttcagatcatcttcaacatttacgtgatgtgttgacagttttaagacgggaacaattatttagagcaattaagaagtgctcttttggagtttctcaagtattgttccttggctatgtggtgtcacaacaaggtctttcagttgatccagctaaagtcgaagtaataagttcttggtctactccacgaacagtaacagaagttcgaagatttcatggtctcgcatcattttatcgtcgttttgttcaccattttagtagcattatggtgcatataactgaatgcataaaggcaacaccgtttgtgtggaccaaagctacggaagaagcttttcaagtgattaaaacaaagcttacaacaactccggttttaacactccccaactttaatcttgcatttgagttgcattgcgatgcttctaaaacagggattggtgcgattctaagtcaagagggtaaactagtggcattttttagtgaaaagattggaggttcgcgtgagaggtataacacttacgaagtcgagttatacgcggtagtgcaagcaattaaacagtggagacattagttttttcactgagaatttgttttatacacggatcatgatgctcttaaacatatgagctctcaagataacgtatcctcacgacatgctgcttggtattcttatcttcaacaattcacttttgttataaaacataaggcgaaaacacttaattgagtcgctgatgctctcagtcgtcgtcacgccttagtagcttcaatgcatgtgtctatagttggattttcagttcttcccgatctatacccggtggatcctttttttggaaagatatggactgatgcccaacagggagacaatgctgactacgttattgttgacgggtttttattcaaaaattgtcgactgtgcatccccgatcgtagtctatgtttgcaagtgatatgtgagctccattgtgagggacatgttggtagagatcgaacacttcagttagtaatagcttcttatttttggccgactntacgacgtgatgtcgaacattttgttgtgcgatgtgggatttgtcaagcttccaaaggccatgcctncaacgcaggatggtatctatcattaccaattccctctcagccttggaccgacataagtat

SEQ ID NO: 63434 - DNA, 678 bp, Arabidopsis thaliana landsberg
tcaaccccattcggcaaaacttacataacgaaaacttattgcaccatgcttccattttgagaaggagatgatcagcgattaaattgaaatgctgattataaatcactaaagaaattgttcacttaaaatgtttagttttaggctaataaacgatccgggggttgactattaaaattttgtgctgattttcataagacgtttcataattaaaaataaaattgaggttcctgtataggacacacattcattatccgttgaaagtcaacttaacagttgttatcaagccgcgtttttatttaaatataagtcaaaagtcgtcttttcaagcttttttaaagagattggtctttgaaaaaaaatcttgtaagaaagctgtactcattataaattagaatgtgattttagcaattaaggttttgggaaaagaaaagaaaacccgcaatagtcacgtccctactaactttagtaattaaagcaacaaaccaatcaagcaattaacgattagttcaatcttatataggaggccgatggggacagatcaatttcgtacgtggacagctgttcacagagacatctctcgtttagtaaacgatccacttaaaattgttttgtacacatactaaaaaataaaaacgctgatatttttcaacacaatgaccgaaatttttttttaattat

SEQ ID NO: 63435 - DNA, 537 bp, Arabidopsis thaliana landsberg
ggaagaccgaaagatacacatctttcacagtcagctattgatttgcacagcaaaaaaaacgattaagacctgagccatttaacatgggaatcttaaagattgcagcttctttgtgaatcctaaaaaatgcatgaaagcaagaaggaaactcacagcctcgttagcacttttcagaagacggatcactccagcgattagagacacaatgctttcgttagacatcatcactccctttgggtcaccagtggttccactcgtatacataattgtgcaaatgtcgtttttctttttgattgggagaccatatagcttttcttcaccctgggagaaatattcgcaatggaaagtataaacatcgaaagcttagctattagaccactggaaagaaatatcacagaatcagtttatttcatgaccagcaaaagtcaagtctcataccacttttaaaaattcatcccagtgatttataaccaacccaaaagtttagcttcttctttttgtcacgtgagacaccccctaagttacaacagtgaatta

SEQ ID NO: 63436 - DNA, 463 bp, Arabidopsis thaliana landsberg
aaatgcttcgatgtcaatactgggactctgctgattgggtaacatctctgtcattaggtacataagtctgatatgagaggtttcgacataacttgacttctaaggtaagtcttctcacctgtggcgtttatggcatcatcaatccatggacgttgaataaaagagggttgcatgtgtttatgccaagcctccatggatattcacaggatggcaagaaaacactttttgtggcttttcaagaatctgatttctagatatatgctttgctaaactgtcttcttactgcgctttcagtgcgtgtgaccatattcatcttgtgaaggctgccactgctcgagcattcatcccctaggagttgcgactaattgaagctctggggtgtaaaagcatctactgatgcttgttgctattgatagtcttcttcaaactgactaaccactgctgagtggtgtgggattgtcaa

SEQ ID NO: 63437 - DNA, 382 bp, Arabidopsis thaliana landsberg
  unsure (1)..(382): unsure at all n locations
gacagtttcttgatatatctctacacctttcaatattttctccaatgacattcatcactggtcatgaggggtcctttgatcaaaacgaccatcattaatgacctcatcagccatgtcaatcttatactgctgaatcttattccttacgagaccctctatatatcctatatatcagaccttcccaggcatgtcatcctataggcctactgcaccaccacttctaagctcgtcctccttttgatggctggagagtttttcaacaactgtcttcatataaaacacnnnnnnnnnnnnnnnnnnnnnnnnnnnnnnnnnnnnnnnnnnnnnnnnnnnnnnattcttgggatttggatcaagaacatatataacaactgcgtcagca

SEQ ID NO: 63438 - DNA, 2089 bp, Arabidopsis thaliana landsberg
gagtctaccgacgcacagtgtgaacgtgttagctccaccgctatgaaaatcctgaaattcattgccttcttctcaggctttattttgccattggctttttggcagttagtattatgaatttatgatccagtctaatttaagaacatatgggtcagttttctgcgagcagatctaacttatcaaattctctcaagaatcaataataaaatgttaatccaacaaatctacaaaaatttgcaagtgtttaaaaatataaaacatctaaccagacttcaatcctcgacctatctactatgtcaaatagacatgatacaaaaatagaaagtccccgttgatgactgcttctgacaccaccaatgcttccattgccgctcacgctatcggcattaccaccgctactgctaccaacgtgtcataccagctgctactatcaccgtttccacttgcatgaattttcttgtgatggccgtaatagtggtggcagcaacggttaaaaggatggcttaacatgttcgtagcagaagcggtggtgattttggctgtcgctgaaaaaaatgatagcacaactggtaacatatgttgtatttattgaggtagaagtacgaacctttatcctcacaatcagaaagttaagactaagcgttgttttacatttagccttaaacaattgaacgaaatagacatttttggcaacatggaacgatacagtttctggtaaattacatttatgcttataatctacgtttacttatggttataatctacttttaattcatgtagaaagcactagttactgaaatcactttctactttctaaaatattctattagatcggttcactattaataatatacggtttaaccagtttgggctcttcgttgctatttatttcccgaacatacgattttaaaaaaatatacttattgccttaatatccactaaacatctgattctgatctataagttttcaatcttccattttcattaggctcatgttttattttcagctcaacgcttttcattcaagatcattttaaccaaaaaacaaaacgaaaaaaaaaaacgtaaaacgagtatatgtttactaaatggtgaatcttcgacacactgtgcctttcaaagagagaatgcaaaagaaaaacctaacctgcagacttcagagaaccaatcataagcttctaagcctcacttagttcccaatcactttggaactctcctccggttccacaaaatttcccaataccctgaaacaagcacccaacaaacttgagattgtcgctagtcaattgtagcttaagacagtcgaggccagtttttaaactttgaagtaacatctcaattctcagatgagcacgggtctcgaattcacacttcgtctttagaaataaatagtcaaagactagtctttaccttgagattacgccaaaactttgtccaaccaagacactcatctccaccaatccaagtccaaacgtgtaaacctagcaagagataatgcactgagtgttttatgtactgggtgtttgatgtcaacatacaaaatcaggaaaccagatatagaaagaccaaagcgatctacagacaacataaagacaaggccgatcaagaaactaaatcattcatacagaaaattacagttgatatcataaattcacaatgctggttaaaaggacatgagatttatgggagctggaaaccttatagattgaactagcagccatagacaagtttggtttaaaagactaaaagatgtttatttcaagacacaaagaggaaccaatatccaattcctcgagtcctcctcagcaaactctggataagcagtgcgcaaaataccgattaggatattcttgtaaaactggctcaatggagtggcaattgcttagaaatgcatccgtcattgttcatgttaaggctttcaagctagccaacataggttatgcacagaagagccattttgtcagaaccatcaatgaagaaacttaagtcaatgagaagaatggcatcataaatgaaacaacacaatgagctctcatacagtaatctaaaaaaagagaaactgaagagtcaacagtccccaccaaattac

SEQ ID NO: 63439 - DNA, 676 bp, Arabidopsis thaliana landsberg
ggtaaataatgaaaaataaaatctaccaaaatttcaattattattatcttccaaaaaaacaaaattatacagatgtatgatggtgatatggaacttcgattggctaatattcactgtgtctctaaaaaccatccacttatcaagataagatggaccctacactcatccaatctaaaccagtatctcaagattcttatctaattacatcattctctaccgttagatgaaattgaccattaaccctaccataactccatacaccgcgagatactggattaaccaaatcgagatcatcgtagccgtccgatcaacaagtaccatctcttgaaatactcgaaatcctcataagtccgtccctctttgctctcactatcaaaactctgaatttcgatttcaatggagtcacgcgtgctgttacgcgccaccgcgaatgtcgttggaattccgaaattgagacgaccaatcggagcgatccaccgtcaattcagcactgcatcgtcttcctcgttctcggttaaaccaatcggaggaatcggagagggagcgaatctgatctccggtcgtcagcttcgtccaattcttcttctcgattcgtcggcgatcaacggaggagagaaaagagagattctcaaacccgttaaagcccgcgctgctgaaggtggagataccgctgggt

SEQ ID NO: 63440 - DNA, 668 bp, Arabidopsis thaliana landsberg
gactgaatatagaaccatgaagaaagagctacaagctctcaactctttcgctccatcattagatcaacacactagtcccactagagatttcttcatcttcttcgataaactcgagtgattcaccataatactcatgagcatcttgcctaacaatagctgataaacccatttcaccatttgattcaagacctaagactaaaaccctaaaggaggctctatcaggctcatagccaatagattgcataaaggcatagcaatccatgacaagatcaaaaagcttatgattcaagagaatcgtcaagagagtgttgaaccattcaatctcagccattaaacccttttctgatttcatagctgagtaaagataattgacctcttccatcaaactattatccgccattacagtgatcatatctgtgtacattctcacctgaggcttgtaccaatactcctttctaatctcttcaaaaacctaaaaacgattccacagttaagatagaaacacagctaaaacatgatgggtagaaagcgagagatagatagagatagagacgaaccttgagagctagagagcactcgttttggcgtagaagttctctgagaacggcgaccatatcgaatttcaagagcccgacgaatttagaaatgattacacgatcaagcagagc

SEQ ID NO: 63441 - DNA, 582 bp, Arabidopsis thaliana landsberg
  unsure (1)..(582): unsure at all n locations
gggtaggagttgtcgtgttgaggtacttgttgcccttggggatgacgctgggcggtatggggggacccaacgtggagcgggtggtttggttgtacgcgcaaacgtcgctgagggtgaagtactggctggtgcggacgtcgtagcgtttgttgtcaggaaagtagacattgtcgggaatgggagggacgttcgtgtactcagcctcggctgagaacttgtcgtcatcaaagtcggtgatcttggtgtcccagtagacgcgcgtggtctgatgctcgcctgtagaatctgagtttcgataaagggnnnnnnnnnnnnnnnnnnnnnnnnnnnnnnnnnnnnnttcggacagaacaaagtcgcttgacctgatctgaacccatcnnnnnnnnnnnnnnnnnnnnnnnnnnnnnnnnnnnnnnnnnnnnnnnnnnggttggaatccgtataggttccagtaaaaggggttgacatcggaactgtttcctctgggtgctgcaacgaacagagctggataggtatacttcttctcatcgtcaatcgtgttgcggcagccgttggcttcttgatactcccacgccctgc

SEQ ID NO: 63442 - DNA, 661 bp, Arabidopsis thaliana landsberg
ttttgacattataacccatatgactttatattttaaaaattcggatgcatgtttaattcttgttcttaatcatacccacaaaattatttcaaactttaacctaataaccctaactaagcaagttattttcacaaaatatttttgttgtatgggcgaaattttagaattggtttttattccgtctaagattaaaattacaaaacagagcaaacctcaagaatccaaaaacagagctattgtatgtcacgggctactgaatttggttgtggtgacgaagccaaaattacagtgactggaaaacattagtatgatcaatctgatcaagattataacggtagaatgctcacttagctgattgctaaaatggccgcagtataatctaaccataattcaaacttctcaatattcaaatcactgagactacggacgtccataaaatacagttgaattctgaggatgcacggttatacatcattggaaggaaataaactctagcatggatgaaagctaatcccgtctaatgccttgctatccaagctccactacaaaaaagaattgaaatcgatccatgaggaagggacactgcatttaaggattcccatacgtagttatgccaattcttccagagcttaaatgtaactgatgcaaagcaaaatatata

SEQ ID NO: 63443 - DNA, 398 bp, Arabidopsis thaliana landsberg
gcataccaagaagacccataagaacaatctctctacaaagtgtgagagtttataccagtttcaagttgtactgttgcacattcttaatatattcagtctttctgctctcagccttggcgacgtaaggagctttatcctgtaaattacagattcaaataaccacaaagttttaaatacagatctacaaaaacatttcaatggctactactactattatgacttacttcatcagtcattgacttccatctagctccagcagccttaccaacctgattacacaaaccaatccgataattaaaccaaccaaaactagttttcagattacagatctgagaaaattttccagaaatttcggagaaatatatactcacagtagcgacggatttgttattaggatt

SEQ ID NO: 63444 - DNA, 176 bp, Arabidopsis thaliana landsberg
ggggaaggcagagggcgaaatggagaaggaaggacgagggggaggaacaacgcgcacggggaaaatcagaaacgcccagggacaggcacacggaagaagagaccaggagcaccaacaagcagagggagcacccgggggcaaagggaggggaacaagaagaggaaggggaagaggaa

SEQ ID NO: 63445 - DNA, 1526 bp, Arabidopsis thaliana landsberg
gtacttttctagaataacaataaaaaatgggggcactcattgattattattgtcgataataccaatatatatcaaacgaaattttaaaagtagatgattcatgaaaataatttttgcttattttaattagttcttgagtaaaattatttatacattctagatattaaataatgtcgaatttttaattgaataaacactttattatatataaaaattgaaaaacaaagcaagccgaggaatctctctctaatctatctccaagacggaccaaaccagttttagttctatctctcaatctctctgatcagctccatttccaatgtaagcccaccaacttcaactctaatctccatcttcctcttcctcttaaaattcgtttagatcaacaagttcccatctttccagtgtcaatcgacgattcctttttccgttaatacgcatgtatttgattcttattgctgaggaattgaagaaccattttgatcattgttgtacccattgatttcaaattcaagatataattgactactgtttgttaatcatcattgacgtgataaagttgactcctttttgtgtagtgcaattcaaaggtttttgatttacatcagtaatgaagattcttgttgatggttattttgcagtttgttggaaagtagatacctttgagaatctaaaggatctccctttatggcggataaggacgttccttttggggttgaagatattgttcagacgcctttacctggttatgtagctccaactgcagttagctttagtcctgatgattctttgatcacttatttgtttagccctgaaaagaatttgaaaaggagggtgtatgcttttgatgtcaataaaggggaatctaatttggtttttagtcctcctgatggtggagttgatgagagtaacatttcacctgaagagaagttgaggagggagaggttgcgggagcgtggtttaggtgtaactcggtatgaatgggtcaagactaactcaaagatgagattcattgtggttcctttacctgccggggtatgttctgttttttctttgcttctataatcgacactatgttcttcattaggatcttaaaacctgtggaaattttattgcaattgtgtcactttttagagaacaaagatgaatttgaactgaatctggtaggaactagaatgtgatggaaggagaacttattaggggcatttgaccatgtggtttgttgagagcctataggcttgggagggttaggagatctcttagggtttcgttgatccaaagatattaaagaggacttgtgcttgttcgtcataatccagagtctgaatcttatcagctgaattagtgatctttcttacatgtagcattcttttttaatgtcttgaaataatctaaactctgattgggttacctttttgtatgttttgtgttgtgaccatggctaggtgtatatgaaggacctttcttcatcaccaaatccggagctcatagttccaagttcacccacttcttcaattattgatcct

SEQ ID NO: 63446 - DNA, 496 bp, Arabidopsis thaliana landsberg
  unsure (1)..(496): unsure at all n locations
ccctgtcctggtcaagaatactaccaagtcagcatacaatttaagatctttcttttatagattgtttttgctttttttttttttttaaaccttttctgataagaaatgctttctatctttccatttttcatttaattatcaggtggcaaattaagcgatggggtaaataaagaaggtgttcaattctacaagaatcttatagatgaacttatcaagaatgggcagcatcgatcatatgcttaattagttaattataatgccacctattaaattttacacgtcaactctttgatttaaaattttcaaagagaattcacataattatagataaataaaataaataaactccttgatctaaagngaattggcaaatattgtgtctgaaatgtttctcatcacactatttttaaacatacttgcaggtatcaaaccttgtgaacaatttatcattgggatattcctnnnnnnnnnnnnnnnnnnnnnggtagctttttaa

SEQ ID NO: 63447 - DNA, 534 bp, Arabidopsis thaliana landsberg
  unsure (1)..(534): unsure at all n locations
ccccccccccccccctttctctcctccccccccccccccncccccccccccccttccccccccccccctttccccncccccccctccccnccccttcccctctcccccccccccccncccncccccnccccnnccnnnccctcccccccccccccctctctccctcgcgccttagtaaatatcgcccccccccnccggcggcgccccnccccactgtttaccccaaccccncaaccactcnncccccccctctncccccccccccccccccttctccccccccccccccccccccccccnctctctcccccccccccccccccccccccccccccccccccccttctaccccccccccccctcccccccccccccccccttccccccgccgccctccccccccctccccccccccccccccatttttccccctcgcccgcatccccttctcctcccccttgctcctccccccctttgtcctccccccccctccccaccccctcccctcccccccccccccccccctcccccccc

SEQ ID NO: 63448 - DNA, 197 bp, Arabidopsis thaliana landsberg
caaaagcaatgacttatatgccctctattaggtcccaccaaccaaaatccaagggccttttcgtatttacatggagaggaagtgcaactttcgtcactagatttactgttagattacagatacgggagtgctacattagatttaccgacgatgacgagaatatagctaaaattcagtatatatttaccaggttaaat

SEQ ID NO: 63449 - DNA, 1838 bp, Arabidopsis thaliana landsberg
acggaaagttcaaagtggatgaaaagtggttcactgggattgactatgaaaagttccacgatctggttagttatcccaaaacctaaaatatgatcgtctcaaaataaaaattcatgctaactttaagttaacgaaacttttgaatgaattcgcgtaggttgcttctggagaaccgttcacgagcacagactatatggctcaaacaccatcgtgggcggtttatggagcgcaggaaggtggatttgatccagggcagttgcgttacaagaaggaaaggaatcatcctcctaaaccacaggcggttttagcttaagaaaggagtaggctaagcttttttgtttttcattgtcgtcttcatatcctaaaccacaggcgattttagcttaagacaggaccaagctaaagctattttgttagcctttaaagcttcttcttcttggtctaaagcttttttgttttttgttgtcatctaacagtgttaacttgtggaaagatgttaaagtttcgaaatcatatcaaaactttagacagtttcaatcctttgataggtttcgatgttttgggaatgtttttgaagatgagttcgcacgtgaaggccttgcagggccaacaatgtcttgtattaaaatagtatatcaacgtggactcgtcgagtctctttctctcactgctccaagattaattagttgtacaactttaatcgacaattacagctatttggttaaaagattttaataatagacaggtttcttctttcaccagcaatatccattagtttcttaacttatccgttccaccatgtgcgatggtaccttttatcatttatcgtataaaaattcgaaagggacgtaaccatccatcaactacgcacccaataaattaaacaacctactacaactaaaacaataaccctaaacagctttctcatgaaacaattcatttaatttagtcttcaccatcatatatgttttaaagttattttgatgcaccaaaataacactaagatcaacaagatttgtttcttgttttgaactaacaaatccaaaaatcaattgtttttttttcttcccatgagagtttcaattaatttataatccaacaatagttaaatccaaaaacacacacaaaaacaaaaactccattaattaatgatacggtaattaaagtttaccagctcttcaccggcgtgcttttcctcctcgaccgtctagacgacggcggtggaaccactaccttgaccgtcatctccggcttctcctcctcctctaactcttcatgtttcatcttttgctcctcttccatactaccactactgctcctaactttcttcttcagcttctctctgttaataaccacctcagcttcttcgtcttcttcttcttcgtcctcgtactcttcgtaatcctcgtcttcctcagattcttccttcttgaaatcttctgggttctcaagattcttccttggccttcctcttcgtctccttgtagcctgagactccgtcggagatgaagcttctgctaccgtcgccgtcactgacgacgtttcctttgctttctgaaaccttctcttccccatcagtttactttattcaacagaataatatttttcttgaacagcttgtctgatttttaatatcttcaagagcaataaaattcttttatgttttacagacagaaacaaaaacaacagtctttaaaaaccaaaagccgcccatttctttggtgtttagataaaatatcagaagaaaaagtagattccatccctgtccgttggttatctcttctctataaaccgacaatataatcaagtatacatatatatcctggagtagggtttgt

SEQ ID NO: 63450 - DNA, 380 bp, Arabidopsis thaliana landsberg
tggccctcccctccttttctacgtccctttcccaattcttattttaattctttgtttttttctacttggatgcgttgagccaaaaatgttgcaatgaattaattctacttggcccgattttggaaagctctgtaactttgtggactgactttgatttggttttgatttcagagagtgcggatcaatccattgttatttacgttaaatgcaaagaaaaataatgggttttacgtgtttggatttttttttgggttagccaaaatcgaaccgaatgacttgacttaaactccatcaactcttatccatctattgtttagtcatgttcaatattgagaaaaattaaaggaaattaacatgtagccttgaaactttcaataaag

SEQ ID NO: 63451 - DNA, 570 bp, Arabidopsis thaliana landsberg
gtaatcccatgtcagttacactcataagtttgcaaaaaagaatcacagatgggggattaggaattgtggaggatacatatgaacgtgcctaacgttgtatacagaacgcgatataaaatacgcaattgatcataggctgctataaattggagacttaaattgtgctccatacattcaaagcttaaaatcatgagaaaagagaaaattaacccatcaattaattatgatcaccatgttccgagataatgatagagaccacactcgtacacccactatgtttctattaaatgacctgtcttgaactatccctacgtctaccgaatgagcatatatagacatgttattctagtttaccaatgctaagggcaatataaacctaccttttttcccttcgatataaaggtcgagtccctctataacgaacttatccatcgaggaaaccttgtataagaggtgacacaagtgtgctgggacgataaatctatcttgaaagagcgtatgggataatgagattgactcgtctatttgatgttcgacgaatactaaacctatgtgtgagcaaaatggttt

SEQ ID NO: 63452 - DNA, 544 bp, Arabidopsis thaliana landsberg
  unsure (1)..(544): unsure at all n locations
aaattcttttaagtccttacaaaaacaagggcatctccttttagaagatgggggcgccgtcagtaattttgccatacggctctttaagataatccccgaagcaggcatggtcgaaattggcctttgccgtcatgccctcctggattttgataaaggtgtcaaattcgcaccagccgtccttgcggctggcatcgcactcagggaaactcaggcccagcgggatggttcgctggttgagcacgaagtggacgtacttctgctcttcnnnnnnnnnnnnnnnnnnnnnnnntggcgagacaggtttgggcgtcttgatgatctcgatgtcgagacgggcgccaaagggggtgatatgagcgacggtaaagttgtggggtccgggataacgatcggctgggagctcctctgcgaattgacggagaccaaatgcagtgaggatagaaacaatgttagtgtcatgggagaagtcaaagtagagactctggttcaatgggaaagtctcagtgttattgtctaaagtgacgttgatttgtgagcctgaata

SEQ ID NO: 63453 - DNA, 235 bp, Arabidopsis thaliana landsberg
ctaaggactatgtatattaacttgtcagattacattgctttgttcccttacatcttcaaagagctaagattaaactatttaccccaaataagactgtaatttcatcaaaatctagtaataataatattcaacagcttacaatataaacataacgcgtgtggtctccataagctacgcactgtcttttcatcggttcgtagaaactagaaactcttcccctcacgatttttttttc

SEQ ID NO: 63454 - DNA, 295 bp, Arabidopsis thaliana landsberg
acgtgtgacttatttacttcaattgcaactttttttacggtctagattcattttaaagtcttaacaacactttagtttgaaattcaacacattttcaaaccacactttcacgtgattgtcttcatttaatttgacatcgtgcatggttataaagactgttcacaatacgcactttgcaataattgtttgttagtcactgatcatttttcattggtccactaaataaactattactatatgtttgattgttaatatgtaaatgtagggggaatttaagtaacatgtacgtagcctt

SEQ ID NO: 63455 - DNA, 297 bp, Arabidopsis thaliana landsberg
gaaagatcgccgccaagtgcgcttgcaggcggctgtgcccgtggcctgtatggacggctacgccacggttgctcgtggtttgccggctcgtccgatccgagtgaatcaggccagcgggtgcgcttgcccgcgcggcttcagttttcccagcagccaggaaagccccagacagccggcgaaggccagtggccagcggatggcctgtggatccagcgccggcagcgcgatgcgcagggtggccagccagtccaggtggtaaaggacggtggtcgcggcaccggcgatgacgaagatgcc

SEQ ID NO: 63456 - DNA, 299 bp, Arabidopsis thaliana landsberg
gcagtttttgtttccggttcattggatcaatcgagaaacaaatcggcaggaaactctatttcaagaatctcggtgtctctggttgttgtgacgacgattcatccgaagaagatgaatgtgtgaagtacaatggaaatgaggaacaatgtggtggaagcagttcaagccataatactcttccagaaggagttgttagttctttgatgaatggtgaaatggcattgccgcatactgataagtttcctttgccgtcgcctcttatgtgtcctggaggatgtcaggaggctttctactgcagg

SEQ ID NO: 63457 - DNA, 1982 bp, Arabidopsis thaliana landsberg
gagttcctttagttctgagtccattggagtgtggttgatttggttgtcacgagacgcagaactaaataagagaagcaaagatatccaatcaccaaagagaacacaacttgaggctacaacaaaagtttagctacgatcgaacttaccatgagctttgctctccctcaaattctgccttcaacaaacctgcctctaagctgaaccttttgatctcttcagccattctgataaaaatagtaaagaatacataatttcatgctactgaagtaatagagtagcaatagcaaaaagaaagggatataaaatcccacagcttttcttttgaaagcttactctttcatttggcgttcgtaatcagaatgaattttattcagtttcattagtaggcctgattcattgctagactcctgcacaaccagaataagaaaccatttggagttccaaaatgtagaaatcaatacaacaccacgtatatcatccaataacaaaaatctgaatctttgtcacgagtgtaacatatactaaagatcctaaatagaggttccaaaaaattagtgctgttgagagcttatgtaacacttaaccaattgcttaaactctcgttgaaaataagatgttacattgatgcttaggctcaggtatccatacctgaatctcggagcttgttccttttgatgggcctggaaaatacaaagaagacacttacacaatttagcaaaagaaacaaggaaaagaaaggaacggataccagctatctgttatgttacctttctttttgttggaagaaatctttttagattgaagcagcatttttagacgcttcagggctgtcaaagcttgtgtattcttcagctgcaaaatctgagtaaaagaatatagacattaacaagtcacatggagtcagtagtaaaccacggttgctgaaatatacatatagcatagtacaatcagcagaaaatataccagcttctggcgattgttcagagctgacaggacatgtttctcaaactcacttttccttagctcttttttgagctgttacaatagaagcactatataattaaaagcctgaggtatcatataagagggaaaacatgatcaaactaagagagcactgaacaaggcaagcacaattggctaacaatctcatcaagaaagaatgtatccaaactgatcttggaatacaattctcaaaatcaaactaccataactagaacccctgttgtgtactgtatatatatggaaaaccatatgtgcaacaaacaatttgaacaaaaaacatggggattttgagaacgtttatcaatcatacataagtataaatcaagtatggcatgtaaccagattatcaactatcatctatgtccatcagaacttgactgcattatgatgtaacccgaagtgggaatctacaacttgatgatttgacattcactcataaaccaaagaaaaaatgtatagatactagacctgctactctcgttacctgaagaacttccttttctagtgaagctttcaatagtctgaactgcatagagtctagcttgatcttgcaatgcaacttaacctgaagaatatacacaactcacaaaactaaaaacccaaaacaaactgctgcattttccattgatcataaacattatttacaacaatatacttcaccttttgcgccttcaatttctgaacttcaccatcaaattgcttaacagaactctcagttttatacttctttgtggagcacatagacttactccttgaactcataccctatacaagtatcaaggtcaaaaaaatatgcgtagtatagcataaatgtctctttttaaaaattgaaacctgagaaacaaaataatccacctcctctttgttagcaatagacttttgagaaaactttctgcttgactgtaacgtaccaaccgatgagcttatcgaaacatcagccaattttgaccttagctcttccacatcactctgccgaaatc

SEQ ID NO: 63458 - DNA, 278 bp, Arabidopsis thaliana landsberg
tcaaagttgaagactttgctcgttttgaatccgtccgctagtagaatcttcttctttgaatcgattttgatatctctgctttatgggtttccacacttttgccagcaatgtctaagcttccaagaacatgcctttgactagcttttcccggtaaagctttttgcttttacttcttttttcctggcacgagaaattaatgggttcagttgatgaggttgagatatctaagactagggttacatgtcctcctgctctctcaacatcttataagattctca

SEQ ID NO: 63459 - DNA, 1439 bp, Arabidopsis thaliana landsberg
gggttacgagcagcttgttcggaaagccgatttaatgaactggtacgtaacgctacttctccaacaagtatttttgtctgctcgtgaagaagatccatttgatccgcaatagtagttccagtctgtcgtatgtcattgttgatggttatgtgtcagtaaaaagatacacaatgaccactttaaaacctacaccgaccacaggatatggtgttcaacgaataacaattaaggcgtcactactttctcaagggtaatcatggaagcaatagttataagaaaaaaataatcatggaagcaacaagaaaattgtgaaggaacaatattctcttaccggagacgagtcttctggtccaacagtagcactgaacaagtctccagcaacagttttttccggaatagacttaatagccgctgcattttctcttctagttgtttttgtttgtgtatacttggaggaagatgaaggagatccacttgcttggctctggttaccatcagtcggcaatagtcccggccacaccatcagatttctgcagcatatacattatgggtcatgtctaatgccgaaacagtctaatcactctttatgtttttggattgtgtcatttttatatatcagaacacaatgactaactccatctataaatatcgatacaacagagggatcaacgaagattagaacttactttcagttttagccagccaagcattccacgagtcttgttctttctcctgtcctttgtcatctcgtccagactactattgccatctcttggctcctttaaatgttcagaaactgtgcttacagcaccatcatcagccatgttctcccgtcttctatcgggcaagtatgctagctgtaggaaccataatgttaaattatacatcaatatcaaatggtgtaattgtaaacgctgaaacagaaatattattgttccaccaaaatggaatgatgtcttgcaaacaacgttaatttaacatgcatacctcatcctctccaaaagcttgcctccatatatggtcaggttttacagaagcagcttggagtgaactttttgttgaaaccaagattaactttgtcaatcgctgaattcttcccatcagagctgctttggcttcttcatcatcctccaaccttgactgaagtttaacctgacacgatttcagcttctaaaatgagagagagcacaatgaaagcaaggcatgttatttctggggaatgcattttttaaattcacagatataaccaacatattctaaaaggtaaaatttgattaaagattaatcatttcaaatgtttagctagtaatagcctaatagctaaagacattgtcatcagagttttgtaatatctggccgcaacaacaagaaaagaaggaactatctgcatacaccaacctgaagttttcgatcagccaaatcatcttggtttccgtgcc

SEQ ID NO: 63460 - DNA, 290 bp, Arabidopsis thaliana landsberg
  unsure (1)..(290): unsure at all n locations
atagatgagtcactagaaacagtagaatgtatatgagtgacaatctgatatttannnnnnnnnnnnnnnnnnnnnnaactattttgaaagatggaaaacagtgatgcctgataattgaagaaaaatcactaagatgatgaaaattaacctaaacccggcaagttaaaacttaaaagcgttagacacaatctatcactcccgaccaaaatatgtacaatctatcactcctttcacttcacactaatatatggtcatttagaggattttgttttttaaaatatctttagagt

SEQ ID NO: 63461 - DNA, 295 bp, Arabidopsis thaliana landsberg
gaagaaaactatgaaatacagagcagggaacaaagtatacactggaagaagagaagaaccaaaaaaaattcactgaacctgaatcagaaccaagcgaagatgaacggagtaattctttgtttttgtaatcttcttattttattttttattttttttccggcggactctggattcttcttcttgtgataatctctgaggctcgaaaaacgatgagtcactgaacagtacttaagttggttaattgtgtgtgtttgagttttaaatctgtttttcaatggagccattaactacgtta

SEQ ID NO: 63462 - DNA, 1577 bp, Arabidopsis thaliana landsberg
cgagatataaatgcaagactttaagatcaactttcttatatatatgcaaggcaaaatagtttttgttttttgataagacaatctttatctctacattaaagaggcaagccaatgtagtagaagaagtgagttgaataatctcattatggaagagaagctgtatgatgatgatgatgatggtgttttggatggagttttacctgcaattgctggtgaaactgcatggcctcctctgctttgttgctcgtctgttggtaatggatttggcgatgaagtgcttcccggtgaagcttgaggcggctctatcttatcttcttgacctgcataaaacaaccccggtatcattcgatttagctttggatcctacaagagatcttagtactaatgttctgttaaaatcaaaatcttacatttagagggtgaccagcctagcttcatgttctctctatcgaaaaccattcgataccctctcatgtagttctctgcaaaagaaaaatataaagtgtacttaatggaggatattggtctgaggatgtaagagagaatatgtataagactaatacatacgtcctatgcttcctattccttcttgtccactacgactgataggcaagcaaaattgaacaagcccctgaaaagtggtttatgacgatgtaatacatcaaaatctaaatcttgttttaattctttctagcaggaatcataaaatgtgtttatatggtctaacctgactttgttggaatacaaacaaaggtttgtgaatcacgaatgtgttattgtgtgaaaacttgagtttgatcgctggcacctttggctcagcactgtctccatcaaaacaaaaaggagaatccaaaaaacattaagagaaaattatctgtataataaaccaagtaaggagcttctttatctatatatctgttttatagaattagtgtacctagattcatagcaatactcccatgaaacaccttcgaagttcttactcgtagcgtttatatgtctgtcaatctcaagtgcaacttttctgtatatttcttccggtagataagtaaatgattgtccactgtcaataaaagttgtgaagctcgtctgcttcagacacgagttgccaatacaacaagcctccacacccacaatgtagcctgaactgtaaacaaaaatcaacataagttactaattgataaagctgtcataaaatggttaaaaaataaaaaccataagtatagagatcgttcattactatttgttgttgtcaagctggaggaatggggttgattgttgtattgacggtcccatgtcaccgaagtaaattctccctgaatcttcctcatcaaagcacaacgagaacgagtttctcatgagtcccgctttagagagaaaacttggaaccgagatttctgcaggtcctaaacccatcaaaccatcaggggcaaccccatccaagtagtccccactttgcttcttaccacatctgcaatgtaaagacacccttatcaatactcggctcaaaacacaaacaaaaatctcgcatacaatagtaaacgcaaaacgcaccctataacaactcgagcctttcg

SEQ ID NO: 63463 - DNA, 1760 bp, Arabidopsis thaliana landsberg
gtttgtcatatgctcctgtttccatgtcatctacatcttttacaagtgtatatcttcttttcccacgagccatagtatctaccaaaaaacagagacagtgtcttttacttagttcacagtgataagaaggtgttgacatgaatgcttcatctttcacatcttacgtataatatattcaatggtgaggatcagaatttctgaacttgtacacatgacaaagactaggtgcataggcggtaatagtttgtaaaacaggttgttgtactaacctttaattgcggaataatatcgagaggcttgtttcatgagtttggcatgcctatcagcaatgaatttaaccagctcggttctacagtttccagatacaaatttagtatctgcaatgaaacagatacaatatttacttggacacatatccaagaaggttcaaagcaacacatatatatatgtgtatatccttcttttaaaaacttcgcagtacatttccaacactttcactcaaacaaaatcatgaaaaatgaaaatggacaggagagaaacaacgtcgtctagtgatctcatctaagtcatctcaatctcaactaggacaaaacaaattcacaactcaactctgtaactagatataaatggaactctgtgactcaatattctactaaaattaacctcaaagctcatagttgaagagtcaagagagataattactttcgtccatgctttaagctattgcttatgacccagatcttcaatttccctgcaatcataataaaaacatcagaatttcacaagcagtaatcaaagactagagatacatttcaatcaacacaagaccaacaatacaaagtgtgattcgaaaaccctagcagcaactaaccaaaactcacactataaatttcaaatccccatcaaatcaatcagcaaccgcgaaaacttcaaactcgagatacgactcgtctctttaacaaaaattgaatgttttgagctcagttgtctacaggattagctttacaaataaattaatttgtcgatccatcgtttcattaaataccggaaattgctcggaaaaaaaaaacaaagatcgcagagagagctcaccgaagataagagaatctagtgcaagatttttcgaaatgaatctggcgattaaatgaaatctgaatctgataattcagacaaaaatcgtgtcgtctcctctttttcttcttcagtgttcaacttcgtcggcgctttaaatgcgtataaagctgaagaagaagaaattgaaactcttgagaaagtaaaaaacactcttttactaaccaacgcttacttctttccttttttatgaaataagaataataaaacaatgttattcgaagagattaaatttttcacaagactaattttatttatattctttcacatttaaatatgatatttacctttttgtgtaattgttgaataatgttgatgtgataaaaagatgatttttcttggggataaaagctgccttacacaccactttacaattaacttgtgatataagtatgtattattttgtcttcaatcacctacaatctaaacattcacatggatttacaaattattgtgacgtttattcaaccatcccatattctggttggtttagtagatttaaacaaaatgaaaaaattatggtgatgaagactaatgtaatttttggtaatgaaaaaatgatgtcaatactattgaaactatatcactctaacgaaaacacacacacaaagagaagttatgaaacatca

SEQ ID NO: 63464 - DNA, 272 bp, Arabidopsis thaliana landsberg
  unsure (1)..(272): unsure at all n locations
nnnnnnnnnnnnnnnnnnnnnnnnnnnnnnnnnnnnnnnnnnnnnnnnnnnnnnnnnnnnnnnnnnnnnnnnnnnnnnnnnnnnnnnnnnnnnnnnnnnnnnnnnnnnnnnnnnnnnnnnnnnnnnnnnnnnnnnnnnnnnnntctgtacaaatcgcacgcgtctcannnnnnnnnnnnnnnnnnnnnnnnnnnnnnnnnnaaaagctaaaggagtggttctttattacatgattcataagtcaaatactataaagactttggcctcaccat

SEQ ID NO: 63465 - DNA, 1615 bp, Arabidopsis thaliana landsberg
tgagagctgtacaactctttttggtacttcaagtgtaattttttacctaaacccctagcaaaagataattctttgttctgaactgccgatgcacggaaggatcatgaattgatgaagggaaagtacctaattgacctaagaactagatcaaatccaattcaggtgcaggatagggttgaattttagcggaatctcaggtcaattggtaatttatctgcagctaacgtagttcgatgattacctgggcacatagaagaacaagttcctacaatcaatgaaacgtcagcaggatcttcgtctttatgttttgattcatctttttcattgtttcgtttgtgcggtgcatcggatcttctctgaaaggattcattaactccgccgccggatccagtcctcgggttatcagagaactggcggttcccataagtattcgaaaccctagaagaagaacaagaagaagatgaagagccgcgtttccgacgattcatggcttagagggaacgagatcttcttccgtcccaagtcccaaaccagactctgaagaaacgaaccaatcaaagctgttaccgaactattatttggaataaaccgtaagagaaccaaatccggtacagtactctcagcgaattaaatctggcggcaaccgggtcaatttaatttacaccggttctgacttgtacacaaatttgcatttctacaaatgcagcattcaaaattcaactcaagtaagaatctagaacatttcacatttccctacactttgtaatttacatatatagttttggaaaatttgattttaagttttgttttgtttttctttccggttttgcagattttctttttaaatcgataccaaatcaaacctttcgtatacggtttggtcttttttttttgggaagaatatatggtttagtcatttgtgcaattacgattcggttctgttttgtttttttacaaacaatagtctagttagatatatttgaaggaaatcaattttgattttgtcatttgagcatttcatttttggtgttattctattttttcccacccctatacaggcaagcttaggccggttggtgggtctagtagtcacggccactctctagacagcagagaacaatgtgtccaccactacaaatttaggtttcttttcatcaactatccctaacaagaatctaactgctaacattcaaaacacatagactagaaccactaatcatactatcatagtgcaatttcccatccaaaaaaaactccatattagaaatgcaaagagaaaaagctggttcatctccactaatactagacagttgtctcgcattcttttgctaagacttattttctctttcactacaatctctaacacgaccaaactgatcgaaccgaactatctaccaagcattctctgtaaatctctacctgaagagttaaaacacttaaacacacacaaatttgagacagtattagcatctctttgactaaagattgatgatattcatatggcaaaagcatacatttgctggtagaaatgtggaaatcgccatctaccccaggaaacaattattggtctctctctgagaaattatgacaaaacaacacttggtatgtacacaca

SEQ ID NO: 63466 - DNA, 1184 bp, Arabidopsis thaliana landsberg
gcgtcgtaagtatgattttaaaacggagccaatcctataaaaatagaaacgggttctttaagtttctacaaaatgtttaaaaatttgaaaggatagtgtagaatttatggatggattcttacttaacatgcatgtggagtccaaataagcattaaggaatattaaaagacacatagaaacgtaaatataaatatcagaagagtgattctggggtaaacgtgcatttggtctttttttttttttttttactactagttagtttttctattcaaaagttaaaaactttaccattaaaaaaataaatggtggaatctttcttcaaatcttcaaaatttgaacagagttttttgtaatttaatcatttttatttacctttggatgaatagccacgctgttactgtctttaaaaaatgcgctgttactatctatgtaaataaattatgacacatttcttggaaaacgtaactattcctcctctctatcgttcttttactttaatacaaaaagtaaatataaaaaaaacattcgaacagagagaagaaaaacaaaatctgcatcattaattacatacaacaggttaatggagaaatggaaatgacacagaacccaaactagcaatgggtgaaaataaggtaaatgattagttaccaaaatctaaagaaaaatctatgttcaatcacgtaccaaattgaaaagattaaccacaaattacttatcaaaaaaattcccaagcaaactaaactgtagtgttagctctttctttatccccttgttttatggtcaaacagtcaatgagttgcgttataagcacataaacaaacacttctttctctaataaaaataaagtttctatttttatatacagaaaagaaaagaatataaaacttatatctttaaaccattctatatcccgctcactctcagagacagtccctttgcataaaagcgaattgactataacccatttactctctcgatctgcccaagctcccatcttttctgttcgtagagctcatttccccaaattaataaagaaaaaaaaaagactttttttcttcttcttcttcttgaagaaatttctggagcgtagtaagtttctatcttagtctctctatctccatcttctctgttttattttgcttgtgaaatgtgatgatattatttttatgccgaccctctgttct

SEQ ID NO: 63467 - DNA, 467 bp, Arabidopsis thaliana landsberg
acttcatcttacaaaaaagttagctaacaagctacaaaaacaaatttaataggaaaatttgtttccattataagagaattgaatgatataggctttttgttacttagttcatagttcaacacccaaaatgtgaaattttatgttagcaattttgatatactcttcgcacgaaggggacgcgataacgcctgttatatgaccagtatttggttcgagagattgtactacagttacgtttaccttgttccgtgagcgatccatattggaaatcactgtgatgattctctctatcatatgtgccaatgatagttcgcccatgtctgaggttaagttcctaactttttatctcttcttctcttatcttcttctttattttgattgatttgatctgaatatttgttctccagagccttattctctctgattgggtataacttgcatccaactttccttatttaaagtttttg

SEQ ID NO: 63468 - DNA, 299 bp, Arabidopsis thaliana landsberg
atttcatattgggaggcttttcaatttgaaatttctcagaatttactaaactaacatatatatatatattgacatgtgactcgtctcaattacatggctttcagtgtgggtttaggattcttcatggcagaggaaatcttttaactttcagagattgtctttataaattatgagattgcagactatcacatgcatatttaacaacattgtttttgagttttagttttctccaactacaaaaaaaatgaatgatctacaaaaatttcattttcttctgattattagagattaatgtgtgt

SEQ ID NO: 63469 - DNA, 254 bp, Arabidopsis thaliana landsberg
  unsure (1)..(254): unsure at all n locations
nnnnnnnnnnnnnnnnnnnnnnnnnnnnnnnnnnnnnnnnnnnnnnnnnnnnnnnnnnnnnnnnnnnnnnnnnnnnnnnnnnnnnnnnnnnnnnnnnnnnnnnnnnnnnnnnnnnnnnnnnnnnnnnnnnnnnnnnnnnnnnnnnnntaatgaagccaataaggatcgaactattaaaaaaaagagtgtctgctttttgaacttttgtatttgcgcacataaacttagttcaacttttagcccacagtaactgg

SEQ ID NO: 63470 - DNA, 1427 bp, Arabidopsis thaliana landsberg
cccaggttacgttatgttgaaactttgagaatctgattgatttttgatagaaattggaattagtaattgttgtattcttagttggataatgagtacattgtttctttggatggtttcttttgatgtttgtgtatgataaggaagttgtatgatgtatataacagggtcactcttgctgatcaaacaacatttgatgcaaaagttgttggatttgaccaagataaggatgttgcagtattacgtattgatgcaccgaaaaacaaattaagacctatacctgttggagtctctgctgatctgcttgttggccagaaagtctttgccattggcaatccagtgagtatacatccttaaagtgatcatagattaaagctctgctttgtgttttctattgctagctaggtcaatacttatgtttcttgttcatacgcactaaagcaagaacttttttgtgcagtttggacttgatcatactctcacaactggtgttataaggtatgttaaattatatttgtcttctcttttttttaagttgcattctactctaatcaggtgtgttcttctcataacgaactcacaaatgaaagtgtcaaaaaagatgattggtacttgaggatactggatacatatattttctcttgcccctcttcatgccaaatggctatactattccttttctcttattaaaactgtagcatgtttgtgcattatgatttgtacagtggtttgcgaagagaaattagttctgctgcaactggtcgtccaattcaagatgtgatacagacagatgcagccattaaccctggtaacagcggaggacctcttctagatagctcaggaacgttaattggtataaacacagccatttattctccttctggtgcatcttctggagtgggcttttcgatcccagttgatacagtgagttctctcttcttttttacccattgcaaatctgatcagatagagtctttctctatcattgaatccactaacgggagactaaagttgtttcgagctctgtttctctcatgttcaggttggtggtatcgttgatcagctggtgagatttggtaaagtcaccagaccaatcttaggtatcaaattcgcaccggaccaatctgttgagcaattgggagtgagcggtgtgctcgtcttggatgctcctccaagtggtccagccggcaaagcgtaagctcttcctgtttccaagtttccatataacagatattttctctatgtttcactccgcggttttaatattgaaatgtgtaaaattggttttgtccacagggacttcagtcaacaaaacgtgatggttacgggagactagtactaggagacataatcacgtcggtgaacggtacaaaagtctctaacgggagtgatctgtaacggattctcgatcaatgcaaagtcggcgatga

SEQ ID NO: 63471 - DNA, 1574 bp, Arabidopsis thaliana landsberg
ccaaatgttgatgaagagttgaagcattcttctgccagtccttggatcaaatttaacaatttggttgccactgtgaacaaattggggtatgtatcatcagttgtaatttatcctattgttcttattctagcatttttatcactaacttgccttcttttatacatgtgaaatagaatgatttgttactcttgtaaaaatattttaagggagttaatttgctttagctgtacttttccaaaaaatagtaaagtaggactcttttttttttttttttttttgtcaatgaactctttaagacaataagaagcatacattagttttgtgccatactgccattgggttttggtagacggaaataagagtgtgtttgttcacttggtaggcattcctttgctagcccaacaaggactttcttgtctcataatttcaagaaaactatgctgaatttaaataagaaaataaaattttcgctctattttaactgtttgccagctcaagaggtggtttgggcaatcgtaactcttctggggctcaagattcaactgacgagtgtaatgctccagcagatgccaggctcagacaggctgaaattcgtcctttgcattgtcctgtcaataaagaactcggtggagttactttgccatcaaccaattcagttcttggtgtatattcgtcttccaaagatccagttcatgtaccttctcctgtttctagatcatcacccgtgggagctattaaacgtgaagtaaggggtggaggtttaggtggaaaaccttctgaaaatgttggtaaagatccatctgtgccctctttttcagggtcctctattagaaaaaatggacctccaaatgcacatcgaccatcttccccaacttcaaagattgatcacagtcgaactactgcacgtgagtctgttatgcccagtggagtggaaaagaataggtcatatttgaacagacagcgtgggaatagaggaagccaatatgctagaacacaacaagttggtggccatacaaagggtaacttatatgcaaatatttattaaccgaatggatgttgtgcaatttcttatttgatttctgctaggcgacactttattttctgtgtagcttctgctttgagtaatataatcccttctttcaatctattgggaattcctggtgagaagccatttcctgtcatgacttctgatattcttgatcaacctgtacttattgcaggagcctcacagaacaaggagtggaagcctaaatctaatcagaaacctgttggacataaccctggagtaattggaacacctacaaagtcttaagctcgtcgtcctgctgataattccataaatgtggaaacagaagccgtcaagttgcagaataagctttcacatgttcatataagcgaaagtcagaacgtcatcatcgcacatcatattcgtgtctcggagactgaccgtctgcagctaactcttggtagcttagttcaagagtttaattctctcacgaattcacaatctgctttcggagaatcacactcttcagaagaagttagagactctgatcgtaggcaagttctgacag

SEQ ID NO: 63472 - DNA, 601 bp, Arabidopsis thaliana landsberg
ctggccaatcgttcgtatctgatcgcgcccgatggcgagatccgcgcacgctacgacaagatccacatgttcgacgtcgatctcggcaatggcgatgtctacagcgagagcgtcaactatcaggcggggtcgagcgctgtcgttgcggaccttccctggggcaagctcggtctgacgatctgctatgacctgcggtttccggcgctgcatcgcgctcttgcgaaggcaggtgccgcattcctcgcgggaccagcggcttttacgcgggtcacgggggaagcccattggcatacgctgcttagagcccgcgccatcgagacgggcaccttcgtcctcgcggcggcgcagggcggccggcatgagaacggccgagagacgttcgggcacagtctcatcgttgcaccgtggggcgaagttcttgccgaaggcgggaccgagccgggtgtcgtcatcgccgaggttgatccgcatcggattgatgcggcgcgcagcaaaattccctctctgacgcatgaccgcgcgttcgaaatcgtcgaggcacaccccctgcagctcgaagcagtcgtgaaataatgatcaagtaccgccttagctgctctga

SEQ ID NO: 63473 - DNA, 504 bp, Arabidopsis thaliana landsberg
tggctatgccttttgctgggatcctgctgagtgctcagggtcgctgcccttaccattctgccccgcctccctgcctgtcccacagacccccgccatgccacaagtgtgaacgtgcactagtgctctgtccctgcacctggacccccatgatcctagttgcggcaggcgctggcagcgctggtgtggcgctgctatttccagttcccatcccgggaaggttgcccactagtgatgagctcttcccattacagggcctgtccttgcttcccttccaatcctataaatgcagcatctctgtctccctctgagcggacctgagagcagaccctcagctcttgaagacgcctggaaggagaaatggaagcaggatctgtcatccagtcatcactacccaatttataagaaactgacataaggaattgatctttcttctttcttttacagacatattttatcatgaagcatacagagtattgcctgctactacacctgaaggccacaaga

SEQ ID NO: 63474 - DNA, 364 bp, Arabidopsis thaliana landsberg
ggaaagcggaccaggagggttgacacaaaacaatttgaagcggagacaaaaacgaacaaaacaacgaggggggaggaaaaacctgaaacaagcgagaggagccgggagaaagatgggaggaccacagggagaccgaaacgacgacaaaagccgctggagggaaaaagccgaacaaggagtgaggaaggacgaagatctcggcaaaaccacagcaccgagccaaggaggaagacgaagaggccacaaaagcacggaggcgggagagccaccgcataacggggggacacgacccgctgggcaaaggcctgaaaagacgaagcaagagatacgaaacacgaagacggagctgggcaacagcggagac

SEQ ID NO: 63475 - DNA, 444 bp, Arabidopsis thaliana landsberg
gagttatgctcggtggtcacgtgggagagtcgcccggcattggaacggattgtctgctctagcttgcccacggtctgctggtgcagggcccgaaggtgctcgggagcatccttccacggatcgtccggttgattctcgctcgcagcggccggtgccggggctgcgtcagcagggggagcgggttcgctcgacccttgcggttcgccttcaaccttgtcgagcttgtcggcttctggatcggggggcacctcgtcggtgccggccttctctttctgctcaagctcgccccaggcggcgtcgaactcgctgttgtccttggcctccgcttcgccgccgttcggctgaacgccttcgggctgctcggtttcggttccggtattggcaatatccgccatttcttaggctccgtcaatatccgctggcggtatcggcagcggggggggg

SEQ ID NO: 63476 - DNA, 387 bp, Arabidopsis thaliana landsberg
aaaaggcgcctggcggaactacgggcagtctaaacatgggggcttctattacgcttgactgtggcgacgaatctagcgggggagtactttcttccataaaggtgactgagcgatcaaactcttttcagcaaaacgttgtgacagcttgacttttctaagaactgtaccaatgagaccggctttgggaaggactagacactggtcttactactatcaaggatctgtgagacggcttaaaaactaaaaacacatctgaatatccatggattggattacacaggacaagtcgaagaaagagacagaggaaacaaaaagaccatgttgatacaagtattgttaccgtatgagctacagaagcgactacaggcaagaaggctgtcaagtatg

SEQ ID NO: 63477 - DNA, 1210 bp, Arabidopsis thaliana landsberg
gcaggtcgactctagaggatcccctaggaaaaggtcaaatataatatgcttgtatacggattcatttcttggtctttttgattcaaacaaacgaacatattatcacacacaagagaaagaattacaaattttatctacaagtcaagagtcaagactttataaatatgaaaatttggtatcgataggatcttatttgcttttaagaacatgaacatcgttatctttattgagttaaggcatatatacatacatacaaaataaactggttcgttgtcaatttctaagaaaaggaaggatattgatgtttgtacacattcaaaaccagtttttctaaccgccattgcctcgcggtggcggctttttacaagatccaccagccctacatccgtgtgctggtggcgagtcactatgaggtgttccaatcttcattgacattcttaaatcttcttctagacattttaggtaacttcttagtatagatatcgataatacacaactttgtcgattaatgcaaaacatgaatcaattaaatatgcgaatcataaattaaaataaagggatgattcatccaggatgaacatgaatttatgtaataaccgtaataccaatttcatgtaaagaagtggaataaaaaaatgcatttctgtaaacttgcgttatcgagaaaacaattccaaactatggaacattctgccatttcagaaattgcagaaccattctgtcatttcacgcggtaacactttgaaatttttgtgtgcgtacgtgttgatgcctttgtatcgtggtatgtcatatgctacagcttaacaagattttttatacatacgtatagatcaaacctagttatgagtgggtatgttaagagtgtacgtatactacattatatttcataacatcataataaaaacactcactaagtttacgaaatttgtctggttgacctgagaccaccttcgatgaaatcaccaaagagagaaccaaaagggaaccgatcagccacaacttccctttcatttcttttcaaacttaagttgaatatttctttgatggtacggtatacagctctaaacttacgtgtatttatatcaaatcaaacatacgactaaggttcattatatattcttttacttcgtagacattttccttgcaatgtaatctattttaaaaacaattctaaggtttccaaattaccgcgtgaagaatttgaaac

SEQ ID NO: 63478 - DNA, 1625 bp, Arabidopsis thaliana landsberg
cattttttcttttggatagggccctttatatgggcccattagttggttaaaacaaactaaggcatttaagttttttaatttagatgggcctttcttatatagaagtccaagcatttaactagtaaaagtgtctatcgtggcccaaaagaccgagaaggtccgtagttggtaggatatgaagcagattataattttgtaaatagtgaaaaaaaaaaaaaaaacattttacacaaattaattcttgtatcaacaaatagaccttcaaaaaaaaaaaaaaaacatatcattcaaatgattagtcaataacatgttcaatacatcacactgtcctaaccaagataaatatggttgcaagacaataaagagagatcatttaaataaaagttactttttcaagaactttctaacttctaatccaatagccgtcaaggccaagaccgcgaccgcaaaaccgtaaccaccattccaactagttccagctttagccaaatgaataccgtagaagatgttagaaatagccagtatgatcagaagtcttcctatgttatgatgataccaattccaatattttctgtatttcgattgcttatccggccgagctagcaatgccagcatctgaaatatcaataaacaaaaccatgtaaacatataatcgtcttgggtgttcttcgcagtatatacttcaaatttttgagtgttattaggaagacgaacctgaagaacgcccatgacaagtatggttatcccgaggcctttgtgcttggaaacattattggccttgagccggttttcaagaaccaaaccgcaaatgacaccagttaaaccgaggagaaaaccagtggtttggagagcgatatgggcatagaaccaagtggggtcccattgcttcatatgtcgagccactatggcgccaacgataatcaatattccccagccgaacatgttcattagcccatgtgtcttctttagcttagagtgtggtgaaactttaaccacactttgcgaaccttttacattcatcaatggaaaaccaaaacataaattagtccaagcaactacgaaacaagaagaatttctagattctaatacaaactcatgttcttttattaagttttgtaccctccatatcttgaaaaattttaacactaagttttactcatgaaaaagttaatctgttttgtcactgcatctcacaatcatcaaatcaaacaaaccaaaatagacaatgatgagataataaaaacaaaaaacctgtacatcattttgttttgtctttattacccgaaatattgttgaattgccatttggtacaaaaatcaactaaaacttaattactactccaggctacagcatctagacttttagagagtcccataatctcataatgtggctaaataaattctttcgtgttcaaaatgagagcataattatagtaaatgatagtgtcgtttgttggctgaataaatacaataatgtaatattggaaattagtgttttggaaactatatgagtagttgggcagggtcggtataatgtgaaaatgactccaacaaagaataatggtacaatcttgaaccaattcctaatcgtcatcatcgcatgtgtttaatttggtttgaattaac

SEQ ID NO: 63479 - DNA, 597 bp, Arabidopsis thaliana landsberg
  unsure (1)..(597): unsure at all n locations
gatacattgactataatgcgtttcaaacttaaacacaacatctttagtattttttctcaaagaacagatttttttgttaattgcaaatgcaaacacaaaccgaagaagaaactaaaaatatcgtttgcatttcacatctgcaaattatgtgttttacaatgtaaacacaaacaacaacatccgagtctgatttttcataatcatgtgttatatcatatagtttacctttctggttagctctttaatttcattggtcaaaatttgttcctgcaaggttcgaaaagaataattagcttaaacttcaatgctctattatcaatttttaagcatcatgcgaaccagctagaggcctagagcattcatatattacccttttcatacgaattccacgtaaactcatttcaagttgactctctatgttttgtaactccttaacgctcaaaccatttaattccactcccgttagttgcctgatttatcacaaaacattacttgagntaatatatgtagaacggacatggtncactaccaccaatttaatccgctcgactaatttcagaaatgaaccagtccgacagaacaatcatgggcgagttt

SEQ ID NO: 63480 - DNA, 560 bp, Arabidopsis thaliana landsberg
ttgtcggatctcaacgccatcgtcgtatctccttcgtaccgattagctccagagcatcgattaccgtcggcgtatgacgacggagttgaggcgttggattggattaaaacctccgacgatgagtggatcaaatctcacgccgatttctcaaatgtgtttcttatgggaactagcgccggagggaatttggcttacaacgtcggactaagatccgtcgattccgtctccgatctgagtccgttacagatccgtggattgattctacaccatccattcttcggcggagaagagcgaagtgaatctgagattagacttatgaacgatcaggtttgtcctcccatagtcaccgatgtaatgtgggatctgtctcttcccgtcggcgttgaccgagatcatgagtattcgaatccgacggttggagatggatcggagaagttggaaaaaatcggacggttgagatggaaagtgatgatgattggaggagaggatgatccgatgatagatctgcagaaagatgtggcaaagctgatgaagaagaaaggagttgaagtggtggagca

SEQ ID NO: 63481 - DNA, 1186 bp, Arabidopsis thaliana landsberg
  unsure (1)..(1186): unsure at all n locations
ttgaccctaccaggcctaatctatattacttggtgatatttggggaagtaatttttaacctactcgcaccatacactaccgttggcggtgctataccatatgaaaccccgatatgtgtgcattttaagagaaagagagacatacttggagtcacttcccggtaaccaagaagaattgaaagctgcagcacccttttccatcctatcttcatcatcttcatcatcactgcttggtgcgtttttcccaaagacagctgagttctctcccacaattacannnnnnnnnnnnnnnnnnntattagtatccgtcaaagtcatacaacaaaaatatacaagtgatcaactttagaggaatgtaacgcactcagattccaccagcgattcgtttctttgctgggctctttggcggataatttccgcatattgcaatagaggggtttttcctgctttcttctcatcctgaacagagaagacccaaaaaataatttgaaaccatgtttgcaatcattttggagtaaacatgtgttctgtaatcataaacaacttgtggtatcccacaaaattttcgaagaatgcagcagtagtttcaaagacgggaagaaagaaacaaatataggttttgtattatcatcactaacaattgaaaaaatcaaatggatcaagagaaatgagttactaaacctcaaggaatgattcagcagcaagatcattgggtagaaacttaatcaaagctctctttttgttgacaaattctgagttagcttcaatctgaaaagcaaaagagagattgaaggagtcatcaacacacaagtcaataaagtcggttcttttattgcaagtacaagagacataaagtaaaaccgcatttctctttttttctctttattacctggctgatgagttgcttcatttctttcctaaacctctcagctttcgtggatttgcaaaagctacgcagccttatggtcgggataaatgatagttcaaagaaagcaacggaacaactccactgagacaaatgctccacaagctcctccactactgtataaacacatgcctcctgaaacgctcttgtcttcactgctggtttacttacctaaaaagagagccaatctccaaaatggttagtttgcaggataaagtttcattctatactctattagtaaagactcaaccacgcaagtttt

SEQ ID NO: 63482 - DNA, 449 bp, Arabidopsis thaliana landsberg
agagttatgtgcagcaggcttttgcatgctccgggtccaatttcggccgcatttacctggtcagcgtttaggccgatgtgaccgctccgctcaatggttattacctccaactgggtgaagccggttcgctcgatgccgttgaattgttcaggcaggatggcgccagtagtacttcggtttgccgcggtaccgatggaaatattgcagctgcttttgccatccgcatcaaagtcctgcgcgacaataccgggctctggcaattgtatgtcgattattcaggtggaacaacgtatgtcctgggaggcgtcaggcacggatctaccctatacttccagggcgtatttgggaatgcaggcgactaatacttggagtaatgccaccaaatttcactatgatgatatttatgccggaccggtaattgtagacctgacccctccaattttggtttt

SEQ ID NO: 63483 - DNA, 210 bp, Arabidopsis thaliana landsberg
aaaaagagaaaaaaaaaaaaaaaaaaaaagaaaaaaaaaaaaaggaaaaaaaagaaaaaagaaaagaaaaaaaaaaaaaaagaaaagaaaaaaaaaagaaaaaaaaaaaagagaaaaaagaaaaaaaaaaagtgaaaaaaaaaaaagaagaaaaaaaagaaagaaaaaataaaaaagaaaggaaaagaaaaagaaagaaaaaaaaaaaaa

SEQ ID NO: 63484 - DNA, 574 bp, Arabidopsis thaliana landsberg
cggctcccttgcatccgagtcttctgaggccttaacaagtagcatgcgaggacagccgagagaatgcttaacacgtgaaggaaaacccgctggctgctgcacaatactattactgtcgataccgcacctgccctcaacctggcgctgtgggagcagccttgtagccgctcccacgataaatctggagataccaggtctaccgaagaaaaagactctgtctgatttttgaacccatcctatgctcaccccaatgagcaatttggccaggcctaagcatattcgcatacatggaacacctatattcaaaaccttactaccagtggcacacaccccccttaataccctacaccgtattttaccctttagatttcctagatcagccatgcccccttgcgcaagtcccgtcttatgaccacctaaattagcataacattcaccgaagagaaactacatctagtcatttcccaccttgtgaatacttgatcgcatcagacttcagatgggcgcgcctagcctatacaagtagagcctctcatcttaagctaccttatcatcccctgaacccaataaccca

SEQ ID NO: 63485 - DNA, 1270 bp, Arabidopsis thaliana landsberg
ctctttgccataaactatcaataatggtgaaaaggaccaagtaccgggtttatgtctttacttgcaattttaacggtcagtcattttcttggaaaattgtctctaaacctgaacatttgatcgatgatagtagataaattagtataacattactcatttacgttttatattttcttaaaatgattcatcacagaactatacacaaatactgttttctaaggtaagaaattgtctttagcaaaaagaatgtatagaattttatgtaagaaaaaggaattaaaaagtgagggttggatatatttgtatgtgtgtgtatgggtggcaaagctgaccactaacttgtaaacggtatataattagaagctgagtctgcattccactttcggcacacagaatcacattcttttcacctattacaccaaccctttgctccctcaattttgttaagtttataaataaattaagggtgtccttggatatattattactctttacaaacaaaaatagcagtttagtacaagtggaacatatatacaagctcctgttttaaaattattttaagaatgttttttttttccgtatttcttttagttaatttaataaagagctagaaaatgtgatatatgttttctttcatatcagaaggaatatataatgctttgttttttcccttctttttgtgaaagaagtcaagttggaatttattaaaaaacataaacaaaagtgatttaggaaatttcattggatgaacgaatcgttaaagatacttatttttgtgcaaataaagagaagttatattgaatcgctttgttataaatttgaaagcttttagttttctaattaaaaaatttgagaatataaaagaaaagctcactttttaatcacgaacagtaagtaactactaactacgtaatatgattactctatctccatatattaatttgatttgatcagtaatagtgaatagtatatactatatatagtcactttaagagcatccgaaccttatttattttttgcatgcgggaataaaaccctaagatactacttaataatgtaggtcggttggagtcgatataattctaacaccacctatgacattcatcgatgaagatgatgaaccatatatatttttaacgaaagtggcatcacacaattcaatttgttatttttttttcgtggctccacttttgatgaggcgtttgaatggaacccaatgaaaggtcaatcaataatagccgtataacttataatatgtttggatcataga

SEQ ID NO: 63486 - DNA, 503 bp, Arabidopsis thaliana landsberg
gaccacctttgatagtatagtaacaacacttggcatatttgtcacttaccctagtctcatatgttgtgcactcaatgtttaaacttaattttatgaataaaattactcgaaatgcgctgaagaccttgacagttcgacattctatatctactacactgagaaaaaattgccgacgctggaaatgaggttgaggttggacatgggtggtggtcggaaccatcagaactgatccactaccaccgcaaatacaagacctttacttgtgacactatcaatgggttcgagctgactattcggactccgtctctgagccgattcttgcgacttgctcgatccgcaatataccttccaaaccgcttgttaacatttttagattccaatattttgttataagcttatgagactgctcacatgagattttacacgaccaatgctctctcgctaattaacattattatagattctaggaatgtcttatatcacgatgtttgtattacggaaaa

SEQ ID NO: 63487 - DNA, 114 bp, Arabidopsis thaliana landsberg
actcttcttgggctctctctcacacatcaatcttacttactgggttgtataaatataaccaacatatcttctccacttcttcagacaaaaccaaacccatttggactttctttg

SEQ ID NO: 63488 - DNA, 650 bp, Arabidopsis thaliana landsberg
cgctcaccgggggcctcctcgccgacgcgtgcaatcagtgtcgggccaaaattctcaacaaagcctgcccgcgtccggagtgtgaatgtgcgcacgagttctccgagattgagattttcagcagggcgaagaacggcggctccctcctccacgagatgaccgacccgctggcgcaggtcaagcgcgcggggcgtcggaacgagacccctgccggccctgacgagcagagggtcgcccgttgtctcgcgtagtcgcgccagtgtccggctcattgccgatgggctcaattgcagccgttgggccgcgcgcgcgacgcttccttcggtcagcagcacatcaagtgcgacaagcaggttgagatcgggtgtcggcatataggcccagcggtgtttgataatatagagcgtcaaacgcacgaataacgtgcaaccagtgcatattccgcaatgttaggcaagtggctaggttcctctcactcccgaccggggagagacagggacatggagacgattatgaagcccagcattgcagcaccggatgagccgatggcccgccccgtaaagccgatgccctccgttcgattgggactggccagcctttcactatccatgttgctgccgtcgctcggcacgagcattgccaatgtcggc

SEQ ID NO: 63489 - DNA, 396 bp, Arabidopsis thaliana landsberg
ctaataataaagcataattggattagtttttccattaatctccttttagtattccataatttgataatatatttagacaagaaactgcaaaggcaatgactgataaaacaaactgttcatactcgtggagtataactaaggccataacacttgttagcttaacatacctcccccccctctttgatgccacctgaaaaggatggagcaaaatcctacatgcaatcttgaagacaattgacagacgattaatcagattatctgaaaccaactttcgactgaaaattaatagttcatcagagtattgcatttaaatcacacctagacgaaagaacatccggttaagttaaaactgcggaataaaaagctttactctctgaccatacaaactcctgaatc

SEQ ID NO: 63490 - DNA, 512 bp, Arabidopsis thaliana landsberg
ctaggtattggaagatagctcatttgcatactcagtgactaggggttctaaggggtataatcttataaggttaaacaaggcatgagatgaggctggacaactgtgtgggttataaattccctgggtaataaattcttacttgggctgacagtggggtagccagctttctagtgtcaggttgggagaggagagggagccaacacctgccttcccccatgagatatcagaggtcgacacactccaatggcaccccaggcagaggacctagcatttagcatgtgctatgggtggccctccagatacaatctgatgcagaaacatctctgggggggggctctcctgcaatcagcccagtggggggctcccactgtgtccaatgtgggtgtgagggacagtgaggccttgtgactgagggagctgatactggaagatgccctctgtacagggatgcttagcaggtgggccattgcccctctgtcgctgtccctttcataaggggcctgtgagaaaac

SEQ ID NO: 63491 - DNA, 473 bp, Arabidopsis thaliana landsberg
attacattaaatatacagtaggaaatggcgcagaacagtcttcggcattgatggcgacaacacttccgccatcagccacagaaaattttcctccgggactgatggtaaatatccccggcaatatcagctatccggttaaggtttggatagaagtggccggcgatatcaatcaggacaatgatacagctttgacaacaacgatagggcttccgcatattccggaaaaaagaccggtgtttgaggaaggaaccggcacctggtgcggatggtgcccgcgcggcgcggtttttatggaacattttgcttcaactcaccctaacgggaatgccgcacagatttgagtacataataacgaccctatgaccttgaatgattatgatgcttacatggcttattacaataccggttaccctaatattattgttgaccgtctggcacaaaatgaccccaaagacattgatagcattttcgca

SEQ ID NO: 63492 - DNA, 393 bp, Arabidopsis thaliana landsberg
cgttgaacggccatggcatgccaaaaggtgtcgtgaatttgtgcgggttcgccgaaacctattatgtagggtagttgcggataggtggcctttttgccggagctaagacccatgctgccgacctgagcgaggcctaagccggcaaattggccgtgttggttgaggatggccatcagggccatatcttgcaccaacacgttgaattttatgcatggcgagattgggatgctgttcttggactttcgcaaaatgtatgtcttgcccaaaagtagatcattgttctggctgcactcgatggtacaattcttcttggcgatgcacaattcctgggacgtcgacgcactcggttacagttggcgcatgatctggagtggccattcctatgcctcggga

SEQ ID NO: 63493 - DNA, 122 bp, Arabidopsis thaliana landsberg
tcacccttgctcttcgcctgcgtccgttactgacttctcacctcctgcctccatgtgcaccatctcatttccaaccttctcctcctcctcatccccacccctagcgtcttgcttccctcttg

SEQ ID NO: 63494 - DNA, 197 bp, Arabidopsis thaliana landsberg
tgactagttgttttgcacaacctcaccaggagctcttttatgaggggaacaatctttcgcaaaatgggtactcaagccatgagagctgtttttgccacagcgcactgcttgttttacgtactgcatatgtcttataagtgtctcacaagtgaatcaactacagtgtccgtcaccttgttctggtgggtgccattctg

SEQ ID NO: 63495 - DNA, 1416 bp, Arabidopsis thaliana landsberg
aaaactatctataaactgcgcacacttctaatatcagtcattttcagctccattacaaattaaattaaatccgaaacgtggtaataccgcgaccctttcttctgtacggccgtcgacccgtctgaactccttgtcctgctgcttcaccatctgttgactcagcttcataactttcatctccatcagagctcacatcttccaaaccagcaagatcatcttcttcaatggataccaactatgaaaaaaatcccatagaagaattagaacagcctttattgaaagacatgaaacgatgatggcagaccaaaccaatgtatattgtcagtaattgagctatatcaagttagagagtgaaacaaaacgtatttcttgcagaggaaaacagaagactatagttaattgagcctctaccaaccccaattacttgatccaacatgtaaacccgtaagatctgtcaaaccagttgataggaggacaagggcgtttagttttatactggatacagtcaactaaattatactttctcaatttagaaggatacagtcaactaaattattactttctgaatttagctacctaaggaattcaaaaggaaaagttagacaacatgaataaatatatgaaacaggacagaatcagaaagaacataaatggtgaaaaatccagttatcaatatgatgccacaattggataagggggatcaagaagagaccaaacctgcttgcgacttctcttcctttttccaagagcattaagctcctcagcctggtgcagctcaaatttatcttttaacaactcttcccaataacttgctctatcagaattgcctgctgaagatttgctttcagcagcgactctctgtgcctctaatgctgctgcctcattttcatctatatattcaaaatttgccacctacaatacaggaagatcacagaatcttacaagggaaatcatttcagagttaatgacactaaacagtaccagacaccctatttgcttcagaacagttctatatgcacacaaagacaaacaatgttttagggagttcgaatattaagaggtgacaagcagcaatgcaggacacagccttatgttccagctaagtctaaagaccactcatataacgcattcaatataatcagggttcaaaagaaatataaccaaatcaataaattggctcaatcaacatcaccacaagcataaatttctaacttaagtcatcatcactaattttcattaagttggctttcactttgagccggaacgaacaatcaatagacactttctaaagactgtctataagcatcaaagcgaactggcataaagtgtattgatcctacaaacttagcacgtaatgattagacaagatagtgcacagcagaagggatttcgatagccaaccacagtctgaatgtc

SEQ ID NO: 63496 - DNA, 1030 bp, Arabidopsis thaliana landsberg
  unsure (1)..(1030): unsure at all n locations
tgttcctctttttcttggtttacgaagttaaaatttgtccactagtgaagtggtttttgtgttgtttaatttttaagtagctaacttttttttttctggtgaaatttttgtagccacttgatgagatattttggttccgctgacatgagcaaaatgtgtttttggctgctgagaaagttgagtaagaaaaaattaggttttttcaaaggaataaaaacggaatctttttnnnnnnnnnnnnnnnnnnatttttcttttccattgaaaaaaggagttttcttgggacaccaaagaaagtctctcgtttttgtttgtgggttttgattttgataatgggaatttgctcctttttcacatgagattccgtgttcttcaagacttgttctgttctgatttataaaactatagaattggttttgtgttatttaattggctctttcttctcaaaaatcaatactccactaaagaaagaagaagattcttttttctcttaccctttttgaacgaatccactcaacaaaaagatctatgtttcactgtctgaatgtctctacctatgttctgtcttgtgtggtcactgattcgatgttacttatgattgtccttttttttgcagaacaacacttttgttgagtcatcaaacatatctgagtatgatattggagaagaaagtgatctttttagagctcctgatccaattcttgaagaaccaatcttaaccgttgatccactctctgctgctttgactatgatctcttgtggtgaagacacttcacaaggtctttgtgagcttcctgatcttggttcattgcagagtggtcaacagcttcttgacaaagctttttatgaatgtgagcaagatcttatgatgaaatcagctatggagtctccattctctgatgttttagacatcaagaacatctcttgttgtgacgacaatcaatgagaaccaggatatgcanangagtgttagctcggggaatttgagctctatggattggtcacatgcacaacangagactgtaatgat

SEQ ID NO: 63497 - DNA, 1255 bp, Arabidopsis thaliana landsberg
tgagaagctttctcgatacaagaacaagaagagcaggcgaaatttcgggcgtaagattaaggtatacaagcaaaacacttgaagtcattttagctcaaaaacaagcacttgaagatcctctaaatgttgtttggtttggtttcagtatgcttgcaggaaagctcttgcagatagccaaccgagagtccgaggaaggtttgcgaaaacagaggagaggaaatagaatggttcaagaaaagggctcagaggaaggagactaagcaaaaggaagaaacatgaagaataaggagataaagcccatctcattagaaactagttttgttttatatatctatgtataaactttaaaatcttataagcatccaattagttttttgtatataaagggtttctctaaataagctttaagtaaagaaattgtagctaaagaaagtttgtattattgtagtttaaagaagtaatgtatcagtgggtgagagatgtatatacataatctataattctacatatttttataaatcatgtgatgtttctttgcttgtaagcattgcaacaagttagatttcaatcttctttgacaggtttcacatattgtattttcattttacatttttcatctttttgacgctatagtaatagttctcaatgttaacgctagcaatcaataaaagtatttggatgctgaaatatcatgtcatgtcatatcattgctggtttgtccctaatgattttgtttctatgattggctatgtagccaaccataggacgtcatgtagaacgaaggcaatacattcaccaagtaaagaattgtgctatcctagcttctgatcaaacccgtttctcgacattcatccttagagtaaccagttcggtcctatacagatgaatttaccaaaaaatgctgccttacggtaacaatacgcgtctctcgaacttcgatcttcttatgatcccctcagctcgaaggtatggacaaatgatagcacccgaccccgggtcgaaagatcactaaatgatactaacacccggtttgaagttccgtaaacctcgataattactgagattatgaaatttctattagtaaaacaccattgatgtcaaattctacaaaagagagtttcatctttcatgtatgtgtgtggaagatgaatggaaaatgtttgtctttgctcaaatttcttctctactcataggtcatcttcttcttggttaataacaaggtgcacatgtttcttggtcgataaccacttttagc

SEQ ID NO: 63498 - DNA, 609 bp, Arabidopsis thaliana landsberg
  unsure (1)..(609): unsure at all n locations
tagtcccgtaaagtgaactgctgttcacttgttcgtattactcttacaccagtctggagtgacgaaaattgaaggccgcttatttgataagtttttttgtgtcagtccataaagtccaaattcaagtagataaataacgataaagatttgtctagaaacatttcgttttacttattggatataaaacaatatctcataacgacaaaaaaaacaaaacaatatctcataagttattaataattgttaaaacaaagtgcacctttgttattatattggttaatataaagaggtcaaaattgtagttcccaatgttagaaagatgaggaaacatgaaggagagaaatattattgctgctgacataatgtaagtattttccaaacttcatatactatataactaaggactgtttacgtaactatgcaaaaaaattagaaaatgaaattgaaaaccacaaaaaaaaaaacgatatttaacccaaaatgaaacaacagaaaagtgacattcgcgacttttttccccctaccttttttgtagacatttaattacattttttcccagttttgtaattaaccacatggttcttagaatgcanataaaataaaaaactt

SEQ ID NO: 63499 - DNA, 632 bp, Arabidopsis thaliana landsberg
cccgcgcctgggcgtggtctacaagccggcaccggacgtgtcgttgtacgcgtccagcgctaccggcttccaggccgattcgctgctgggcgaggatggtcgcccgttgccgccgtcggtgtcgcgccagctcgaggcgggggcccgcttcggcctgttcgaccagcgggcgcggctgaccgtggccacttaccggatccggctcgatcacagcgtcgacctgatttcgccggagccgccgtactttgccacgcccgggccgggacagaccaaccgtggcgtggagatcgagttcgagggccagccgctgccgggcctggacctttccaccagttacacccaggcgcgcatccgcaaccatgacggcagtttgccggtcgcgtcgccgcggcggcaggccaacgtgtgggtcaattaccgcttccagcgcgcagggtggcaggcgtggagcgtggccggcggcattttcgcgcgcagccgcagccttggacatgccggggacggcacgtatttcgacatccccggccaggccagcgtggagcttggcatcacctaccatgccgatcgctggcggaagacgctgggggcgaagaatctgttcgcacgcacgctttatgcggtggatgccaacc

SEQ ID NO: 63500 - DNA, 1230 bp, Arabidopsis thaliana landsberg
aggggttactgccaaagaacaacaacaacatatcatggattttaaacagatcatattttttcttttttcaaaaaagcaatgtttctggctgctcaaacatgaacaccaaggaaaactaattatttaaacctgttttctggaagcctctgtcgttggtggtcccagtttttcaaatatatttctcgggcgcgctgaaatagaaaactctcataagctacagacggaaacatctatctaaggaaaatttagaaaattgaaactttagcatcaatactacctgattaccaccattttgaagtacttcaacttctttagaagtaaactttgacattgacacagatttcacacgatgagtgaattcgcggctgcaggtcatcaaaataaaataaaccatgaaaaactgaaactaagagaaaaagaaaaggtaggaacatattcactacatcaaggcagtgtaacttagctaggaaacaggaaatcgtaataaataaaatgcacactgcacctccctatacttaaatatgcatcaaaagaaccctataaccgcatatgaaacgatgcacagctggagaaagaaatacttccgaatatacctaaaaataacgcgaagaaagattacagctgctcatttcacataagcctatatttccttttcaatgataacaagtctcgtataacagttgcaccaaaatttaccaaatcaagacaagagacataaataaaaagggatccactgaatagattgagaattctgttatatcagtacaagagtaataaaataaaaggtataagtcagccaccaaatacaatgatgccaaaaaaatcagctcacacaatctgtcgacgaaatcaggtgcatgaaacaaaaactaaagcccacaaaaacaatcaaacactagatataaatgtatattttgtaagacaatgcattagccatgcttctgggggatcacaatgagtcctgtctacaaatatttaaactaatttagactcgatagcttacaatatagcagaaaacttaatcgtgggatgaacataggaaaccgttaacaaaaaggttacttattcctactttacaaattacatataacttaactgtaattgtaagatgtaagatgataaagtaaatcatggaaagagaaaaggtaacacaaaccagcgtacgatactgacaaggaaggaacacagagaggtcaggaatagttgcaaagaaagtatattggaagggga

SEQ ID NO: 63501 - DNA, 754 bp, Arabidopsis thaliana landsberg
tatggaagggtaatatagtcaatttagaactaattatctttccatgaagtatagtaaacccaaagtgtacgtgtcactgctcactagttatatcatttgattgttcagcttttgttcttttgtcaacatttgattattcgtctaaatttaatcttgattgataacgttctcctactgtttgttcttatttgaatattatttattcgtgttgtttataaaaagaatgattattgttcctacaatgtattgtgatttgattattccttagtatttcaatatgaatttgactatgtaatatattattccttagtactgagaaatgaatgataatcaaatatgttatcagttgttatagtaactccatttgaaacacaaagcacgagaatcttgagaagcgttttgttgaaggaaacaattttgttatttttgatattttcttttaaaaatgagcaacaaataaagtagtttcttaaagaatggtaagtaaagaaacatttgtggtcgaccatcgatgcagttactgttgcttggatctatgtcacattcattactttttatttattaatctcacgaaagtgctcattgttttttaaaaaaaaattaatagatattccatccaaccaaaaagaaaactatttattaagaattttttttttctatttacttccaatctggttaacatttatgtttaaatgcatctccatttacgaacaaataacaatctgtcagaaaattttagactttcaaaatcaat

SEQ ID NO: 63502 - DNA, 189 bp, Arabidopsis thaliana landsberg
tagcattcacaaggaataagcatagtacatatatgtcccaatgtgaagtgaatcattttttgtataattacttgtcaaaaaaaaaaaaaaaaaaatcatatagaaactaaaatatttggaaatatatatggactcaaagggtgggcaattttgggcctaaccgtattatatataatatacgcggctaaa

SEQ ID NO: 63503 - DNA, 575 bp, Arabidopsis thaliana landsberg
  unsure (1)..(575): unsure at all n locations
ctcaaggaacgtctaaaacgcgagctgacggctaatgctcgntgaacgtttacaaagaggcatgaaactctgtcgccttaacgtaagaaatcgttggtgatcataagtttgatgagaatgattgactatactcaagatgatcagctgatgttactgctgtcgaaaaggaaatggatgaaaaagagaaaggcacggggcacaacatcacggaaaatgcggaaatgctctcatctaaatgtgttgaggagtgaccgcacatgttaacatatgaacaggaatggacgtggtttgcgtttgcgtttgcgtggtgatggtggcagcgttatgccacgaggataagcggtaagagttggtttaactaaatattgaagattaaggtgtttgttacagatgattttgggctggtgacactatctccatagatgatagttgatacttgataggatttcttaagataaaataagatattgagaaatcagtggatgtatattgaccgaaacgaaaatatatgtttaaaggggtcactttcgtttatgtttatatacagagatttcttataatagatttacagcatt

SEQ ID NO: 63504 - DNA, 965 bp, Arabidopsis thaliana landsberg
  unsure (1)..(965): unsure at all n locations
gggtagtccttgtgtataatcggttcccactcttacaatagattgcatccaatgattataattgaaagtctccgttttcatcacctcaagaatatcttcctctctctcgaaatctaacctgaacgttcccaatcccaagtccctcccaaccacttgaccctctagtttccagattctaggcatcatcaaaactagtgatccaacactctgaacgtcaggattcataatctttccgataagtgtcgtcctctttaaccttctgattaattccgagttgtcaaacatgcgaactcgaattgttcttggcaggggcttaatgcccttgccattgttttctccaaaccgcgacatggtaccgtaagaaaccgagtttgatcgtatgtaatgtcaatgtgtgagtgtgaccttgtctgaatattaatctaatttataacacataagatcatcggtgaaactgctacatgaatgaatcacaattcgaatcatgaggatctcttacataatattaacataaattgacaagttatttttgcatgattgaattccattactgttccccagtgattctaatttttttgactaaggaaaccatatcaataatcaaggattccgtaatctgtttattatgacatttctattacaggatccattatgattcatcccacacgaagattttcaaacttgtgattgtgagcgtaacataatcgaatcgattacaaagatataaactaactaaaatatgttaatttatattttgctttttttatagatatatatttantgattttaataaaacaatcatattattttaatgcgttgntgtttttgttttcacaattctattattatttcgagcatctcttatttttgtatctccaccaattcttttatcatttttatcatttcttatacaaagtgtaattcaatcattttacantatagtatgtatgcattccaaaaacatt

SEQ ID NO: 63505 - DNA, 490 bp, Arabidopsis thaliana landsberg
ccaaaaaacctccaacctaaaagatcgactctagtttcacctacacccatataccccctcaatcaaaacaacatccacctatcaaacaatactcctggcacaaacttatactctcaaattaactaccttcgcctccaccttaacaaaacaaaacccccaattccttgcaccccactattacgacaactaaaatctacatcaccccataacactaaatcatctacaccgaacacacggttaaatatctaacctaaccaattacaatactaacctcaactatttccaatccgataaaccaacgcctctacctcaaacaaattcaccactataacaagcatctcatgacatgatcacaaaactaataactcaacaaaatctacagaagaaatctccataacccgcttataaatccaaaaccaaactccaaaacactatcaatcggataaaagctctaactgcacaatcaaacaacaagcaccacaagtctaac

SEQ ID NO: 63506 - DNA, 1233 bp, Arabidopsis thaliana landsberg
ctaggatctttatgacacgacatctaagccagagaactagtcacctccatcttcttgcatactccctctagaatttttaaaaagtctctcacgattacgaatactttcaatagctgagcttcttcctttgcaggatcaacatggaaatactctgttatctttttcactgcaaagagcgtggaaccttcttctctttcaatctttttaatctcctcagcagcagtttccaagaatctggtcaccgactccctgaatttccaccattggtgttcctcactgtgtccagtctcctcacacagtagcagaacctcactaattttctgaacttcttcataaagctttgacacattcattcttacaacaccgtagtccaactctgcagatttcttggcatcgttaagaactgaactgagatttctgacaacttgtagccctttgattccttctgattcagtgatcttctgtacaacagaatccaagatactggttcttccatctgacgatttgatatcgacaaggccgaaggagcgcctcaagtttgaagtcatgagcattcccgctcttcattccagcctcaaaggtagctccaacaagtctcaataacattctgctatttcgcagtgcctcacaagcagcctgcaaaagaatcatatagctttatgagacgtaagcttacaacaacatacacattcataaatgtctcttgttatcttcatctttgttttatacctgtataacgctgaatgatcttttcaagtgtttgactttggagtcaaaactagcaacagagagcaatgcatcaacccgtttgaacacgaaaggaacattaagcaattccttgagaaacctctctgatggagcaagcttgatcactgaatcatcactatagctaatcaacttcttctcttcttcttcgctcggtgccactcttgctaaactctcaagaagctcaactccaagtgcatcatagtgacctgatgaaataaaagacaagtcagattcaactcgatacaatccgaataatgagaagaaattagctttgtcattgatgatttaccatctcgaagggcctgacaaacatcatttgtggtgagcttaagtgttgtaagcagaacagcaacattttgactcttccttggatccaaaactttgctctcttgatttagcatcggaagatcacagctaagacttctctgtttagagttagcatttgaagagttgtaggaagacggt

SEQ ID NO: 63507 - DNA, 581 bp, Arabidopsis thaliana landsberg
  unsure (1)..(581): unsure at all n locations
aaagtgtacactcacacaggaaaggaaacatgcattgtggcattgttagctaatttaaacaaaattcgaattgtgacatataaaagcaaaagaaacatcaatattcttgcgaggatttgatacacatatcttactgtaatattttttaacttatatatcaaaattgcagggaggggagtgttcttctagataaagtagagcaaaaggacgataaaaaattaaaaatataacagtaaaaaaagtaaagtaagacaaaattatttacataatttttttgatgtaacagaggaaagagaaaaactatttgattgccagtgtgggtttgcagagacaaatataccccgcgcctgcaaaatcctttactctgttttgttaatttacaagtttaccccttagatagttactgngatcccaccgtcgagatgtcttgtcacacgtgaattctactactaagatactattatttctctgctctccactttcacgtaacatcttatactatacagnttttatacattctctacgatatacaatctacgaaaaaaaaaacgatatacaatctaccgaaatagtataggtat

SEQ ID NO: 63508 - DNA, 1909 bp, Arabidopsis thaliana landsberg
ccaggttcccatccgtcttgacaccacaaccctctctctttaatcacctatatataattaaaaagtgaaatttaggttaattattacatatataacatgagagtatgtaagttaatgtttttaaaaatatatctatctattagtttatgatagattattatcccaaattttctaagccctaaatcattcttgctttcgtagttggtcccctccaacactattgttgcctctgcccacctttgaagagtcaccttcttcttctcccatctctactttttctccaagtaatgattcaatctttgatcatgacttgtgaattttattttcttttatttttatgctaagcattaataaataatatcttaatgctaattaagaaccgtatgatatacgtaattcaccttctctacctgaaattgttgcccccaaacgttggtgtccaaaaatcggctgttgtttcgttagccaccggaaacgtgcttgatattgggacgagacatagaccatgtcctcttagttcgtgattctcattttcatcttgactcttcgatttaccagatatctacatgaatccatactgaaattagtacttatttaaccatgattatagcacgaagactccaacttggacaaaactaaaacactagatcgtgtattgaacctgctgttgttgttggttcgaggcaccttgtttcatgtatggagtgcttagaacctgtatttaaaaaacattaatatgcttaaaaatttgctcatttctagggttttatgaattcagtgagttaggagagaaatcacaagaaacgtacagtgacttggtcgtgaaggaacttgatgtactctatagcttcttggagaacagatgcagtatctgtctgaagtttaacccaaagatatacaaaataaacaaactaagaagctcaatacataaccaagggaaaataaatgcttttggttgtatatattaagccatataaaataaagtaaacacataaatcattcacctttccgaaaggtgaaactagttgttgtaatgaagttatctggtcccttagattctcttttctcacctgttacatatacaatccattttatccaccaagaaattgaattaaaataaaaggtcttaaacaaatcttgaaatatgatcatgtaccttgaaagttggcaacggtgaaggcgtggtgactctcggtttctttcgccgcagattcattatcctttgctctcttcaaagactcactctgagctcttgtcttcagattcttctcaacaaaaataaataaataaataaattcaataatatagccacaaaacttatatagtagcaaaattattttgacatatatgagataatttaccttggttttgtcctccaaacgagtagatattatctgcggagtggttacaaaattgctcggcgtcgtgttgtttaagttagtggttgatgaagaattccaaaagggtcgagagtttgcgttgttagagaagctgttaattagtccataagctacttgatgatgaggatttgtcttattagcccaagaaagttgaggatcgttgattgaaccacttgtggtggagacaaagttgtatggacttggttcgggatcgtaaaaggttcgtatcaagcttgaggacgaagaagttgatggagatgaagaacaagctggattaagtatataaggtgaagtagttgtggataagaatccttggccatgatcttgatcttgtgagctccttatgaagcttgagtttaagtcttcttgtctgaaaaatacaaaacaagaacaaaagagatctcatgattattattaaaaatcttcaatcttgttcatcaagaaagtgaacaaaaaaaattaagttagggtttttctttaagaagtttacaaaatggtttgggtccaat

SEQ ID NO: 63509 - DNA, 378 bp, Arabidopsis thaliana landsberg
tttaaaatcacatgatttgaagaatcttattacatttaagctttcgtttcagatgatggataattcttactttccctttttaaaagtgtgtttaacattttgataatttacaaccgaaagaaagttatgttcgaacgttagttagttaccataattacagttattttacgaacataacgaaatttacgaatccaaaatctgtagacgcacaattagtcacataatcatgtttgagtctggcttgaaaggaaagatttgataaaatgttttgcccccatgccaaaatgttgtatggacttttaaagcccttacttcctcatttacaatactctcttttttttatttaatcatgtatcaaatttattctctttttttttt

SEQ ID NO: 63510 - DNA, 709 bp, Arabidopsis thaliana landsberg
  unsure (1)..(709): unsure at all n locations
taaacggctttttactctcaacttgtctgtggcaaagtttgatgttttctcttcatccatttctcagaccctaatccgcatttgggacatctagctttagccaatacttttatcataactgctgactctataagtatgttgagcgaggcatgtagtaccgggtatgtttaagaaaacgacaatcttttccttttcacactcttaaaatgatatcaaaatctcattctctacacaggaaacccgtttatgttgtgggtgctgaacggtgtacatggaaattttctgacttccagaagactctccatggtagaggagctgttcgacctttgaccggcaaagaagatgtaattctgataactctattcaagtcttttgtttttgtttacatgatagctatactccgagacacccttctcttttttgtttatgttccgataaatcctgacactagcttctacatggatttaatatttcaagatgtgtgagaagtggagttactctcctcttaacgataatgtagaagctgcgaggcgtgtgattcaagatctggccaagcgtggctgggaaatcgaggcatgaccgttctttccctccacaagttttccagagtactactctcttttccctatatagtctacagttattattttcgtactgggaattatcctccatagaagttaaatgctctagtcgaactcanggtcatata

SEQ ID NO: 63511 - DNA, 690 bp, Arabidopsis thaliana landsberg
tgccgacagacggaaagtgattagtaaagtcaagatagagtagatgctaacaattgttatcacaaacataaaattgcttcgttaattgaaagagaaagaaaaaaagacaaatcataatgtgggatgtgatctgaagtgacccagaagccaaaaagtttgaaatgtgtgacaaagaaacatgagaatctaattgaagatgtgaaaataaaaaaggaacaaaagttccacatcttacttctgtgtgtcccacgtgtctacgtcgtattatcgtgcgtatctattttcagatacgatctcaaaattttaatgaaagtcaaataacttaaatttatgaactataattgcaatttactttcttacatctagtaaggatgtctttaattatgactatattaaaaatatatgtttgcatgtaccacactttagggcctaaggtaaaaattgtcaacgcaaattcttttatacttattataatttagtttgcttttcaaagtgagtttgtgagcttagttatagtgtatttacatattaaaaaaaaaaattgccccctatattatatatatatatttataatatggctatactaagttttataataaaggatttttttaacccaagaaattaccccccaaaaacttttaaaattaccggagtttttaaaattatttatcggatcctttttttttttaa

SEQ ID NO: 63512 - DNA, 1353 bp, Arabidopsis thaliana landsberg
  unsure (1)..(1353): unsure at all n locations
aattacttgaaactctgaaaaaaccctagcgtataaaaatcttaccttagttcatgccaaaatatatccaccttatcagacaagaattttcgaagagaggannnnnnnnnnnnnnnnnnnnnnnnnntctgcccggtttgtcgattattctctctctcaagccttttgatgaaaagagctgacgcaaaatgaacaataactgagggatcaggatctccaaggactgcctgaagctctcttctaatccatggctcaattctttcagttatctttgctttggtgtaatcattcaccgccaaactctacaataatccaagatgacacaacgaagcaggtatatataaggcttccaatgtgaacatatatccaataatgtaagagtgtaaaccccaatactacaaacatcaaacatagaagaacacattgtataatgaaacttactagttccaagcgccttgaatgtaatcgaacagctcgtaattgcttagtgtatatgctgtatttagagccaacactagttagaaacaacggcgaactaatctaacacttcgaaaaaggagattgcaaatgaagctatagagttagaatcaatagtaaaccaacctagctcgccactgaagctttcgctggaagataacagaatcaggaactgaacctggtcgtccaaatgatctccgccatggcaatggccttgatcttgagctacagttttccaaaacatccctcgacctttgaattatcctaatgaaataataaccaagtgaatataataaagaagtgatttttaacttcatagagaggatcttagagagagagataacctccggcgatcggaaggattattccgatgataagttaaagtctcacgatcacgaagaattggtaattgctccttatggtattttctagaagcaaaatcactaacgataaaccaggaatcaaaacgagtgttacaaagaggacaattcctcttgaagctgctccacttccgaatacaagcaaggcagtatccgtgcttgcacaccgtgatcacggcggcggatcttcgctcggttagattttcgaggcatatcggacacgatttcccctgtaaagcaggaaatattgctctccctgcaaatttcgcgatactttccggcgatcgaagatgtctcgaagacgaagtcgccgtggaggacggtaatggaggcatgaccggagatagagattgttcggtaaagtcaggctcttggaaaagtcgggttttaatgaaccgagatggatttcagatagataaccggttaatgtaggtttgggttgactcggttcgagatttcttgtttcaaaatgaagagcgagcgtgaaggatctttt

SEQ ID NO: 63513 - DNA, 511 bp, Arabidopsis thaliana landsberg
  unsure (1)..(511): unsure at all n locations
catggatactgggcagatacaggtatcctcangatcattcacatgctttgannannntttttcctctctacataagtacaggancattgaggatatgatccatatgcttaagtgattgtctggaaaacagttcataggtgataataccttcttagcttcagtaccaaaacattcctggaagcatgttttataatcctgaagattaccttttgttttagtttttctccttagcttactagtcattgttttgcattcaggcctttctgaatttaggaagggcttttacagcagtaaatgcgcagagtacacaagtaaggttctatcataatcttctgttggtacgctggcaaggctcttaactatgaaacattttgacagacagagagaggtagagagagagcatagcagcagtatatgtgtatagtatatnagtaagaagaattccagaacatatgtgacctcatacttgtgaaacaatgttgctgaaacaattgaagttctatcaatttca

SEQ ID NO: 63514 - DNA, 143 bp, Arabidopsis thaliana landsberg
cgcgcccaaagaggagaggaaaagcggcactaccgaatccgcagtcaaacacaccagccaaaataatataaccggccaaccattaacagaagctaaccggccaggatcggattataacggaacgagtggatacaatccatggc

SEQ ID NO: 63515 - DNA, 198 bp, Arabidopsis thaliana landsberg
  unsure (1)..(198): unsure at all n locations
catttctctcttataatctgaatctaggcagggacttaaatggcagtangtaatttttaccttagggccctgggtgaagggattgatctaccaggcncanacggcttttgaaaggacatcagatagtcgcttatttgagtctcgagaaccgttgcacagcgttgaaggtgggtatgcaggttataaatcactgcaact

SEQ ID NO: 63516 - DNA, 1418 bp, Arabidopsis thaliana landsberg
gaaaaagagacagcatctttctttaatctaaagatctttatgtggtatgaggccttaagcccaattcaagcccagtttgtcttattgctaagataagaagagattagtaagaaaatattccaaatttatatcaaactttagtgtatactattttggctatttaattcgatttagattggattgttatattggtcgctcttaagaccttatctaatttacatttagacagtatccagttttatcatccactagtcaatgaaagggagatttttcgtcaggggtgatcgaaatatgacgtcgtgaagctttgaccacaaatatataaacatatcaacacgtcaacgaaattatcatatgctcgaccacaaactaaataatacaccgagcatttaaccccaatcactttgactttgacttttgtatccgttctgcacagcttattaatagaaatctgtttttcatctcttttcaattcatactacaaagtttccattaaaagaaaacttcctacaatgtcatcacttttctatgtcttcctcctcttggccgtcttcatcagccaccgtggagccatcaccgaagcagccgtcgaaccagttaaggacatcactggaaaacctctcctaacaggcttcaactactacatcttgcctgtgattcgcggccgtggaggcggactaaccatgtcaaacttaaagaccgaaacctgtcccacaagtgtgatccaagaccgattcgaagtctctcaaggcctaccggttaaattctcaccatatgacaaatcaagaatcatccctgtctcaactgatgtaaacatcaaattctctccaacttcgatctgggaattagccaatttcgacgagacgacgaaacaatggttcatttcaacttgtggcgttgaagggaatcccggtcagaaaacggttggtaactggttcaagatcgacaaatttgaaaaagattacaagatcaggttttgtcctactgtctgcaatttctgcaaagtcatctgtagagacgttggagtgtttgtgcaagatggaaagagaagacttgctttaagtgatgttccacttttgggttatgtacataagcgcatactagaagatgataaaacaaattccccaagaatttacaatgcttttgtaacaccattaataataaataagaacaatgcttgtttctgcatcttaatctatacattctttagaaatcatcaccacggaagaaaggtccattgaagaatgaagtggagaaagtacctccactgttaggaaatagagtgaggaagcaaatgagtccaaggactataccccaagcgaacctatcgtcccctacaggtgtgatttcgtcttttgcgggtgtttcttcgccaccagcggaagaaggttgcgaatagcccccagagtagaagctta

SEQ ID NO: 63517 - DNA, 6739 bp, Arabidopsis thaliana landsberg
gtggaggatctcttaatattttgtgatggtgacactaattaattgacttttaattatttgaacaaaaaaaaaatatgacaaagccaacgttgtagccagaggtttcgataaaccaatagccggaattcgcgcgtttttttgttttaaccaaaatcttaatgattataaagattctctaacaatgaaaaaaaaaagacattcttcatcacaccataagaaagctttctcctttattacatataattaaataaataatcttactatactgcgtaattgaataaatataggttctttttgtgccaacaaataatgattcaattagcaagtctccaaaagtaacatgacattagtggaaaaacaagtgtataataatgaaatgtggaggagcatgtgggtcgtgtcacgtcatgcttataattgcatttgcattagcaaacctataacattaatgacttcaaattttaacattagcaaatcagaatgatcatgccaactctcagcaaatatatttatcaaaaaaactctcaacaaatattacttgattttaaagatgacccaagctatcttcaatctcactttctgtagaatcactaatttgtgtctcacaattgtgcaaaactgtggccagttgctgtaaattgacagaaaattctttagttgacaatttgtcttgtactttggaacttgtagcagagtttctttgtccagagttaacactatccaaactaaactccaactcccaaactggatgtacaagcttaaatctccacttgtgctttatgtggaacttctccacaccaaaaatgagttgtgtaattcagtctgaaacatgtccactattccacatctatgttctctcgagtccacatcacacaatcaagtaggtgcatgtgcacatgttggaaccacaaacacaacaccctcactgtcctagtgttttgtaagagagagatgtgaagtagtctagaatgtctcatcaagtcgtcctccaaatgtgaccatatatcctcaccttctgtacacattttcaaaatagctgcaatggaaagtgaagttcctgaaaagtctagagtataaccagctcaattttgactttctgatatcctttgttgaatggccaactccatagacattaacacacactcatagtttggcttcatagtctgctttgacaagccagatccagacttttgaacattaattctcattccttcccatgcactgcttcaatttcgcgagaaacatcttgcataagcctatgtcccaaaactttcttcaagttctcaaacaacatgcactgcagctttctcgaattccacctcacaacagaacttgttttttgtcattttgatctcctctaagctaaatttaaacttgaatttccaagctttagggaacttcatatggttcatgtctctgacatactgcattattctcattttgcacctactgttccagcttcccttgagtctttttatgttgttcttggtatagccctctgcaaatacgcatgcttgtaattttgtcaggctactttttttcttcatctcgttgacaaatctataacagattctgttaaagtgtctgtctttcgttcgtaagatcattacgttcatataacaatatctttgatgcttgttttgttattcccaattgtcttgattaacgaagaaaaaaacgaatccttttaattttttctcctctgtttgttaatccgctactgctctgttagtctaatgtcaaagaaaccacgttgcttttgaacaacaatacatctgtattgggaaatctatgaatacttgacttctatatttaggaaaaccacaactcactttgcactgaaacgtcaacgttttgtttctttactttttttggttacaataacagagtcttcctattattcacttttttttatcttctttcacttatttccccatctccttcctcttgaatctttctcaagaaaaccatggatcagaaaagtgattcatttctctctgtttcatcgatttcattttcatattcttcttcaacagacaaagactttgatctgatatgcatgattagtcccatcgtacttctctacatcactctcctctccatcatcttctttgtagctgctttgattcaccttctggtcaaattcttacatagaccccaaactcgacttgacgacgcctatgatggcattacagagagttctactgctctgcaaggtcggtatcaaacacggtttaatctccatgacgcagaaattgaccaatcattcattgatgcattgcccttgttacattacaagaccatgattggtcttcgacacgacctctctgattgcgccgtttgtctcagagagttcacagccgaagacgagctccggctcttaccaaaatgcagccatgcattccatgtggagtgcatcgacacgtggctcctcacaaactcaacatgtcctctctgcagggacaacctcctcctccttggcctcactggcactgcttcgtcttccactattgtccttgtgcatgaatctgatggtgacaattcccaagactccgattcgtcgttcatgttaaccgatcttgatgatgtcgagtcaaaatgaggcctaagtggctgctgatttcttgactgggaagttaatggcattaaactctagataggcctaattgggtcaacgtgaagcctgtattcttataaccgtccggcccattttcttttgccatcaactcatatacgtgtacatgtattggttaaatcctaccaaacgaaccatgttggaattgaaacaacaataatggcataaagtatgcataaatgaggaccacaacagatacattgaacattagacattgcaagattggattggcagagacaggttcagtggtgatggccttgatatgggttccttgtctctttttactctgtcaaaacatttttcagacaacttgtttccttccatatcgttgtcatctttacagtttctctatatatatggctttatatcttagcttggagtgcaagaagtgatgaagatggtgaagtgtaagaaggttaggcaccgcggtcgcaaaggacaaaaggagaaacccaagtttcgagaaacttgtatgcaaagaaacctcgggatccttcgcaggattgtaccaggctgtgaagagatcgaagacgaggaagccttgtttctcaagtcaattcagcatctcttgcttctcaaatctcaggttaatttacttaaaaagctagctgatgtatgtggagtctaattaaaagaacgtaagttctcaagttgtttatgcattacattataagatcaagcgagagagacataagaaaacagaggaggggataaagtaaaattacacagagaaaaacgatgaacaaggcgatgaatttttttagtttttgttgtagaaagtgagagcgtaatttgtacttaaggaggaagaagagagagtgagcatgtgttggatcgttgtgacccatgtcttgtaacgattgtaatcgtcggccatgtctaacttgatagctcctctgttcgtcctcaggacaatgagataacaagtgtcctctatgttgttgtcttcgctatctgaatctttgtaaagttccacatgaacattcgtcacaatacctaaacacaaaacacatacaaaacaatgttttaaatcatagcttgaaggttaagtaacctaaaacaaaaaaaaaagattgagaagctagctgcatactttctttcttagtcctgagtagattatgtttcttcattttaagaatcacctgtggagatcaaacacaagatcatcgattagtagacgtcattggttaagagtaagagggattagagccaagtttaggacctttccatctttgtttaagaccatagaaaccgtcctagccttgaaatcccctgttttaatccaaagatctctttagtctctctacaaaacaaaggagttcaacaagaaaaacagaggatttatataccatctggtgtctcgacgaagagatctgttcccttagcaagaacagatgtgttcttatcgaattcaggaggcaaataagaagagtcttcaataggcaacacaggtgcagagccattcaatctattaatcttgcaacctcttcttgctttcagcgtcgcggcacctctcaacgcttattttaccaagcaccaatgtctcagaaacagagcattcttatagaaacaaaaacaaaaaacaatcttcttacaagttgtagctgaggcagtgagagtgagtatctcactaacacttgtcccggtcatggctgaaccaatcatcgtgctgagctggtctctgtttgctcccattgtctctgccatttgcgcacattgtgccgccaccacagccgcagcagaagccacagcagtctccctcgtgctaggtcgaccgtttccaccatcttttccagcgttctctgaagccacggcggcgagagcagcggcaagaccagccaatgacacggcggcgtggacttcagctctctgtagcctcacttcttcctttcgtttcgcctttatctctttccaccatttctttatcgacggcgtaattttccatggaagtttctacaaaaccattattgttttggtttagaaaccaatattgttgatttgataaatcaaaaccaaacgaaatggccaaaagggttttacaagtttcttgcggaaaaagccttcgtagctcaattccgggtgcattgcttgttgcatccatatccatgactgttcacatcattcaacaaattatagtatcaatatttaatctcttaactttcttcacttaattgtatatgtcattctatcatgtagcagttttattttcaatttctacaattccaatatgctgtcgtattacaatttaaatcatatatataccgaattttcattcgaatgtgcatcaaataaacatagacaacataaaaatgaggaatatatgttgaaaactatgatatcataatgttaaacgttactgtgatttttgttattttaaaaactatattttgcacacctaatttgttataccttcacatcattggttttccatgaaggcatcgagggcttaaaatctggatcgtccatcttcatgctcgtatccatcatctacttttacaatcatcataaattaaacactaaccaacaaaaattgaagaaaatataacaaaaaacaatctctggttacttacagcacaagaaacaggacttgagtcgccttgaaacttggcgatcgatgtctcgacgggaacaatggaacgatcgtagaggatagggtctggatgaagtgattgaacagcgaaattacaccattctcgagacagaaagtccatagtatctggatgtgcctctgaaggcgatggattatggtctgttgatgttaatgctaatgatagttccattgtttttttttgtttttggattcgaagattatgactttgagaatttgttgattgatcatatatatttatgttatggtatgaaagaggaaacgattaattaatttctattaaaattctggtgtggggatctaccttattattcttttcaaaaaaggtttgatggggagcatcatttccatgggtgggaatgatttgggccatgatcaaagtgattatcgttagacacattttcttttttatatctaaaaggatatggaggggtttagtctcaacttttctatcaaaatgggaattaggtgtctgtaataatgtcgttttatcattactcattagtagtaatacttttgattttgattggttgattagtaacttagtactcatgattttgcataatagtattaagccattcaagaaaaaaaagagagttattgattgcaaaaatctgcagaatgtcgagatattcaactattgtactatttctataacacaacgaaaagggtttccattatttcacgtccaagcatgaaagccaaatgtcggatttttttttttgtattttggtttccgattaaaaaaaatgtagttaagcagataaagtgtggataactttagtacagtactatgttttggttcagatacaaatatatcaaaatcaatgagaagtcttaactatatcattattgaaaatactttgtattgttgtttgaaaagattgaacgatttgatgtgatgtgaaatgagttaaccataataactaattgatttatcagagaggaaatgcatacacataaatagatgctaacttgtaaaccattattgacaacaatggatattggaccctcttacaactctttttcaaccatctttaaatttaaaccataggttcaagcgaagcacacaacaacaacatacatttaaatataatattttgggcctcttaacacttttcactcattcacaagtgattcatagctggatttctatcccaaaattctaacatgtatatgaattgaaaagatttggtcttcaactaaattaaaatgctttgagaaacgcaaaactggactataaccaatatacgtttatctgattgtagaagaattaataaagttcatatctgaatgctaagtgatttaaacaagttatattggaaaagatcatagataaagtgcaaatgtagttatcaatcagagtaacgacattgtatagatagataaagaggcataatcatgaacaagcatgcaaagggtcttaggctcttagctttcgtaaaaaggaagaagaccagttaatagtatatggttcaaataactcttatactttt

SEQ ID NO: 63518 - DNA, 1238 bp, Arabidopsis thaliana landsberg
atacctaaaacgacgtcatttcctttagggcattttctgattgaacgacgtcgtcttttcttctccgattagcgtcggtcgtcttcttcgtcttctctctgtcgctgatctgggttttgcttcaacgtgaaacatctttgaggttgatgatgaggtttctgtttacttaatatcctgtgagagaaaattcttcttgacttgaggtatgataatactctaattattgtttatttgtgttggatcaaatggatgataagaacttgttgatctacttctaaacctcttaattttggagactatgataagagtaaaggacatagtatgtttgaatactgatactgtagtctgtagtgttgctgacaaaaacgtataggtatatgtacatttgttttcgctgaggctaaagatggataagcttcttgagaatcatcagtttgcgacacatgcgatcgctgcctcggcctctgtctcgttaggaactgctctcgcttatcctttagataccatcaaaaccattatccaggttttttccctcttcttcaccaaattgttctttttatcacttagattcatctggggattgagaatagcattgaactacaggttggttcaggacccaataagaaattaagctcctttcaagtttttaatagagttcttcgattctctggctattcaggttcgcaaactactcttttagattccaatcattttctgattctgcatcaggcataatgacatgttcttcaaatgcaggtctgtacagtggtcttggatcgttaactttaggaagaatttctggttttggtgcaaggtttggtgtctatgagattctaacagctttctacaaaggtattacacaggtccatgtctcctttgttgtgtctgatttcgatgattcaagattaggtttctttgtgtctagctcctctgtcaattagctcaataacatcagttaattagtcaatacagcaatcatttgttcatggattatgttagaatatgcaacagtgttcacatacattcatgtcatttatacgcaaatttggttcctttttgggcaatacctttgtcttgaagaatctgaatatgaattcattttgctccagatggtcgacatgataactatgtgagtgttggtgaagcttttctggctggtctggtgggaggtgcagcagaaacagtgatgacttctccatttgagctaatcaaagtccgaaaacaagtgactgctgcat

SEQ ID NO: 63519 - DNA, 585 bp, Arabidopsis thaliana landsberg
agccttttcagttttttctcttctttctcttcaagaaaggcctcgcacttaatcctccagctgaagaattttcaaaatcaatgtcaacattctcatccaatgatgcatcttcttcatttcgacgtttacctttctttcgttgttcttcactctccatctttaaaatctctgcatcatcatccattgtgttttcctcagctgtttcatcttcatcaacacagaatccgccaccgatcactctgtaatcatcggtagctttatcttccaaatgagcatctccaatctcatcagcttcatctgcacagaacccacctcccgtttgaatgtagtcttcggaaggacagtcgttgattgatgcatctacagaatcatcatttcctattctgccttcgtcaacctcttcgaaattctcactcggagatccttcattgcttcttgactcgtccaattcatcatcttcttttgcactgtacttcacaggattccgagatcgtgttgactggggaatgacagataacaaagtgaacccactacataatcaattaaaagaagtaatttggttccattaagaaagcttacctttcg

SEQ ID NO: 63520 - DNA, 138 bp, Arabidopsis thaliana landsberg
ttaagaacagtgtcgtatgctttagttcgaaatctcgaattctatatgtaagaatatgactatatgagtgtaccaaacactttttttttccttcacgaaaaaatcgatttggctcgtcaaataactagaaataggacg

SEQ ID NO: 63521 - DNA, 603 bp, Arabidopsis thaliana landsberg
  unsure (1)..(603): unsure at all n locations
ttgctgattcccgtccaactcaatggaaattattaagaaacaaaaatcttggttattcacttaattaaagaaaaaatcactaaatggaggcgaatttttggttttttaatagatgaatatagtttgcttatttgcaaaaaaaattcagtctccacaaagataaaaagaaacctcgttcttgtcaatccacaagtaaaaaacaatccattaacggtaactaacttctaaacgtggatcatcaccaaacgctaaaaggaacaatcactcaaacaatgcaaatgcacacaatcatgtgaaccaagtcaaaacaaatcttcgttaccgtacacgtgtcttatctaaaagcaagagttgtttgacgatctcgcgtgtggttgaagcaaggcattttcgcgtttaaggcggtccagcactctctgatatttttattatcaaactataaaaccacagaaaacattataactggaatttaggaacattaaaatgttattacaatattacggaaaaatctcttataccgatgagatttctcacgggagcaaaggggaccgcttgaaccgtggtagatgataacanaattaaaataactatatgaaataaaat

SEQ ID NO: 63522 - DNA, 611 bp, Arabidopsis thaliana landsberg
ctttcttgattcaaaatcttctataaaaattatgaattttttttctaacacaaaagatgatgatctcaaatggttatgacctatttgaggcatcccaaaatgtggttgtagactcagagtctgagtatatgcctacatggtatacataccatattgacagattcataacatttacaatggtaacatactgtttttacaatatttgttgtcgcttactcatttatcgtgttaaaatagatcttatcctgaattttaaaattcagataactgacaaaccaaaagattaatgctaattgtatatgaaatgaaatgtattgttgtacattttaaactatatagacaatctaatgatatttacaatcacaaccgatcgatttgtcaatttttgttgtcgctgcattatttattgtattaatatcaatcgaaccctaaattctacatgtaattcacctacaatcaacaataattaatgctaactatatctgaaaatacatgcattcaatttaaaattatcttgacaattgcttcattccatataggatgccatttttataatttattgcacttccaatcgattaaacctctgaaacttaaccatgtagatcattaac

SEQ ID NO: 63523 - DNA, 571 bp, Arabidopsis thaliana landsberg
  unsure (1)..(571): unsure at all n locations
atggccgtacaaatctaatctttttccctcgagccttatatccattttttaatattaacaatcaaacatttgggctgtaaatacttatctcaacaaactcaatcatcaaataaacacaacaaaatgggaaactgcatatgcgtaacggaaaaaacgacgacgtcgtggtcaggagacgataatggatcatataacaagagaaggagaagaagaagaagaagatccaccgtggttcacgacgacaacgacgacggagagaagctgctcggagaaacaagcaacgttacgtcaacaagttcgtcatcgtcttctgagagaagagagattaagataaggataacgaaaaaggaacttgaagatctcatgagaaacattggtttgaagagtttaacggcggaagagattctttctaagttaattttcgaaggtggagaccaaatcggattctctgcggtcgatgtgacgaatcaccaccaaccatggaaaccggtgntgcaaagcataccggagatggattagtgttacttttttatttttcttattaaaaaatagataaaaaaatctgagtgat

SEQ ID NO: 63524 - DNA, 727 bp, Arabidopsis thaliana landsberg
gaatactacaagacgtaggagaagcacttccatatctcttaatacgacaaggttatcagcaatgttgtggaacttgatttgaagtcaatggaagcatttactgctcatatttgattcgatttgttgaatagacgtagaattttccattcaattaaactgtacacaagtaaattttttatttttcttataaagtctttttttgtttgtttaaacagaaattagtagtacagaaaatgaaatatttttctatacaacgaaaacacctctaagttttatttatagatttgaaaaaagttgttattattattttattttttggcatcgaaattatttctattctgggagagcgtttgtatttcaaattctattttttttggtcaaaacaaaacacctttagattacttttcagtttcttacattttagtttaacgcacagaaaaaaaaaatactattttctatccaatccggagaagactaaatgacaggtcagcaaaattcgtctctctttctttttaaaagaaaaattattgacgcaatcaatacagccaaacatcgttccatgaagaagaaaaaacaacaacaacaaggtcagccatgggggaaagaagagaaaaagtcgatagatgggtttagaatccaaagtagttgatccgttgaaaatttatttcttatttaaacgttgaaaaaaaagagaaattttggcaaaaaaccccaaacaaaaaaaacc

SEQ ID NO: 63525 - DNA, 573 bp, Arabidopsis thaliana landsberg
gtttgctatttgtaccactaaatcagatttattacaatcatttgtttatctgatcgtgtaaattgattatcgagtctctatatgtttgaatcatcgtcttcttttatttctatgtagcatgacttattccaacaaacgtataacgtaattaatacacaaattatgaaattaatcgacattattaaatatattggaccactctctaaaataaccccacgctcaaagcaactacgctaattgttgtaataaattaaatatcattcactacacctttttgtgcactaaaatgtaacttaacctactactaaacgacgccaaactaattactatatgcatcaacttgtcaactgggcaatatatatatcaactgattttgcttattacgctcaatgttgaaggtataacaatcggtttaacaaatcctgcttgtaagaaatacaaatatattttggataccgcggatgggaaggtggtgcactatagactggaaaccacttacacgttaattttagacattacaagtttgatattcggtatgagatatcgtgttggttggaaaaaaagagatgcatg

SEQ ID NO: 63526 - DNA, 225 bp, Arabidopsis thaliana landsberg
cctgaagctatcttctttaacattttgcttatgctcccatccttcattttctcatcttctccgtgaagaacagggaaaggaattgatacctagttcaaaagccatatatatataactaattaataatcaagttttgtgaaatgttttcttcattatctctccccaccctctcttatccctttctttgccttccctacctacctcctggtggagtttctttcttca

SEQ ID NO: 63527 - DNA, 708 bp, Arabidopsis thaliana landsberg
tctttccctcgtttcagccattcgtccagtggaggagtaaccttcttttgttcccgtcccaacgccatgatccgactatgtaaagtctcatttagcttcggcgacgttagggttccggcgaatcgaatcgacggtaatctcctggacaggagattttttattgcgtatcgtccaaggcatttcattatgctctctattctcaagagatacaagtcggtaattaaaatcttatatagataaataaatgaaatactgcgtatcgtccaaggcgttgcgttatattctcaatctatataaataaaatgaaatattgggaggtaattaatccattaattctaaaatctgaccaagaatacaaaagaaaaaaaaaagctatggacatgagcttcgttggcccaaaaaaagttaaaaggccatttagagcaaacattaaaagaatgctacttatgggagaaccaaagtgatagtggtcttcctcttccacaaccttttcatgtgtctctaggttctgtaaccggcagacgtggatggtagtgagaaagaacacgataaagcctgctgaatttgaggttcgattctgcattttgatacaattattcccaaattcaaaacaagtttgaatcaaaaacttgtttttctttttctttgattaattggccagccaagaattgagaagaagtgagttagtcaacatatctctttctaacc

SEQ ID NO: 63528 - DNA, 585 bp, Arabidopsis thaliana landsberg
  unsure (1)..(585): unsure at all n locations
ttttatgtagtggactattatactcgttaacgacatatatataacaatttcgaatcagattcagattcgcagatactccaatcttttacttgtaatcagataaatcgacgagattggagctgaaagaagagctcaggccatcgaatttcgcaatccctaaaactacttaacagataaaattctaattctgagctcaataaagaaaggaattaactaatctaagctcgaactagaatcagaagacgaaaaaatcgaaacttaccgccatgagtttgagaacgaagagacgaaacgaagatctgggagaacaaatatcgatacgcttgtggtttctctcgatttagggtttttggnnnnnnnnnnnnnnnnnnnnnnnnnnnnnnnnnnnnnnnnnnnnnnnnntcataaggcccattattggttcaactggcttgctttgtgaaatctccataaaagtgaaaacaaataatacatgacaaaaacgacatgcattccaacctaatgacataaaaccggcaagaagaatggtttctcgagaacaaaagtccattatattgcattcatctttacacaatgatcaaattt

SEQ ID NO: 63529 - DNA, 141 bp, Arabidopsis thaliana landsberg
  unsure (1)..(141): unsure at all n locations
cctaaanaaaatccctattttattttatcttaatgattttacacttgtgnattaatattaataanaaatttcttataacaaaattgaaatagatttttgaattttttttatctagcccttaatttaccttttattataaaa

SEQ ID NO: 63530 - DNA, 382 bp, Arabidopsis thaliana landsberg
  unsure (1)..(382): unsure at all n locations
acaaaactctatcccattgaacttgcgttgacagatcatcatttagatcaggggcatcccagttaaagggaggtgaaaaacaaattgcggganantcaaagaatgacaggatcggacgtatgttggaacccgattatgcggcagatggactagcatcactatttatacaattccaaaataatattaacactaccgttgtaacacatgttaaatcctaagtatattaacaatggttgcgtggaattctgatatacattcctgaataaaaattaaaaactctaaatataactattctataactatttactaacttacataccttttatagaaactcaattctaataattaaattattcctgcacgtgaatccgccgggctcaaa

SEQ ID NO: 63531 - DNA, 554 bp, Arabidopsis thaliana landsberg
  unsure (1)..(554): unsure at all n locations
actaacctatatatgtatgtgtaatgtgtgtatcgatgtatgtatcatgaacatagtaagatatattgtcttattcttggactaaccttggttctgttagaaggagatgaagcggtgtcttcttcgatacaacccataggagaagcagcgtctgacatcattgaagaatcatcgtaatggcctaatccatcttctgtttcaaagtacattgtccaactactctcttctagaccctcttgcatagttctctgttgattagagaaatttgttcgcctcacacagttgcttagtgctgagttttccattgagactttcttagataattaagaggctggtgaagagtagtttgatattataacagaaagatgtgagaagctattaatatggttcttagatttttatttgcctaattctctcaaatgtgacctctatatagtgggggaggcagaggtcaggaatgttgtaggtttggcacgattttggccctttgttcttattattggttaactatttactngntataatattatctggtggttttaatattctaaatg

SEQ ID NO: 63532 - DNA, 1280 bp, Arabidopsis thaliana landsberg
cttcatccgtaatggtttgttgaaaaacttgaaccagcacttttgttgacaaccatatctatcgggcaacccatgttgatgtctatgaaatcaacagtgcattctcggtctataagttcaactacgcgcgacaccgtgtcaggataagaaccgcaaatctgaacaccaaacagatcttccgatgaatgtcgtctaagcagagcccattcagaagcttggccctataacaaatcattttgcaggttttcacattatgacaaagaaaaggtttaatcattcttgcagcatagctgtgagtgtaattagtggcctaacctgcaaaagatttgtgcacatagccatctcaccacaagtcacatctgctcccaacactttacaaagtcttcggaagggaagattgcccacggttgttaagggtgcaaggtacaacttatccctaaaatcaattagctttttcttttctcgagggtgcaactttagactactatcagtttcaacaattttgatgctatcctcatcttctacgttagcttttgaagtaggatacccattctttttcgtttcctcttccaatttcacgcctgtatcaatacaattaactggaacattaggatattttcttgcctcacacccttcttacgtcaactttttctctttaatacatagctaagagatatagctacacacagtaattataagtattcaaaccatgcaactatctgagattatctagcaaaagttaattggcatttggaaatgtagaaaagtaagtctaaccatcataaactccaccaacatctccagttttagaattcttttggtcctcagattttgcctttttcatgggacgaacttcctcagtttctaatggtccaggaatatcaacatcttgtatcatttctgatgtatgctcagaactgacagctgagtcaaccgctacttcagttgcttgagtgccgttcataccattttgagttttttctgcggtaatttcctcggcagcattgctttttttggcatgtccctagaaattttatgaaaataaaaagaaaaaccagtcaggtctcatggtaagagatatgggaatgaagcagtatatgacaagccagagaactaggaaacaaacaaaaatcatgaaaacaagaacaaaataacactctgtaagacataccaacagaccgagggacgtaagtttcgcatctgcgtttgtaaaagtcatcttatttttccacagaagcctatggtctctttgttaaaaaagttcatctctgatttttctc

SEQ ID NO: 63533 - DNA, 1436 bp, Arabidopsis thaliana landsberg
ccgggccgggtgcgtctttttataatggcatcaggattaacacctattcccgcgtttgcaatgttttaagacctttgacccaaaccaaccaattggatcgataaaattgggacctagttactattctgatatggatatattgctaaaacatacaatatcgaatctcgcggtgagttgtcatgaattacatgttatctggtcggataatgataaaaaaaaaatgtttttccaaaatatattaatttaattagagcttttaatgttaaacatttactatatagttttgcttcactttgcagaattaaaaaagaaagaaaaaaaattggaaaactttttaatattatttgtagaattaggaaattttttttaactgtgtcacatccagaaaatgggcctaacaaccctttgaaataaattagaagacaggggctatataatatgggcctcgttcacttttcttccacgccaacattcatcccacaacaacaaaacaatcgtcacttttataattcattccaaaagaattttaatatatattcacacaaacatataacatctaaataaataaatcgaatctctttcttttttaactcatataaaaatcaatctttattttacgtgaagaaattattctctgattttatatgataaaaatagaaaaattagattcaatatctacattacttattctggaatggtcatagtcttaagtcttaaatgcatgtaaataaatatatgaatagcgattgtctaccaaaaaaaaaagaaaaaaaagtaaaacgatacggcagatgcacctaacaacaacgcggctctctctttctctcttctacttaagaaaattcagaaaagacaactcccaagtcaaaagtcaccgagtcacatctcctaactgaaaaaaactcgccgccggagccaccatttgcgatttagattgccgtcctctcggtttcctcttaggtcttcctttcgccttcctttctctccttctctccatcatcggtgtcattatctggatcgtcgggtcagtttatctcatctctgatttttttgattttgaatttggaatcatcaatttagcttctggttgaaatttgttttgtttggcagattgttgttatcatgcatatgtccatgttgcttgtgtgtgactgtactagtggagatcgcaattggtttgattaaagccccaattcatgttatggagtggttcatgtccaagatcccttgttgagatcttctccttcttcttctagatttgttcttccatgtacataacttgtattggatttgctttttatgttctgatttgtgtgcaattcttcttcttttactgcttcaaaagagtttaagaacatgtagtgtagctattatattcatgggaatttgcaattggtttcttctttttcggcttcttcttcttggttcttctttga

SEQ ID NO: 63534 - DNA, 1841 bp, Arabidopsis thaliana landsberg
  unsure (1)..(1841): unsure at all n locations
ctaacgacttgctcctgtagtaaagttttctcaatctttcattttgttgccaagatagtttgcctttgagatgtctggtatgataatttactgtgctggttaactttagaccctgattgtgagcttttggaaatctggtgcttccaggtgtcagttgttcagccagtctcgggatgtggccttgccattctttccgtcttttcgcatttttatttgaaggaagtcatgaatgtttttgactggattgggattactgttgccggcattgggaccataggtaacatcaatcgttgttgcttcgttgagtgttgcttactnnnnnnnnnnnnnnnnnnnnnnnnnnnnnnaaagatattatgatactacaggaaatcacctaatatgttttgacgatttatacattttgccgtaggagttggggctggtggtgaggagcaagaagcatcattaatatctgtcttccagttgctgtggctagcattggttgttgccatcttgtttgtaggtacctttcatccatggtatatgatagaacgtcttcctctattgtcatcatctcctttttatcttctgttgactgatggctttctcttgacttgtatacatcattgagttgtaaaacaattggttttttttatattttgtttttatcagataatatcagtatatcgtttaattactgtggtaatggcaatgtttctaataacttctgtgttggatttttgtgacaaggtactactaaatgcgtggcttcatatcttcaaacgccagcgcatggagcaggagctggtatatcatcctcttaactatctaatttttttgagctgttagaagtagtatcaccgttaatgttactctctttaatttctcctaccaaatgcacttagcctaatttattttttgtagggggaatatgaagtggtggaagaaatcatatatggcttggaatctggcattttattcgggtatctttcagtgcccataaacatcaaagagcatatcgttttcgcattatgtaccgagcctctgatgtttaccgattatctcctatatatccattaacatgtgctgttaattttagaaaacataaaaggaagaacctatgtcctggtgtctgcagaaacatttgagatagagaaaaatgtatttgaactgattttatcgtttgttgcgtagctgacaataagttataactcgtttgatcacagaatggcatctgtagtatcaaagatgggttttgtattcgtggagcagggattttctacaatgttcattcccatgtgcatttcgattagtatatgctgtagtggaactggatttttctaccaggtactttgtccgagcttagtctttttacacttcctcatagtcttatctccatatgaatgtgtaatgcaccgccatgtataacataaaggattctctctgtacatgtagttttttataggtttatattcaggttttttaagtaaccatgattctcgtcttctttttgtttttactttaccagactcggggactaaaacatgggagagcaatcgtagtatccacttgcgctgctgtggcatcaattgtaacaggtgtggttgcaggaatgtttgctctgggtgagaaattacccacttcaccatctggacggcttttacttctcctgggatggtaaagttctactcattactttctttgtattgttagtgtgctagttaaagacaacttctatcagtcattagagaaacatcacttacacatgaatcagaagttgcaaaagatctttccaaatagtttttctgccatcagagctatagattttgattattggggactcttaaactttttgcagg

SEQ ID NO: 63535 - DNA, 328 bp, Arabidopsis thaliana landsberg
  unsure (1)..(328): unsure at all n locations
gctatatgtcacgtgaaaacagataaatgtaaaatgtgtcgattattttatatctttccatctaccaaaatttcaattcttttgagatggtcacatgattattaaaaatatcggggtaagtcagacgatacattgaacacctattggtagtaaaaaatgattatgtatatacgtggctactagatataccatatataacactatatatataatgtacactgaaaagtctggaccaaaacagtataaacattagatactggaaannnnnnnnnnnnnnnnnnaaagaatagacaatagagtctagctaggttcaatctctaattaaaac

SEQ ID NO: 63536 - DNA, 1048 bp, Arabidopsis thaliana landsberg
taaatcttgaccgtgaagaagctttcgccaaggtccattcttagtttgactccatgtatctaaatgaccacatcttaaggtttttgccttaatcacccctcatatgtttcctcctgcattaaaatcccacaaaacaacccatcattctcttagacgaggcaaatacaaagacgtaaaaagaaaatagcagcggtactttgtggtttgtgtttgaatgcaaagggatagaggtgtatctatgaaagattcatccaccggtttggtaggtgtgcgtttaaaagcagatgtaaccacaaagagaaaagagaaatgagtgtcttgaaaacatttactctcaaaaggcttacaaggtctctgctgaacagcctagttagacgactctatccctaccttggtgtctaggtctctgcttcctgcttttaattgctgataggccttaacttttttcctcttaatcaggtctccatcttctctcttgcgttgaattcccttgctagctctctctttcccttctatggtgcaaaaaaaaggcatcattcgcatgacgacttcatttgtttctcttggtgggacacatgcaaatagccatatgcaaacctgtgaaagctatgtgtagctaataacataataatcttggtctggattgataaacatatgctttgtcaaggttcggtcaccaagaatctccgcaagaacacagtccactttcaaaatgatgaaatctattggcatccctcatcacaatgtctcgtctgaataatttagagaccagcttacaaaaagtatggcaatctctacagacacgtaaattttttgtgatccgtagacaggctcggtcaggtgttctgagcagaccataagcaatcgctatcctctcactatgtccatgcagcatctgaaccttctccccttcatctacattatgcagaacgaactttgtatcggctacataacctacttccctctccaacttcctagtaacctcggacaatttctcatatatctctttgctctctgggtgagacttgtctctggctgtaaatttatg

SEQ ID NO: 63537 - DNA, 558 bp, Arabidopsis thaliana landsberg
caactccaagatctatgtggacttcttctgctgtagcttgatcgattaaaatattcatggtatgtcggtcaccaagaccaacgatgtacccaacctgatagcaaatcaaatgccatttagtcgggttcaaatgattttttccgttttatattctaaagtatacacaaattgaaattcccatctatcttaagctgaaagaggataaatatcatcaaaagtgaatatactttccattgaactagctgcaacactacgtgtataagcaagcctcttgacaaaccagtcagcaggctgcagaaacttttccaggaaaaagtaatgcatgacaggcctgcaaaaggggatggatttttcagccaccaacctacttacggagtaagttaaattaacgtttcacaaaaaatgaaacctgaagtttgtgcagacatccacgaaggctttgcgcttgtccttcgcctacaagccaccaatcaatcaccgcgtatcagttgaggtgtattaccaggtgtcagtgatggacaactaagaagaacttgtgaaggaaacaagcttacactc

SEQ ID NO: 63538 - DNA, 734 bp, Arabidopsis thaliana landsberg
  unsure (1)..(734): unsure at all n locations
tatgtaaaaagacaataagatgtcaaataaatgctgaaatgtaatcaaaattatagaaacgaatttcataaaaaaaaaaaatatatatatatatataataataataataataataataataagatatgtcaatgcatgcttaggttaacaaattaactaagcaaaacttaaaaagaaaaagatgcttagtttatgttcagtacaaaatcttatcaagctcatatatgtagcaaacaaatgaagccttatatgtatctatgtatattaattgaaatatgggtctgtgaaatcgtatcagtactgttattttacacgttagacatttgaagactctcatacaaaaaaagggtgacacacttgccaatattgtagtgaaaagcagcaaaccacagagactctgaaagtactaaagacataaagaacatttactgtcttgttaaatctcagtctcagacttcacagtctcaagtctctcggttctttgtaatgcaatgatttattcatgcatcagtgagcaaagacacgtcctctgattgatttgaaaacagnatgtatttatatatatttatttaccgatttaaggtgaaaacgtttttgttttttttcgaggaaatttagtgagcaaacctattttctttggtttttaccttttgggtttactcggaataatgaaaggaaaaaagaagtcgatttacatggaaaagaaaacgaaattcttcaaaaagtaatgcgta

SEQ ID NO: 63539 - DNA, 280 bp, Arabidopsis thaliana landsberg
gtacgtagaagaaaatggctgccttatcagagaaagaggctgatgcttatctcgacgcatggcctagatatccgagggattggtttaagaaaattgccgcacggacacaggaccacaaatttgcttgggatgttggaactggtaatggtcaagctgctattggggtaagctttataatactatatatcttctaatttagatttgggaaaatctgaaaaccttcctttagtatgaagttcttttttttttttttccttttttctttttttcctttagtatg

SEQ ID NO: 63540 - DNA, 145 bp, Arabidopsis thaliana landsberg
accgtatacttcttgatttttggaaacagctatatgttttacttgtaactctttcagtacacgagcctgtgtgtcggcaagaagctgtgcctacctttacacctgttatacacaacagttcagcgggacacaggagcacgcggat

SEQ ID NO: 63541 - DNA, 1722 bp, Arabidopsis thaliana landsberg
aataaagatgaaacacgatcatcattacaattggagatatttgaaagaattccaattccagatttacctgtcagaatagtacatctacatatgagtgtctcatgtttcttttctgccagtgagcttttccctgtagttttcaccaccattttttctttcactgttgtatgtaggtaattttccctcacaagaagctttactttcgcatcatagatacagtaagtgtggttgcattacagacacaattttgtttatattatctttgttgacccaattcttggaatcttttgttaggtacgtctggatattgctagtattctgggacttacggcatactttgtaaactacaagtttgagaacatctcatcatccccgtatatctctcatcctcttccttctaagccgcctaatacaaagaattaagattagtcctttgctacacagatcagcattctttcttgacgtgatcgccgtcacagctctggtaatatatgcaacacgagtggttttgggttacaagcagacatgggatagatatcaagtgagttgaaactcataatcatactctctttactataatgggtcttagtgctaaattttgaaaatatcccttgcaattgatctacttcctcagttgctagtaaacaagacactttatgagaaaaccttagccagtggctttggctctgtccatttcctattggatgcctcggagcagcaacaggcaagatctcattcatttatccctttcttatacctttgaaaatatgcatgaacgatttcgtattggaaaatcttttgcttaatggttttttactccaattactccctatctgcagtacaaggaggcaatattgacatatgcaattattctccaagcgggaaaaaatcaggttagacataaccagtcactcttttgtcttaatgccatgcctcatgtcggatagctcaacttcaagctctatcaacgatcaacgatgcttatgaataaactatttgcctgcagaatatgtcttataaaggagttggagatagatgcgagagattcatgtatgacactttcaaaataaaggtctgttttaaactgaactcttatagcaacattactaaaccttgttgctgactcactaaaaactactaacaggttgagatgcgagtagaaaaagctataagcacgttggtgagacttggtctagtaacagagacactggtcgatagcaacaccaagttacaggctgttccttgtcctcaggcttatatatctcttaaagaactatggagcagtctgcttggttgaattcagtccgtggttgaatgtagtaacatttttgctatattgtacaagatcttcaataaaacccgaatagattgtacataaacagaatctgctaacataatgttcttcttttttctgtgattatacagtcaaaaacagagttttatagatttgtctgatgctcacagctcgaggggttgagattttgtaaagacaaatactcctccttctcctacagaccgtcccaaaagcatgttgttatcgagatacgataggtaatacaatccacctacagatcttctgtattagaggaacatctttagcatccatagtcatatcttaaaacataggttatggaaaataaacaaagatcattgtatacctttctgggctggttgcgtttactggaatctgagctttgaaagtaccgttacactgcaaaagct

SEQ ID NO: 63542 - DNA, 1941 bp, Arabidopsis thaliana landsberg
gaaatgtaggaaatgagataatacctgaaccatggtagaagcaaagtcaagattatcttctccctcattaattgtagagagctctcggtagactctttcggcatccaaaagtacacacattcttcggacaataagggcaccgcgcctataacgagatatgttttgaccaactaaataatatgttctttccagatacctaaaaggcggattattagatgcaactaacctttccaaaagagaattatcagctcggaaattgtggacaagaaatacgatgagctggcgaaagtgttgtggatcttttgctacaccagcatgaacctccagaaccaagagcaccacctaaagtatatttccaagtccagatagttcaaatatcaaataagtttattactaggcaaaaccaaacctttatattataaagttcaccaaccaatcaaacgaacagtcagggagatagaacttacgtcatcagaagaatcagatagtgcttttagaagggtgtcaaatatgtcattcaggaagcacaagacctgttgcagcattaccaatttagctataacgcgataaacaaaaaggctaactagaaaagaatgatgcccaagcaaaaaccagtttcttcacctcagtacgatgcttgtttaaaagtgttgatatccaattcaatgcttcaatccgagtagcctcaaactcacttgatagctgcctgctcaatgcaaaaactcacaaataaacaggcgcgatttaataatattcaaacggatataaaaacaacaatagagaaaaactaacctccttgcaacagagagaattgcgccaacatcaaaaccatctgagggttcaacatggattgaacgaagttcttcattggtttcacgagcaaccttatgcaaataaaaatcaaaaaacaaagaaagtaaaaagatgcatacaaaacctacagtttccatcactgaggaggagaagcaaacttaccaccctgattttctcttctttgtcagatatgcaaggcaagatagccccaagaatgtcagcataataacgcacgagctggtctcccccaagttttacaaactcgtttatctacaacatttaataaaaagcagatattcttagtatatgaatctcccgagaagtcaaaatagtaccaatctatataactggaagacgccaagcagaagcatggtttattctgcttacccacgtgatggctgttaatcgagtgaattcatcaggagaagcagccctctgcaccagtatttcagccatgcgaccataatctacagacttcaacaatattactgccccagtcagtaatataccattgaaacataaaaacagtctttaaaaacaaacatgaactaacaatataagatagatccacagaaaatgggatttttatagcagcatttttatcttagtcccaaactaaggacgaaacagaagtcttactggtgaattttttatctcttgaagaaactctgaaagagctgaatcagcttgctgtcgtatttcatgactagagtcgctcaacatattgaataaccctggaaatttattacaagttgagtcagctgagtacacaaataactatacttgaatacggtcatatacatctagctaaagttatcaaattgcaattaccatcgagaaagtctggcagaaacccaagcatgtcaatgtctggaacactatcaagaacagtgatccatccaaccagaaattgccggacgtaagggttgagaacgttcattcgctcttttaaaagaggtatgaattcctcaatactgcaaaccaaatcccaaaaaatcgagagtcgagtaaagctaatactaacagatttattttcataaacagacaaaaaaagccaactgaacacacctgaactgatcactttccgtcacaatatcctgctttacaaggtattaaatctattcagca

SEQ ID NO: 63543 - DNA, 542 bp, Arabidopsis thaliana landsberg
gtttacaagctcataggattatacgctgatgacatttatataaatcattaaactacaatgtatgttctaaaaatcttccaattttaaagtaaatagtataaaattaaatatatgcataaagtttaaacttagtttgtttccaaagcaaggaataatgtgcagggattcagaactttggaaattcttgtgagtttttttaaaattataagaactttggaaattaaactttacaagaaaatcttcatacaatcataaattcagctacaattgaaaagttgtagaagaacaaaaatagacaatgaaattagtgtttcttcaaataaaatggaacattttcttttgatgatattaattagcctttagaaaagttgtgatactcataaattgaattactcattttttctagagactccatacattgaatttaatctcataagaaatgtaaaatctacttttcaattgttttatcacaaataaattattggttagaaagtgaattatcgagatgaatatatatatatatatatatatatatatatatc

SEQ ID NO: 63544 - DNA, 776 bp, Arabidopsis thaliana landsberg
ggggatattttcacactcctctctattatacaaaacaataaaccctctccagctgatttctctcattgtgaaatgcaaattgcctataaaagtcctcagggtgtgagaagacacttatcaaacagacattacacatgcattcatagaaactatgcagcctcaaactctattttagatgcattaagaaccagaaaacataggtgcgaacctgttcacggtagctataataattatggcctgaagtagctatgttggttaagatatgtagattactgctcccactaacttttgatctactacacacctgcctcctaccaagaaaggtaaaatcttcagaaccaaagaaaatgaaacaaaacacattatatgtgagatttaaaagactcctttaaatgatgaatctggcttttaccagtaagctaaattttacatgtgacatattcaatattattcatacttggcttattgcttattggagatgtgtgcattttcttgtgtgataaatgtactgttggtaacaggtaatgcaagttctatggagttattaaacttgaagaatccaagtaaacttacatccagaaattgcctggtgcccatggtacataaatagccaaacagaaaaagaaaagaagcagaagcagaagaagaaagaattggttttacagaaaagtattcagtcctgagtttgtaaaggaagagaaaaaaagtctttaaagggaattgtaatagaaatttcaacttgaaaaatacaattaaaataattaaagttttaaaaa

SEQ ID NO: 63545 - DNA, 577 bp, Arabidopsis thaliana landsberg
cgccttatacataggatactttttttttcttttccttttgcctcaacagaaatggatattgtatttgttgttctaattatataatgggaaataaaatatattgaatcaaaaataggaccttgtatataagttacaaaataaaaaggttaacgtcactctagaagctggactgcacctatagaaggaattgattccctcagtttttgagtcaacgcgacacgaacagtcatgactccagctgctggtccagtgagtcaaaccttgaccacgtaaccatcaatctgaactaactcaagccccccacctgcagtaccggataggtacggccttaactcagagagaacctaaattgacaacaaaccacaaaaggaccattcagatcaatttcaaaaccaaggggctaataaaccaaaaataactaaacctttaaaaaaccaaaccttctcaatgatctcatcgatcagctctaaacctcctgtctcggattcaagatactgctcaacggacatgatctctggaatcttgtctcgaagacgactctcgattcccattttcacgtcattgatgagctaggaca

SEQ ID NO: 63546 - DNA, 325 bp, Arabidopsis thaliana landsberg
aggattagacagagggtgaacttacagctcggtattttaattttatttatcaagcatgtaacctccgggagggggggattgtcttaagaactgtcacctttgctgccccgtgtacgaaccacagatggtcagcgatcacattacccaggcgataatcggccctggtttaccgcaagcccccgacttggaggcacttgcgagccagagcacgtgacacgtgtacacttctgtccacagggatgaccagctggtgaaaaacattaatttagccgaccaacggaaggtataccattaaagaacgcacggaccgccgcttgtgcatgcc

SEQ ID NO: 63547 - DNA, 494 bp, Arabidopsis thaliana landsberg
cggcgataccgtgcgccggggcgctgccctgcagcggggagcccaggcagacgattcggcccggcttgatttcggccgcttcgcggtaggcctgcaacgccagcaggccgcccaggctgtggccgaccagatgcaccggcccgggcgcaaagagctgtatgcgcagatgcacgcgctcgacgatgcgctcttgcgaggagaccacgctcatgtagtcgaagcggtcgaccgcgaagtcggcatcggccattcgcttgagcagcaggcccagcgcgaagccgagcatacacaggccgtgcagcagaatgatctggtcgggcatggagaatccggcagccagcggaggtgggcttgagcccaccatggggatttacggcaggtggcaaggtgggctggagcccaccctacacaaacgtgtgaggcggctaccttgacgaggagttgctttaactgcgcctaggccaccggagagggcgcatcgtgcattacgtgct

SEQ ID NO: 63548 - DNA, 777 bp, Arabidopsis thaliana landsberg
attagaataatccgaaccaaaccaaactaaaaaaaaacccgaatccatcccgaaatttcgaaaaacccaaatgaggcttatgagcttatcaccataaaccagaataaaaccgagactcatagttcagaaatgtaccgattcagctctaataaatgaacgtgcatagatcatctttcatctaaaaattgtatatatttttcttggtaaaaaaaaaacaaccgaaagtgaaaaaaaaagagaaaaacccagaagtcaaataacgataaactagtggtgactactaaaactcatataatagcttcggatcaaatcccagatctcttctcttcttcttccacatttacacaaaaaccctagatccacaacaatggcggaagagaagaaatcgaagcagagacatcgagtcatggtcttcgaatccatgtatcccatcctcgctcttatgcttatactcgtcgcttgcgtcgagctttgcgatgcagctactgttgtagatgtttatcgtctaatccagtacgatatctctggtgttccttttggttctcgtttctcttctcttaatcatcatgctgcttctcttagcttccaacgtggagccgatctatctcgttctgtacttatacttcctcttcgtgagcttgacattgcttttgttcaaggtttggattttgtggattagcttaaatcggactttgatttggatttcttttgcttagattttgttactgttggcagattacatctcgcaaagcagtcgcttggtggattgttgatttt

SEQ ID NO: 63549 - DNA, 1152 bp, Arabidopsis thaliana landsberg
atataaagtatagttatgaatggaatttcgttgcagctcaggaggagttgtatttgttatcttaatccgttgcagcgtctcacggtgggaagattgtttgtgacaacctacttgatgggcacttggatgtttcatactgtatgaagcttccagaggtaagaaaactattttaaaagcccatttcagagtctcacaagtcacaaacaataaaggaataatgtatcatatatatatagccctggcgtaatagtagatagatagttcgcttatggactcatttagtaaacagagttttggattcaaagcttcccagctaggactaaagtaaaagctttttctatactatattaagtgatgactacatatttttataaggagtaattttcaagtttgaaccaagtaagacccaaccatttatctaagagaccctttcgaacccggattcgagctctggtaaagttctggttacagctgcagatggcattttacttccaccaaaccatctgctctcaaacacttcaccatcattagcgtctctctccatcatcacttgaatcttcttcgctcttgaaacccttatccccattgtacacaaaaaccctaataaaccgaatcctaatacaaatcccacgatccacaaccaccaccaggtggaccacgactcaacattcttcttatcgttctccaaaggctcgatcaccgaataatccccatggctcgaaccgtaacacacacccgggataaccattcggcttatatgagtcgcttcctcatctttggtctgtgccttgaaactcacgcatcttaccctagacagcatttcctcatccctctctttaggtagatccctaaacgaaacctctacaggattcttcatctttagaattatttctttaacattgtcttgatccgacacatccaataccttaaaccctaagacagaagtgattaaccggtaaccaggtacggtataccaatggttagaccaattccctagattttggtatactataacgactctcctagcaggaggaaccgaaactgacctttccggaataagcacgttgctgaacttggccccagagttccaaagactcttcccggtgagacggacgacagagacttcgatgccggagagattttccggtaaga

SEQ ID NO: 63550 - DNA, 538 bp, Arabidopsis thaliana landsberg
  unsure (1)..(538): unsure at all n locations
aacatgccatttgatacctcagttgcaaattgtgttaaccagaacatttaacttgatttgactaacatttcatgatgaattcgttagcccaaacctatttgtagctagaaaaaaggcaagagtttgttacctgatttaaaactaatcactgcaaagagtgtcctcaacagttcatgatagcaaaagaaaaagctttgatgcacggtctaagctagcaaacgacccgatcgataacagagatgtgaccaccagcatccacgaagtgatgacactctacagctctagtctaattatgcagttttattaatcttgttatctgtgtgttcatagataatggcaatgcaaatgcagcttcaagctacattctctaccagacaagaagaaaagctatggcctaatgcatttcaatcatcagaaatcttaatatctgcaatttgacgaatttctctttgtcactgatgatacttagaaagaaaaaaaaaaacagaatcacagacctcaatgtcatcacgttgnggaagaagatgtgctgcaatgt

SEQ ID NO: 63551 - DNA, 127 bp, Arabidopsis thaliana landsberg
tatctcctctttctctcttctccatgtctacatgtttagcagaattgccatgaccaactctatcgttcttcttctattttccttgactttcttaggtatcggttttgaataattgcttatttctggg

SEQ ID NO: 63552 - DNA, 314 bp, Arabidopsis thaliana landsberg
taacttgcgtgagggccggaattaactacagctgcccactcacgggacactgatggtggcaaggtactagtaagcagtgaacactaaccccaactcggatctggtccgtggggaagagcaggaaaacgctctacgtatacggtactggaatcaaacaatgcaacggatgtactgagccgcggagtcagagccctgatctgacctggtggagaatgaaaaaatctccgctagactcggaaggaaagcgagcgaccgagtaagccgcaccaggcgggggatggcgagactactgactgcccactgaggaaggagaa

SEQ ID NO: 63553 - DNA, 416 bp, Arabidopsis thaliana landsberg
  unsure (1)..(416): unsure at all n locations
ttcggtccttattagttaagagcgaactcaaccgtaaagtttatactttagcaaaggtcgctatacattcaatgtccgttgtacttgcttgcatttaatgaaaatcaaggttttagacaatattttattctattttaaactatgacattaagcctatcatgatgggatgatctatggatcggcgaataacacaacctatattttgaggtcttttgccaaaacgtaccgacgaacttatcatttgcataggacagctgcttgcacagcacaaaaccacccgannnnnnnnnnnnnnnnnnnnnnnnnnnnnnnnnnnnnnnnnnnnnnnnnnnnnnnnnnnnnnnnnnnnnnnnnnnnnnnnnnnnnnnnnnnnnnnnnnnnnnnnnnnnnnnnnnnnnnnnnnnnnnnnnnnnnnn

SEQ ID NO: 63554 - DNA, 2323 bp, Arabidopsis thaliana landsberg
tgtccttaaacataaagattgcaacaaaaatctaaggaacaatgatacagccgttgatttggagcctttcctccagtcatgattcaaaaaaaggggccaattaatgcgatgcgatgcgacccaataaagctgaccttttttggtgtctcactctttaataatgtctctgtgattaagtttctccatttaatcatgagacttttgaaacttcaaattatgctttgggcttgtaccgtttgaaaaaatcgtattattgggccttcatttcgacccatagaaatctatgattgattttgttgaacagcaatataggcccatgtctagtgctaccgcgtatatgcactatccaagttttgaagcttgtttgcacacccaaaaataaatgaataaataaacaagaagattatgaaatagtataatatatcagattttagatttatttaatagacagtaattgataaaagtcattgtattttctatacttttttcttcttaaccttttatttatttttaagttttcttatattgatactcttaactcttaagttaaaagcgtgttctacttaattataagagattttatactattaaaaaaaaaaatattagcaagcactgaaattatttccattaattttataatctttttttttggattccattattatatgaaacttacaaaacaaaatctataaatctaccttttaccccaaaatatagtcagtggtctactaaatttttaaaagaacaaaaaagggttgactttttttgatatagaaatatcacaaattacaactagcttcataaaaaagacaaaaaaatgtatcttgctgtgacatctggaccaagtcagggaggagactaatgatatacagcctggaaattaattttgacaaaatcatccatttattagagtaacaatataattgaattgaaataactaagaaaacacatatgtcacctaacaaaatctacgcacaacatttcaatttaatgaaattgtaatacttggagaacaaatggtagactagaaaatattgtataaatagttagacaatcataacaaaatctcaccgtgtccttaacgaagaagaagaagaaagaaaatggagttattcaacaaaggaacggtcgttagattacggagctgtcacgaaacatacatctacgccgtcgaggatgaaaaaaccgtccgtcaaagctctgacggaacgtcacggcaatcgctatggacggtggagatggttccacgtaaaccaaaattcatacgtctcaagagctgctacggcaagtatttaacggcgagcgagtcgtcgtttcttctgggaatgaccggcgcgaaagtcatccaaacgccgccgtttcgtcaagcggagcatgaaagcgactgggaaccaatcagagaagagtcaacggttaaactcatgtcgtggaacgagaaatatttacgtgggaacggaggagctccgccgtggaggaactctgtgacgtgtgatcgtgagccgcacatctcagcgacgaagaaatggatcttgtggtctgtggaggttgttgagaatcctgataaggttttgtttgctgatcggttttcatcaccggcttctagttttaactcgtcggtctcctccgacgggtcaaatctcgggtcaccaagtcagaaattggtgacttttggatcttctgaatctatcgggtcggatcctgggtcacttgtatcagtttcttcttcgaaacttatgtttactccgtcaaggtcgggtacattgtccccaaaaccaacagaggtacacttacattctaattcatataattttgtcacgcattatcacaaattactatactatataattaaaatattgattttgggggtattttgttttgtaacagaggaaatgttcgaagaagataatagtagaaaatgtatcggcgatggaaatattccgggatgcgaaatcggtgcgtttacgaagctatgcacatcatgggaaatatttgattgctgatgacgatgaagagggtgtgataatgggcaaaaacgggtcatctaaagaggctcgatggagagctgaaatggtaccaggatccgaaaaggcgatccggttaaagagctgccatggtggatacttgacggcgtcgaatgagcggtttttgttgggagcgaccgggcataaggtggtgcagtctaggaagattcgtgccgatgagccggcgggagagtgggagccggtgaaagaaggttcaagggtgaagttaaggagcagaaacggcgggaattatttaagagccaatgggggagtgccaccttggaggaattcggttacgcatg

SEQ ID NO: 63555 - DNA, 380 bp, Arabidopsis thaliana landsberg
tattctatctattctcccaactaaatcatcacttatatatgtagcaagaaaatcacctcacaataatattttttctatctatattaatgtggtgattttttttttcattaactttatgatatcttacaaacggtaagaagcatgccacaaacgtttttttaaccaattgaggaaatacctctctttgagttaagtttaagcaattcaagacctgtttgagatccatcatttccaccaaaaacagtcctagcacctgctcaaacaaaaagccatatgcatgacaatacagatacttacattgaaatggaccgatatcagaactgtaaaactaatataaataaatttatacttcgcatacgaatcaaactcataatgcgatg

SEQ ID NO: 63556 - DNA, 881 bp, Arabidopsis thaliana landsberg
tctaacattttaatgttctttactgggacagatctgcaatgaagaatatgacaagtggacgtgcatgttcttgggcattcaggcggagttctcagcaattctgctcgaccttaccatggtagttacttacaatctttgctgttcttaatttttttattatgtgataaaattttgattcctctgacttgagcttctctattataaacaggttgtgggagttgcgcatgcacttaaccttttgtttggggtggagttatccactggagtgtttttggccgccatggatgcgtttttatttcctgttttcgcctctttccttgtatgactggtcttcctgtcttgttttttttctccacgttcttgaaatagcattattggaaattagctgacatgcatacaaattctgacaggaaaatggtatggcaaatacagtatccatttgctcggcaggcctggtattacttctctatgtttctggcgtcttgctgagtcagtctgagatcccactctctatgaatggagtgttaactcggttaaatggagagagcgcattcgcactgatgggtcttcttggcgcaagcatcgtccctcacaatttttatatccattcttattttgctggggtaccttttttctctttatatgtatctctcttttcgggttaagaagcaatgattatactaagcagtgaacgctctattacaggaaagtacatcttcgtctgatgtcgataagagcagcttgtgtcaagaccatttgttcgccatctttggtgtcttcagcggactgtcacttgtaaattatgtattgatgaatgcagcagctaatgtgtttcacagtactggccttgtggtactgacttttcacgatgccttgtcact

SEQ ID NO: 63557 - DNA, 358 bp, Arabidopsis thaliana landsberg
gacgacgagagaaggggaaggcacacgggccaactaagagaagcccaaagtggtagtcacagcctcacactcttgcaacacggagcggaggctgctaaagctaacaagaagcggttacgaaggaataagtaccgaactggccaaaaaagaaaaccctccggcttgtagtgtagaaaaaagaaaggaaaaacaaaggcctcatgtagctcaaaggtaaaggaaacaggtcaaagaaaaagggtaaggcgatacgtggctcaaaaatatgtaaacagagggagtctagataatgggagagagataccacgggaaggcgatagcggcaagacgataagacgcgcaaaatgacgctcctaaa

SEQ ID NO: 63558 - DNA, 457 bp, Arabidopsis thaliana landsberg
ccaaagtcgaagagatagtgagatcttcactttcatcaatgtttatacttgatcctacttctcctgcagcctttctaaggcttatgtttcatgactgccaagttcaggttctctacctatagccaaatccatctctcattctctctctctataagaaaattctcaatttttgtttccaactcaatatagggttaatttggtttgaaaagtgtttatatatttcgggattcgaatttatacattttgtgaataaacatatccattaattagatatgattactccgtcaatacatacgacaaattggacgttccgcgttcgtacatgttatgtggtacgttttttctaacatgagctttcgttttttttttttaataaataaacaaaagcttgagacgttttatatataatttaaaatttttggtaactacgtaatttctcatgcaccggatcgaaaaa

SEQ ID NO: 63559 - DNA, 323 bp, Arabidopsis thaliana landsberg
tgtgcaaatcagcattatagacctaaacactacacaacataacacgcgggacctgcatgcagttatgctccagggtcaaatattcaacattttccaattggccaccgtcaaatattccaatttcaagtggaaacataaaatcaaaagagaagaaactaatagacgaagaagaagtgtgaatggtacttaattatacagagggaaatgtattattagttacaacttacaagtcaaagcttcgaaagagggaaaaaaaaacgttacaagtcaaatgagaaaaacggatacacgagccaagactgcagacataaccaaacgtacac

SEQ ID NO: 63560 - DNA, 520 bp, Arabidopsis thaliana landsberg
ttgggacttaacgaggcagtgttcagatactcaatagtaagtggtatagattgtgtgaacggcaggttgcttatgtgggcaccactgagctgggtaccgaagatagacatgctttgtttattaaggtgtatgagattaagagaaagcttcccaacagcagcattatctactcttccatgcacctgtaaaggagaaataaaacatatgaatatagaaggtcgtagcaaaaatagctgagaataaaaacaagtgatccttgttcaactaagttaccattcgacaggagatgcaataatagggactgttcggctatgtgagcattaccaagaagaccggttaggtacttcatcaaactctctcttatctctttgaatatttggggggattttggctgcttaatggaaagtaacaagagatctaaaactaaattcaaaacacgcactaggtatgagaggtatatttcctaaatcgatgatacttgcctttggtaataacgaaaaatccatgcaggcaaaagctt

SEQ ID NO: 63561 - DNA, 568 bp, Arabidopsis thaliana landsberg
  unsure (1)..(568): unsure at all n locations
tacactctccctatataaaaatacaatactttaaattttatatattttataataagaaataagaaaaaaaggaaaaggtgtgtttgaaagctacatcgaataataaatactagtataaattaaattgcaaggttagatggagaatcatatttctgagtccctcagttaatatagttatttttctgaaataaattagttgtaaattcctggtggaagaattaaatatttggtacttgtctacccgtttccattgaataattttgaaacgattataaatgcaaaattcaattatatgcgttgcatatatctacttgtcaatagaacataaattttatcacacatttcgggaaaagtatctatcgaaccatctaaattacatatatattaataaggccaacatttttacaacgtatcttagttttacggaattttcatatgtgtaatatttccttcctttccgtaataatgtcacttttagattcttttttttacatactgaaataaaataccatttcagattctactaaacttacctcttctttcattttgngttttttagattttgcat

SEQ ID NO: 63562 - DNA, 487 bp, Arabidopsis thaliana landsberg
gcaattactgaaactgtattaaaaaattctaccgtcgaggtttatggagtcatgtgtggtatagattagtgtaagaaaatggatagtggacattgaaatgattaattaactcactacatagtctctaaaatagatgctatagcatctaataaaaagtgtaaatgatcaagttggattctagaaagctctcagcaatttcttttggtttttgtgaaagagcattttcctattaaagatttaaattatattgagatgtcaaagaaaagaaaaaacaatctgaaaatgatattgtttgttttaacacgtggggaaagtggtttgttactttgtttagctaaagtcacgtgtccaatatgttgtcgtatcctcatcacactactccgagtcgctatgtcgccaacgctatggagtttttattattatcaacaaatttaaatcgttgtactatagtgaagtggttatagtgttattgattatatgtgttgga

SEQ ID NO: 63563 - DNA, 1343 bp, Arabidopsis thaliana landsberg
  unsure (1)..(1343): unsure at all n locations
acatcaaccctttatccggtttgattgatttctggcgatgccccatatatctacgcgctccgatgatcagttttgcttagtttccaccgtgtgtcatcacaaatacaggtgatttcaagcacaccaagaaatctagagccgcaagacttgtaacgtgttttctaaaggttgttagttcctctttgcctgctaaatcctcctttgttacctgattcaaaggacagttaatgtgagagacaagtttgtgctgattcatcaaagaattataagagtccggtgttgtgcttaccaaatttgggaacatgtttcttagtggagccatacggttttgaccgccatagacttgaccagatgcaacatagatttgtgtttcttttggatagcccattgcacgtaggatcacagcaacttctcctggctcaagagggcatcgaccttctttgcgcttctgcaaggcgagctgccagagatgggaaccattctgcaatatatgtcaagaaatttcattaaggtagcggttgaggttgtttagccaccaaaagaagttgacaactgcttataaatgtcaccttgaaacgccgaggccattccttttgtctgtattctgccattttaactttctcttcccttgtccccacaaaatcacagaacgatagaccaaccattcctttctcgaatctaagatgaagagccctatacaagagacatgggtatagttttaagttgatataatgcatatggtcctaagttataacaaagtcgaatctctgatatggcatacatatatggatttggatttccagtgcgatttctcattctagaaacaagtgaatcagccatctgctctatatctggaagaaatttgagagcatggtaatttacacggcatcgtaatctgttgatttcttgaggtacattgtcatacctgaaaaaatttccagtatcacaagaataaatcatttattgtttataagatgatttccaaatatctgagccctaaactataggaatattggttatacccaagtcgatcgacaaaaggcttcaaggccattatcttcttctcctttatccgaggtaaaacattgtcaatataaaattgggctgctgcatatttgggaatgtttttgactgttcttctgcagaagataaataaataactcggtcaacatcatatctgattaaaaaatactgatcgatttttgaatcagagatnntcccncggncgggcnnnnnncacccgctagcctttgtcattnnatgtcnnnatgagactctttttatccttatatatatngccnccgaatgtgnnnnnccaggacgagaaaatctacgaaattttg

SEQ ID NO: 63564 - DNA, 1501 bp, Arabidopsis thaliana landsberg
  unsure (1)..(1501): unsure at all n locations
acttcttttgtttgatcttcgttattcacttttacaatgcagttttggattcacctccccgaagttcagaaacctagaggtgctcaaaccaattggtcagaacatgcaaaggcgctcgagagttcatcatcggtgactaagtttctgagctccaatgtcctttacgccctagaaagccaaaagcctagagatatggctgcaaggtattatggccatatgttccttctttcgacaacagtcatctccttctgtctattgtcatttactttggcccagtactctctgttgtttggatttgtagaagtagaacttttgaagatgaattatcaaacgaagtcagtgattgatggataggtttccaccacattgtgttatatcgcttttccagcatcacttggttctatgtgacaatgcgtgttttgtttccttatcaatagctttgtacaaactagaggcttcagcttttacatggctcgactttcataccaccaaactgctccaaataatattagatgatatgtgcatcatatgtctctttgatgtatctcactatggtagtgatggaaatcttgttatgttttgttctgtcttcttcttaaatatgtttacaactatgtgattcacaattatttgaaaagctttgttctctttctgcctaggtcaattgcgtttcccagtgtgaatgtgcatactttggcgcacccgcaaatttcaaaggtaatttcttttgaagggatattgtggtggtaactatagttttcaattgtggtcataagcaggatcttcattacatgtttttctttctctttccatttctttcagtaaacaatttatctcatcgtagttcctattttctcctagtttctggttgacctttcccttgtatatagacctcttttcatgaactgtacatatatgttagttattggtatcctatgtgggcaggcttggcgtgctctttcaagtctttcagtaaataatacctacctaagacctggcgttactccccccattgatgttggcaccaatgactcttattctgcaagagagagatctaccgcaaaagttatatctagcactggtggttctgtttattcgagcactcgaccaaacctaagtgcaatgaatgtttcannnnnnnnnnnnnnnnnnnatagtttcccttcctctgtccctggtgatgataaaatagttgctgaaaagtttccacggggaaacaatgagatcagagaatcagaacccagttgcacgcatttaaatggtgtggagaagtcattcgggaattctgcattcccagctgagcagttcgaatctagaaaagcatgtcttgatgatatggatgatgatgacatacttgaggtaatgttgtcagcaaaagtagcacatcttttttccttatgttctcattcttgtatttgtagtatctttaagtttttagcacatttacatgacagaaaatattaaaatataaaaccacttaaagcttacagtatggtataga

SEQ ID NO: 63565 - DNA, 1299 bp, Arabidopsis thaliana landsberg
gaatttgacttatccactactgaattatatcatctgacgcttatgtgagaccctttccctaattttaacatacggcgacctcagaaacgattgagatgctatggcttgagtgcttccacccacgccaatgatgatgcaacagggttgatgtgtgactgttacgcctgataggcatgagaactcaaagactccaactgaaacctggagatagtgattgttgaacaatgctcagactccatttcgcgactctccatcatgtcttctactaaagattcaagcttctcaagcactaaagcctcagtgtgcttcactttttcaagctcatccaactttgaattcagttcgctttcctttttatctatatcaagtttggttttctgtgtttccgcctttgtaaccgtcttctcttctttgaaaaggaactcctctttctttgcagcatttctacttttctttatcttctcaagcgaaccaacgaaattctcagcaagagagctaatcctttcttcggcgatagataccacttccaacttcgatttttcgataagaatctttgagttgagtttctcaatcttaacatcatcttccctcaagatttttccaaggcaagctgtttcatccctggctcggataatctcattcctcaacgcatccattactgtcatgaccctgaagatctctactttaacagaagcaagttcctccttcttcccttcagtcacttctttcaaaaccgataaactatacttccctcttccaaaagaacggtttgatctcgacatactactactatctctcccctgaactctcctctccattttcttgaaaagctttaactgtgtttccaacatctcaacatccgtactcgtctcaaacaactcaatttcaatatccttcgatctttccgcctcttccaacatgttcttgattctcttattcctttccaccaacaaatccaaaacctttatagctttcccttctctctgtctttctatctctttatatcctttcaacgcctcaatctttcccaatgcaaccatcaaatgttcctcattcgcaacctcgatttccttcttcagactctccaacaatctcaaacccccttccgttttaaaccgcagatcttcgactttttcctctgctgcaactctctctatcaaaacagatgatacatcaagcttcactctactcacttcttctttcacaacctccgaaagtctcataacttccgcatacttttcctccatcttcaacacttccatgaccagtttcctgaaaccacgcagaacgattcgacct

SEQ ID NO: 63566 - DNA, 984 bp, Arabidopsis thaliana landsberg
tccgagctcatttcacttgaagatcgtttagcaactttgatttcttgattacagaccctgtggaacttttcccctcagatgctgaggtatgagactcaagcagaggctggagagaacttccagctgatccaagatctgttccagcttcttctttaggtttaagactcgccatagcttcagatttcccatgctctggaagtacagcagctctttcttccattctctcctttgatttttcagctagacccttttgttcatcaagagagggctttgaagctgaaaattctttaccaggaatagctgcatttgaagaggcaaaatccatgctgacgatcccagacttctcatctttcattggagtttgaagcgtcggagctcttctctgcagcccaaaatccccatccaaagatccatcaattccctggatatgagaagcttctgaacttgcttcaatttcgccaaactgaacagacttatcaccagcttcatcccttcgtttgagaagatacttgtctttttttttagagaccttaacctttgtgggttttttagagctcttaaggtcacctagcgtttctgctatgaccagtgggccactcaagggagctggaaaaaagagaaattgaaacaacacatcacccaccaagaaaatgaacaataaagcaaacaaggtaaatgtatgcgggactctccatagtagaaagaggcgcagaattgttatcaggccacgttttcgaatgcacagtttagcatcaatgagacttcactattctttcaagcatgctatgtaaagaattcaactacaaagatataaatcctaaaatcatgagcacagaggatctaaaagtaaaaccctaaaaccaagttacagtatctaatatctatgtaacacatatgaaagctgtttcaagtctacaacgaaaaaacccatatacaaacaataacatgattttttgaaaagtggctaatacctcgaggcggtgc

SEQ ID NO: 63567 - DNA, 107 bp, Arabidopsis thaliana landsberg
cgatacccgatcaaccaaggtcttttaccagctttttgaggaggatgctactttaccttaccctcacgccttccctttttctaaagtaggaatggattatccctggg

SEQ ID NO: 63568 - DNA, 557 bp, Arabidopsis thaliana landsberg
tccttctcggatgtgtctctctactacttcatcaaagaaaacggtatcagcaatatcgcctgcaagctcatcgaagttttgggcatggacaatgttggcactcactcccttagccattgcggaatccaagaactcttggacggtcgggagaagatcgatcgatgaatgcgtcacccaataaattcctccaggaaaagagctatccttgcccaagacatcattcaaagcctgcattacagaagtatcacgaccactgtatccaataatgatcaacgcgaacctagaacaagactcaaccagtacagcgcgcatgcgtgcgtcctgtgttctgagttcatcttctgtgtttttcagctcaaccgactgaaaatctccatgaagcttcgcaagcagtggccagtcgttcttctccaagcaccgcctcgcgcgctccgccgaatcaattgccgcattaactagattatgacggacagtagactccatgagttgcccgactaccgtcgttgcagtttctaccaagttatcacagttcgtagaaaaatgcatggtgtcttacc

SEQ ID NO: 63569 - DNA, 365 bp, Arabidopsis thaliana landsberg
ttcccgttcctggagaattacggtgaagagcagtagcaccaccaaacaagatcagtctcgggccaatataagaagacgtcccttcttcaccaacagcaggaaccgccgtcagcgtatgtccacatctaggaccaggaccatcttctttcttctcgattatagcattcacaaccgaatacgttggcgcacatctcggaccaaccaccgccgttacctgcggctgttgctgctgttgttgttgttgctgcgaaggaggaggaagagaaggagtcaaagacgtcgattcggattcggatccggtttgttgctcagacgcttcttctttctcctccataggagattgattctcagacgtagcaatagga

SEQ ID NO: 63570 - DNA, 872 bp, Arabidopsis thaliana landsberg
tatagcacttattggtgagcttagattcgtaggtacattactagattctgtactgtaagatacatttctatatgttactgcctaataaattaaaacatttataaaaatacgatacaaacatttgaaagggtacgatgtcaaaaaaaaaaaaaaaaattttgaaagggtacaaactctgagaaagtgtgtcaaatacaaatagttttctaaaaagcgtatcaattatcatagtataaatcaccctttataaatcaccctaaattttcctagaaaacactacaatttgcaacatatgtctctcacaaatccaccattaggtatataaaataatcaacacaatattttaagctaactacacattaccaaatcagttcagtttcatgcgtattgtttgcattacataaatgatgaaacaatttcttagtacaagactatatatagcttcaatttcgttactcaaatcgaaatagataattgttttatttcctcaaataatttctgttgtttttatagtaattaagtaaatgataaaaatgatttaataaatgtaattatcttagcttaaagagagagagataaataaacaaagggcaagttttttgattgtttggcgttgagtgtctctctgtcctttttcctcaacaaaaaaaaaaaactgggaagaagaaagaacaaactcattttcaaattctccgaatctctcgactccaattaacttttttccgggaagatctcaccggagaaaagctaagctagggtttctccaccgtgaagattctagaagcgagaatttggaatttgctaattaagaagatgtgttccgatctttcttaattaaaaaagcattgaaattgacgaattaagggttgtga

SEQ ID NO: 63571 - DNA, 532 bp, Arabidopsis thaliana landsberg
  unsure (1)..(532): unsure at all n locations
atttaactccaatcatccgcatcgtcttggatgatacatagggagtcaatcctttcgtattgaaccccaagttgttnnnnnnnnnnnnnnnnnnnnnnaaagacacaagaaagttgcagctcgggaactgataccctcatctgtgatatcgtttcccgagttgtccggatcggttgtcgactaggaggaccccagcagtggctcagggcgacataagcgcctgtttcgcttggctggggctcataaagacttaatgattcgtcttcagggtcgattcgaatgactcttgtgggtagtggaggtttgtgttcagagcggcaattgtggtggtcgccttgtcccgcttcacaagttcggagcaggtctttgacaaactggatacaattctctgacttgggactccaatgcgtattgtgtaccttttttacctccaaggattcagggatctcggacttaattgaacgaaggttagtgcagccccatggatcttagaaactggttgtggactaacctcagtcgctgggtgaatatg

SEQ ID NO: 63572 - DNA, 543 bp, Arabidopsis thaliana landsberg
agtgttgatgatgaagatatggtctagggcttggagcttggaggtagtaataaggggaaggcatgttgtttgatgatgatgggatgttgctcctcctcctccgtacatttgctgctgatagtattgtgcctgttggagctgagcgttgtatagggcctgcatgtaacttatgtttgattaatatcatcaccaacctcatcatcttgagttcattttttatgatctacccctatttcttctacgtcattaacatataatttactacgtcattactcagtctaaggaagttttctaggtactactaattccaacattcacatacgctagatggatacgacattttcctagtagatgtctatactaatatacaattgcatgtttataattgtatatgcatgtcatatggagagagaattgaggggagaaaaagagagatagagagacttggctggtggtacccaatttaaaaattggatgggtcccttaaaacaaaagaatttaatgatgctaaaccaattaggctttgattcaccaaaatacaaa

SEQ ID NO: 63573 - DNA, 1661 bp, Arabidopsis thaliana landsberg
gcgtaattacattctaaatagaaagaaaacaatcactcaaattcattccaatatctacattgttacacatcacatcataccccacccaaatcactttcataattcgtattatcaaactaaaccaaaaaaaaacaagaaatcaacattaacccatcaaacaaaaaaaaaaaaaagaagacaaaaaactctacacaaaattagctgtaattagtaggaggacactgtagattaaacagagctttcgcagtcatctctctttcgaatctccagatgtaattcaacccaacaagaagctctgttatggctgcttctgtcttaactttatctgcaaacactagtgtttgaactaacatcactctgttctgactattcgttgccgtcgccatgtgttgctgctcaaagcttctctcactctgccacctaatcatattctgcgccaatggtaacaaccaccgtaagatccgacctaaagccgccttccactccgtcgctaaaccaccgtccgtcgccgtgaaaccaactccttttagccttgacctaagtgacgatctcacacttgccggtaacattgaatacagatcgtctctcgcgtcaagacctacaagctgaggttgctttatcatcttctccattactactatcagattcgcgtagtgaagcgccacgccagctccgccgatagttgtctccggtggtttcaacagtcttgagctttcttcaagaaacgcagaagacgtcgtcgtcttgtctctctcttcgtcgtttgggctagggtgaacaagattcatagaggaagaagaagaagagagagaacgagggagagaagacacgacggttggaaccatgtacccagtggctgcggcggaggagaagacggatttgagtctagcgagtgctgtgaataccgatctggcgagaatcaacacgacaatgtcgaagcttttgttccagagagatctgtcttttagatacttgacatgttgtttctgtctctcaatcttgttctgtagatctatcactttcataacatctttcttgttctcgtagtcttcttcttcttcgaattcgatcccaatctgtaaactttgttttcgcagagagttctctaatatcgccatttcttccatctctctatacaaagctgtcgtcacgctcacgtatctgtttccattaaccaaagaaaaaacaaaatcaatctctgtgttgtactctgttttcttgctctgtttttactctgttttttgtgtgttaaatatagagaaatttggtttacctttcgattttcttgtttttagcttctgtgtctttacagttcatgacccatccatgagggtcacgacccatgtcggcaaattcatggaataagcggtggaaagaacggaggctggccgtggtgcagcggttgctcagtcttgaaacagagttagctgcgtgggcgagactatctgcgagctcagcacaaacgaggctgaggtggaatgtttcgtcgccgttgacgattttggttagaccttctaaggaaagagagtggtctcgaggagtgaggagattggaatcggtgagagagtgagtgagatgtaggagtttggtcatgacacgtgctacttcgaacgataatactccgacggaggaagtggtggttgatatcggaggagatgatc

SEQ ID NO: 63574 - DNA, 474 bp, Arabidopsis thaliana landsberg
atacaaacagccaacggctagatggattcatctcctcttcaagaaagaggacgtattttttacgttcagtactctctcaaagttctgctcgtctcgagcttcaatccgctttctcgtacattcctgagataactctctcagaaactgatcgataagcagagagcaagttcgtaaagtcaatctagagctcacagtgcattgagcaaacatacatggcaagagcaagctcagtgagaccacacaataagacatggggtcttcattgaccaggacgtccgccaacgccatccgaaggccgagctatggtacgtcctctttcacttctgccatggcaaatctgaccgtctccaataggcatacactcgtgttggacctccagatacccaaaggctgaagtacttggacaatggcacctgcctagatttggaccccgacgtaggcaatattctgtttgcacacttgactattgctaat

SEQ ID NO: 63575 - DNA, 118 bp, Arabidopsis thaliana landsberg
gcttctctgttctcttagttctatcagttttcttaaggtctatgccttgttgcctctgctcttagcttgaggagtcgtttcatagcgactgagtgtagatcagaaacacatagggatg

SEQ ID NO: 63576 - DNA, 124 bp, Arabidopsis thaliana landsberg
cgcgcatgaaatgaagtcccttagaggagtgaacgtcatggaatgaaccacacatagcaagagcttgtaaaggccagcacgattatccctactgcgaacaactgcaggacttgaggctggaaca

SEQ ID NO: 63577 - DNA, 1400 bp, Arabidopsis thaliana landsberg
atttgaattacatgtacccatagtgtttaaataaatgaaactttcatggaaagtaccagaatctagttttatagttttctgagtacatagagttttactcacaactgctccttcagctttcctgagtctgaaggcgacgctcttctgatagaagttcaagataagaagaattcagttcaaggaaaagcaatgatttctatcacatcattaactgaaaatccggtaaatacgcctttagttgtccttcccgggttgaatctcttccattttgcttctgagaatatgttagttagatatgctgaagaaaactctacatttgttcagaatgataatgtcagatggtggcctatataccatggtgaacaagaatgtgttggcaagatccagctctttattggtagcacaaccacgtccgacgaagactgtcacataaaggtatgttatttcttcaacaaatctcagattatctgttttgttcagtgagttaacttatgttttgcatttctgtatattatagagtgcacctgttgtggagacactagcatatgatttgctactagaagcggctacacgtgcccaaaaatttcatcctcaaaacttaaggctgaatggatcttggaaatggctgttaagcgaattcgcagattattatggagtttctgattcatataccaagttgaggtatttataaagataattcagttagactgccttgtatctcttgtaattcttctggaacttagctcaaatatgctgcaccaaactttgcagatatctctcacatgtaatgactgtggcaactccaacaaaaacctgcttacaacttgtgcatgagttacttgtgcccatcctaatggctcgaagtgagaagagtttaaccagacaagaggtaattccccttttgtttgtaaattgatgaatctgtcatctcaccaaaatcatagacttggattcgatttatcgcatttagtttgaaatttgcttgttttgttatctttatggctccatagaaatatttatttgagacttgttctattcttgcagaaaagtatcttaatggattgtgaaatagagatagcaaaactcatggcaactgtttctgagaactacaagtccttagatgaaaactgcccttcaggattggcagacatatcttgttccgtgcaagaatcggatacaacagcactttcttcagctgtgcaggattataccctccttcatgatatattggctccagaagcacaagaaattttgaagaattaccttcaggttagctattttaagttttcaacgaccttcatatgttctcctatcattaagaaagtctaccagttagagacctttaaacctgatttttcaataatatacctgtcagtcggcttgattttgaacatattaag

SEQ ID NO: 63578 - DNA, 1332 bp, Arabidopsis thaliana landsberg
aaatcaattccagattaattttttttaaaagctttggaaatacggtttaatttttttcattttggggaaattttaaaaggcaaattttaagattggttgcttcaattgtgcaagatcgatccaataacagttataaaggccccaccagcgattctttttccgtgtcatattttagaacttacatgtatattgggttgatccatgggcccatctgtcaccctcatacaaactatatataaattataacacacacacagtctcatatatatataacaagttgtcaatgaataaattgacaatacaatttgagattatgtctcacgttaattaattattttatggtgcgtatatattgtatcatgatgttaatgtttggatatatatacaagcaagtaattttcacatcaattgcactcttcttttaatttgtttggtaaccatgaaaataagaccatctatttatttatctatgaatgaataattaaggaggtaggtgagtcactgagagtcaagagcagtttgtgatgggaaagaagatacacattacagagatcaacggcagagatgaggaaccctacagtatgatgacgtcatcgttgacagtggtggaccccacctctcgggtccctcgaaaagagcgggatgagagatttgttttcattcatacacttctcagtcttctgaatcttcatcactcttaaactttaggttaatttcattttttgtaaacatattttacatctatcttaacccagagttatatacggtacgaatttattgaaaatatggtatagtttggaggcatgaaagaagtaatatcaatattgacaaggaaaagagcgagtttatttgtctagtgatgaagaaggacccatagcttcgtcatatcctctcctcccactgagcgtttcactcaccaaaaaagctctctttaatttattttatcttctattcctttacttagcaaacatttttttagtatttgattataaaatctgtttaatttttgttttggcgcgagagtgtgcgtcacgtgaacaaatttacattgttatatcccaaacggagacattaatatgaacaacctcggccattatatgtcatatcgtctttaaaaaatgttacacaacattgtgaactcaaattcagaaacttgttagcggatgaatcgataatgacgagttcacaatgtaaaactatgataacattctcttacacacaaaaactaatgtgggagtaacttgtacatatctctctatttctttcttaggagactaacaatttggaattagatccaatgatttctataatgtatgcataaatatgttattg

SEQ ID NO: 63579 - DNA, 457 bp, Arabidopsis thaliana landsberg
cctttgtagattagggatacacggatggaataaaatccaccaaaaataattaaacatcttttttcagtattctccttcatgtattaagcatttattgccaatttagaaaagatttcttacccttaaatcgtaaactaacacatttgtctagtggctacactgaacccaaaaacgaaacaacccctaacagtccttggtttttctgaagttcagagaaatgacgacgacgatgtcaacccttccagtggttttggtagacgagattctcgctagggttcccattacatctgttagatcactccgatcaacgtgcaagaaatgggaggcttcatcgaaaaccaatcttgtaggtggtaaagcaaccgcaaggaaaagcagtcacgtagggtttatcctcattggtgacaagatctggtcaatgaaactggacctaaatggcggggatgactctcatggc

SEQ ID NO: 63580 - DNA, 531 bp, Arabidopsis thaliana landsberg
agtccaaatctataccttaatatgcagttcaaacattgaaaaaacgaatctttgtacctttagaaagatttagcataaatgcataataattaaatttagagtaaacaccattaatagccattcatatttttgtataaactaaatttctttagaattaatatttttttgtcgtttttgcatattttgaataaacggttattttattaaaataactttagtgtataaattattcgtatccaatattgaaaaagataattccatttacttttaaaagtaatgtgatatttagcatactagttttgtgaaaatcgagtcaatagttattcttattttgtagaaactcaattaattgtcattagtacacttttgagaaaattttgctttttagaaaatttactatgcgctaaaatttattggaatcagaacacggcataaaatatataaccaaatatatagtcttagaaatggtacgatgatagattttgtgcatattttgcaaaactcgattaatcggaacaaataattattttt

SEQ ID NO: 63581 - DNA, 399 bp, Arabidopsis thaliana landsberg
ataatttgcttgcaatcaaatagtgcactatatatattcgccacatgaacgctcggcacgcctccactaccggtacctcgcacctgctgctcgaccagcaactgtgcttcgcgctgtatgcggcgaacctggcgatgggcaaggtctatcgcaagctgctcgccacgctggaactcacctatccgcagtacctggtgatgctggtgctgtgggagcgcgacgagctcaccgtctccgacatcggcgagcgcctgcacctggactccgccacgctcacgccattgctcaagcgcctgcaggccaatggcctgctcgaccgcgtgcgctcgaccgccgacgaacgccaaatggtgatcagcctgaccgccgaaggccgcgcgctgaaaaagcgggccgccg

SEQ ID NO: 63582 - DNA, 394 bp, Arabidopsis thaliana landsberg
tacggcatcctgcttaccatgtttaatatggtatgactgggtattggattatatggagttgacacagccttgctacagcatatattactggaaaccgtggttacggtaaggtctaccgtagcacaggtaaggagcgtggcaaaaggagaaagtgtgggatatagccgtaaaggcatagtgcagcgcaacagcatgatcgctaccgtgcggatcggatattctgttggttttagccgtaaactgggcaatggcgccggccgcatgctagtacgcggaaagctggcaccggtggagggcaatgtgtgcatggatatgaccatgatcgatgtaaccgatatacctagggtaaaagaatgcgaccaggtgtaaatactcagcaggaacctgcctgtgc

SEQ ID NO: 63583 - DNA, 406 bp, Arabidopsis thaliana landsberg
tgttcttttgaaaacaaaaattatgcttcaaattgatgaagaatcttcaagacacttagagcacttgcagctgaaaccatagtctgcaagtaatgcttgtctctctttgtatggaagctcctcgtcgatatatgaaatcgtcacctgttgttttacatatggaactcaaaagcaagctctcttttccaaaatattcaattgctattacgattaaagagaagatgcgtacctcttcgttcttgctgatgcgtcttaatgcaattatcactgcttgtccgtctctgtcctgcaaaacccacaagacaaactagttacacttggattcagtctgaaagtgttgatgaaaaatctttcatccttaagatttgtaggccataaagaggacgaagatgtaagaaagatacct

SEQ ID NO: 63584 - DNA, 406 bp, Arabidopsis thaliana landsberg
tgttatttgagacattcaacagcagtagctgcatttgattagagaaagcttgttaattatttcagggagatcctagagctatgctttggtaaatgaagtcacttacattgcggagactaccaatagtatcgggcaagtatatgagcatatttcttgagattgatagttgctcaagccttaccaactggcccactggaaagcaagaaaaatatatgaatacgaaccgtaataggacacaagttgttttaaaattaacaaatagtgtacttgtatcaaagagcatcttacattcatcaggcaaacagctgatgcggtttccatcaagcatcaaaactttgagagattgaagcttcactagattccccggaaggcgctcaactagattatcagctattaactgccaaaa

SEQ ID NO: 63585 - DNA, 326 bp, Arabidopsis thaliana landsberg
aacaccaacaaacttgctgccacatttctttgttttgttgatgtaccatgaagtatgtctatcaaggctgcccatcgctttgtcagaaaaattcagcgtattgcataaattacaacaattctaagaaaactgcacttgctactcacacaaaacattggctaaccctccagatcctacacatgcatcagatttgaccatcaaaatcgtttctacatgttcgctggaccaaagaactaatactctatcagctgttgattttacgtggatggtacaacccatactcatcacggtcgtgatgagaccattgatcgcatactcaactaatg

SEQ ID NO: 63586 - DNA, 395 bp, Arabidopsis thaliana landsberg
cagcggtaaaaggttttatgttgatgtcttctccgagcgccggtgattttcacacagaccttgttattggaaaactgaaataatgcagttttctgttgataggccttaagatgtcagattttatgggccttttaggttgttctggcccatttagatagaactgtttcagttttccaacaacaactgataaggatagacgaaagcccaaattaagaatctttgtcctaaacccaaggaaaagcgtaattacgacacgcagccaaacaaaacatttcctgcgtgaaaaaagtatttgagaaaagaggacgacaaaaaggtacaggtgtcaatatataattggattaaacaagcttagacacctaaaagttttctctcacaccatttgtgaagatcca

SEQ ID NO: 63587 - DNA, 205 bp, Arabidopsis thaliana landsberg
gttatgacattgaagtttgtcggtgaaggatttttttggggcttttcctttaatcatggatatgaggatctttggacgctgggtactatgacacagtcccaaacaatgttaactggttttagaaactacaggaaaatagatgctcaagctaaggcaggatgctcataatgcaacaggacagagatgaaaactattgggacatata

SEQ ID NO: 63588 - DNA, 403 bp, Arabidopsis thaliana landsberg
aaccctactgaatttagggttatgattccacaaaaagatccataagttttttctactccaaagattattggttttggctcatggggttcttcccattagatagtatcatatgtattctgaagtgagtaaacaactttagaagatggcaaacaattttaatatattgaaaaacggcatttaatcattttatccattttttgtttctccaaacgagtttttatttttgcgctaactaatgaaaacttatttagatgaacaatgaatcttaatattgctatattaaaaaccattaaaagaatacatacgtataaaagaaatatctcttatattataagcatgtgatattttattacagaccataacaacataaataattatatagaatcccaagaaattggattac

SEQ ID NO: 63589 - DNA, 271 bp, Arabidopsis thaliana landsberg
tagaaacgcaatctcgttattcccgtgccagcagaacatcttttttccacttgggacagcgacgtctttctatgggatcgcaggtctttatattagttgctatttgaggcgcactattttgtggaatgtgggtagcggatatgatcttcttcgaccgaaaagaaggaatcgtgcggatcattcgttggggattatctggaaaaagttttcaaatcctcttacaagtcttaatgaaagatagtcagtccatcaaagaagatctcaaagaggg

SEQ ID NO: 63590 - DNA, 340 bp, Arabidopsis thaliana landsberg
  unsure (1)..(340): unsure at all n locations
nnnnnnnnnnnnnnnnnnnnnnnnnnnnnnnnnnnnnnnnnnnnnnnnnnnnnnnnnnnnnnnnnnnnnnnnnnnnnnnnnnnnnnnnnnnnnnnnnnnnnnnnnnnnnnnnnnnnnnnnnnnnnnnnnnnnnnnnnnnnnnnnnnnnnnnnnnnnnnnnnnnnnnngatcttgattgccacggtgaatacctagtatgaattagatgactaatactatatccgtcactagcatggagaaaatgctaacgcaaggagacgaagactctgctgctttcaatcttatgagtgctttcattcgttcaatgcgagcacgctttctcataacaagcttcgcgatt

SEQ ID NO: 63591 - DNA, 1446 bp, Arabidopsis thaliana landsberg
cgctaacctttcccttctcagcgacctaatcaacaattcgtatattattgaattaacacattatttgatttttcctttcaaactatcttaataaattacttataaattacaaatattttccttattttatctcctaattcttgactcaaattaagatattgtcctgttccacgattccatcttcactctttaacatatatagtttttttttttagaggaccaatatagcgtagcccaatttgtcaaatttatattttcataacattttccttttaattagttcctcaatttcttactaaaactttcccatttaatttagcctgcaatatattttcgctcccgaatccgcggttatcaaacgggtttacccaacttttggtggcaaacggctgctttgaagctgaaggcctcccagttttgcctgttctggcaaaagattatttcttttactttatgctcttagtatttatccaaggagttaacacttgtagaaaactgaacaagcttactgaatttatattgatgatgagtgttttagtttatcatactagtaactccaattattacacggaaagcgtattacaacaacaatactaaatcgtctcctatgatccacatagtattcgacagtggaaacactaagttacaagatctccgcttcatgatgtctgatcctaacttcagcttactcggattgtcctttggcttttttattaccttttatttgctcaatcttctagttctgccattgggtcatcactgttattgttgtcattattgtttctaccgcttccattagcgttcacaacttcgacccaaacactctggcttctctctgctcctccattgatatctccccaagtctgtgcttgtcttccgtttgtctcagctccaccgtctgagaattggccccatacgcttctcgtcttccctcctcctccgcttaactcctcttcgcaacccgcaactgttttcagaagctcagactgaagtgacgggcagtgttcccttagataatcaaacccatctgacctcataacagctgcatcaagaaaaatgtttatgcaatgtaagtttggtgtgaaatcaatttcagtgatgagcctgtcagaaaagatcattaccgatgagattttctgctgcgaatttcagacaaacggatttcaaggcggaagcattgtaacggtcagcaagcgccaaaatatttgcaacggaatctactgatatatccttgcagagcactgactcgcacattagacttaatctaggcaacttgtatttatcagcggctcctagtagctttgcagctaatgtgtctgaggcagatggaccaacagatgagtccgtaagatgatcatgactctgcatcatcaataagagcatccttgtatatgtagtggagcaaagccttcaccagaaatgcatcaaaacaattagagagaaatc

SEQ ID NO: 63592 - DNA, 383 bp, Arabidopsis thaliana landsberg
  unsure (1)..(383): unsure at all n locations
ctgatgcatggttctgccaaaaaaaatacgaactctggtcaaatggactatgaccatggagaacctgacgtgtccccgttaagcagtcttcgcagttgacataactgctgctacagtttttgacggttgagatcagacgagagtattcaagattcggtgcactcgtcgtagtggaatttgccaactgatgaaaaatttatgtcacgcgcgggttttagtgagtcagggcaaagtaagcgctcgtatcgaggcacggtttcagttttttttgcggtaaaaatggaaaaagttaaagaggttaaaatttgttcggttttgttttccaaacaagaatactaattatagtaattcttctagtacatggttgttcaccnaatatatga

SEQ ID NO: 63593 - DNA, 334 bp, Arabidopsis thaliana landsberg
  unsure (1)..(334): unsure at all n locations
atttatccatagttctgcttccaaatatgtacaattctccctttttcggtgtttcttgatgagaccatgggtnnnnnnnnnnnnnnnnnnnnnnngactagatcctgctgtccacagcggtccgagctggaggtagccccatcaaacgaacttatacaacattatgtctccagtaccttccaataaactagtttccatacccctaaaggtttactcttcttttggacgcagcttctcacacagcaggaatcaatgctgtggatgatgttgctcttgagtaccggaggcgtgtgctatgctagtaatcgggggatccacaagcaatgggtatgcc

SEQ ID NO: 63594 - DNA, 1340 bp, Arabidopsis thaliana landsberg
tctatggtcactaggttacatgcaaatactaaaaaaaacataaacattacacaacgaccatcagctaatagtaatcatgtatcagtagtaacttgtaatgcctagcaaaacatttgtgtaactgtgcgagttagccagttaggtcaacatgggacaatttagacctttacggagtgtattgatataaacatccttatttatcatgtgttgtatctaacaaacaatactatttccagataggagaccaactagagcagtgaaaaaaaaacatggtgagaaattccacgtaccttcacaggtaagttttcgttgtaaggattcctcaaattccgagttttgtggaaggatagttcgcacaactacaatagtaagaattacaatcaatcaaagaagtcatgttactgcatgatttatgaaagcatcccctttacttctcagtagcatgtgccagagaaggactaaatgtaacagactcaatcgcatagagaatgactaaataaacatctcagagaaaggactattaactaaaagggaaagcttagtcacacacctttaaccatttaactgaaaagttccggccatactgtgcagttccatgttcatgtttccagtttcctccaccaatgtaaccaccaattcttgatgtcatcttagcacacccctatagcatcatatgtgaaacaaagttatttagaatcataacgctgcctaccaaatacactatggagaagaaaactacagaaaggcaaccatcaatacatatgaataagggttttgatctgtcaataggcttacagtaactaaggtttaacccaataaactacctggaaatgccgggtccggttgacagaaaatatcaagatcacattttccacagagtcgaaagcttcattaagtttagcttcattgctcctttgtgtagcccacacaccttgttgcacagataattcaaaattttctcgattgttacttttaactacaaaatacctgaaaaaaacaagatcctaaattatgtaagggattacctatgaagagtaataatataccacaaggtatatatacagttaacgaatccataaaatcaaacatacaagagttacatcaaacttaatatcgagcagtcaagatgagcatcttcgaaagccgaaatactagacaacgtttgaagaatcccattcttcttcacacactcattttagatcaattgtatgggattttagaagatatagctacatgaattacacaatctcttactaatatctgaataaaattacgttatgagcaaaatagcaacactagagcacaagaataggcaatcaactcttggtgaccaatctaaa

SEQ ID NO: 63595 - DNA, 973 bp, Arabidopsis thaliana landsberg
gagaaccagaagaatttatggagaacagcttcgaagtacgaaataaacaatgaagattaaatttcctttttataatttttagcagctgccgccaatacattcccgaatgccagattcgagagggtcgacttcaccggatccggatccatctctttaccaaccaactaatccaactcagaaaattttaaaatctcaatcaaaaatccctctaagatagccagagaagagattgtaaacaaggatttgaaatctggtgcagagaggagaaactccccgacaatgaacaccaacgatctaaacgcggcgtttggtaaaagttgagtaaattttgttagggcttagttttagtccatgggctaattagtaagtgatttacggcccacacatgagcccaaatgtttcagacccagccaagtttcttcaaattcacccaatcaacgacgatgtacgtgtgtatgaaaatcattaacacgacgcatcgctttcgaggaggagcattacgtgtcctgttagctacgataatgttagtaccgccacaaagaaaaggatagatattttgctttccagcaccctgtcatgggattgatatgaacacgtacttggtatcgacatgaaagctcaaaaataaattcaatccgattcctttagtgatatcagaagttcgttttaaatacgaacacgtatggcgaaacaccacgccgacattttctgctgctgccacgcgtcactttccaaatattgattcattaaactaatagttgatccatatccgaaaccggactataaaactatcttcaatgcgttaacgaatcttcatcgatcaagctcatcaaagtctaatatcacaaagaaagagtttttttaactagcttagctcaaagtgtttgcttaagacaagaagaacatggcgtcttaccagaaccgtccaggaggtcaggccactgacgagtacggaaacccgatccagcagcag

SEQ ID NO: 63596 - DNA, 2582 bp, Arabidopsis thaliana landsberg
gtgtaaatgaagatttttaaaaagaaacaagaggttcttctcaatatctcaatgagcgtaacaagcacataatatattatataatctacacaatgtacttgaaacaaaagaaccgatgtttggttacaatgtaggtactaaaatcgcagaaacttccattgtaattgaaatatgaatcttctatcgattcatattttttctgaaacaccaacattttactcaaccaaaacataaaaaaggaaatcgtgatcctcaaaaaaagatgcgaatttcagacaagaacagaggagattcaccagaaaaaaccaacaaaagcaagaacaaaaatcctcacaaacccgttaggataattcaatatagaacaagtagattcataccagagaaattcaaccaggttggaaagaaaagtaaattgttttaaggcaaaaccacatgcaagctctaatgggaggaatcagaggcaggggagaaatcacaaatgcaaacaaagtttcttgtgaaaaccatcggagaaaaaacgaatgagctctacgattataagaaaatacacaaacacacatgcatgacgctgatacataataatgggacttttgaaaaaaaaaaacaggaacaaaggaaataccttttacagatttttgtcaagaataataacgtataatgctgcgttcatagttgtaaaattctcttgggggaaaaaactggtaaaagggaaaagaaaaatgtgatgatccgagaaaattataaacgaactttgtggtaattgaagacttcccgctttttcaggtttacacttcgaaaataacgggaatagaagagagaagaagatgataaaaaaaaaatggctaatccaatttttagttataattaaatgaaatgaaatgtataatcccaatataattacttctcttttcagtcaaaataaaaataaaaatcgtcagctcaattaacaaaacggactaacgagttcgtctcctcgacgcaccgcacaataacctccgtcgcattcgcaggtaattttgtttctctttctcctccatctttcctccaacgaattcgtcttactcagtcgtggatccaaacaattccggtcataatcgtagccttgaacggcggttttcgcggcagtggaatccgagtctcgctctctcattcctaagatgtatcgattactctcttcaaacatcgaattagggttttgtttatgttatctgatcagacatcagagtttaggatcctttggattctaattttttccgatcatcacaatttgtcaatttctactttcccgatgagttttaaaattggacccactcaaaattcaatttatcggataagcaaaccaacccaaaattaatatgaaccgggatcataacataatgggccttttcagcactgaattaaaagcccaattcgtactatgtggagagaggagagaacaataacaaaaaaactcaccgttccttcgtcctccgtcaaactttttggtcggttcccggcaccgacgtgtctggcaagaacaacacgtgtgatacatcactcgatctcagagctgtgagtcgataaaatttgggttttaaaactatactattcctcattgttatggctttcgttaattctggagtttactacttcattcttcgagcttaagttttaagggtagattaaattagggtctcggtttcctttccggtgagtcggtggattcatagaacagctcaaaagattcttcttcagtttcatgattcctgtagttagaaaaaaaaaaactttgaatctcaacgaaataatttttattttctgaaaattttgatgtgattggaacattttttgtcttctctgttttaatctttagtaggtgatgaagtggtctaaccatctaaaatttgtggggatttggttgtaggaacagagtttggagtagacgactataatttctgtttctattgagagctatggcactacgatcagtaagcaggaggctcgggagcagaattttgaatcaacgttcctttgttgcttcgcttcactctcatgccacaagtttcggtaacattcttgtggatgactttcacaattcaagatcatctgttttgatgctatacgaaatgctttgttttctattatatggcttcttcttgagtttctactgtgtgagtttaacttcaatgttttaatttcagggtttcaagaagtaaaggaagaagagaaaagcaaattggttggtaatgtattcaccaatgtagcttcgagttatgatattatgaatgatgtgatgagtggtggtttgcataggctatggaaggaaaggttagactccgtgacacgtttatcactagtgttatgaattgctcttgtgtaaaaattgacacttttgttggtcttgtgatttcagactcgttgggaagctaagtccatttgcagggatgaagcatcttgatgtggccggaggaacaggttagtcaaatcaattttaaacatggaattttgctgtctctgatcatgagtccatacatgtaattattgaaaatgttttaggctctttgttatagatattggttgtaatatgcaggtgatggtgcttt

SEQ ID NO: 63597 - DNA, 478 bp, Arabidopsis thaliana landsberg
  unsure (1)..(478): unsure at all n locations
ctggactgaacattaaatcgaatctcagcgccagtgacacggttacgccttagacgcttgccatggcgatcagtgaannnnnnnnnnnnnnnnnnnnnnnnnnnnnnnnnnnnnnnnnnnnnnggaatgaagttgatgaacaagtgattgcagtcgctctgcttgtaagaggcgccaacaatctccaaagcgtccaaaatgttgttcaccagacgatcagtctccgatatcaagtaatcagctgtgcggacgcttgagtgcaggcgaccaggacgaaccatggcacgaacaaagaatcggcagtctgaggtgatttctttgccaacggcatacaatacgtggacctggcgattgccaataaagcaaggcttgatgtccaagttcggaaagaacgagacatctcgatacgattagccatggcaggctcgatatgaccaatggtctgatctttagaattaccgatgcgctttccgaaagt

SEQ ID NO: 63598 - DNA, 1699 bp, Arabidopsis thaliana landsberg
aatactatgttcttcaaaatcgtggttgtgattttactcgaatttatcgatgtacgatcggctatgaattaaaacataatgcgcctatgagattcgcttaattaataagatcatcgcctgatgaacggtgacagcatttagcttaatctccaaggctattagattattacagtataattagagaaaattagattttaattaaaagaaagtgaaaatctttatccaatactggattgaaatataaacatgaacttgaacgtatagtgttggaaagagaaaggaaaaggaatggagagacttccacaagtgaaagtaaaagagggggaagaaagattgataaatgaagaagtggtgaatgttacattaagaagaagtttgagattctactcaatacttcaatcacaagatggtttttggcctggtgattatggtggccctttgtttctcttgcctgctctcgtaattctttaattattcttttctctctaaattgaaattcttaaacaaaaatgtgtggtgtcaaaaaatagatatgatatatgtgaaatttgtaacaataacctataaaaaaatgtgattgtacactaaacagtgcaaggttttgaaaagcttcaaagaaagttcttacataacatacaccggtaatgatttttgtcgcaggtgatcggcttatatgtgacggaagttttggatggaactttaactgcgcaacatcaaatcgagattcgtcgttatctctataaccatcaggtttcagatcaagaaaacatattgaatctttttgtagtgaaagaaccaatctatttgttggtaaaaaagccctaacttgaacaagatataacgtgtagaacaaggatggaggatggggactacacgtagaagggaatagcaccatgttttgtacagtgctctcatacgtagccctgagactaatgggggaagaattagacggtggagatggagccatggaatcagctagaagttggattcaccaccacggtggtgccacttttattccctcctggggcaagttctggctctccgtacgttaacaacaacacaatcttgtactggttttgccgcgacccgcgaatcacataatgaattgttgattttatatgaaacaggttcttggagcttatgagtggagtgggaacaatcctttacctccagagctatggctccttccatatagtcttccttttcatccgggccgaatgtggtgccattgtaggatggtttatcttccaatgtcatatctatatggaagaagatttgtttgtcgtactaatggaactattttatcgcttcgacgagagctctacactattccttatcaccatatcgattgggacaccgcccgtaatcaatgtgccaaggtagagcgattttttcaaaagtttttgttgttagattttggtccattaatatatcaatgtcggaggacttgtactatccacatccaaagattcaagacgtcctttggagttgtctgaataaatttggagagcctcttcttgaaagatggccattgaataacctcagaaaccatgctcttcagacagtaatgcaacacattcactatgaagaccaaaacagccactatatttgtatcggtcctgtcaacaaagtaggttacatatatctcaatgcaccaagaaacttaaattactaattttggctaacactatatatgttg

SEQ ID NO: 63599 - DNA, 602 bp, Arabidopsis thaliana landsberg
taagaccaatcttatgcatgtgttctttcacatattatatttatttaatctcttatcggccgccctttaattttattttcatgaggaagacacattcaacttcacaattaacaacagtctataatacttccctcaagtgatatatcatatattaatgactataaatcgttttactctttaattcgaattggacattttaaagtcgttttacgatgatgacctcttaaccactattcaaaaaataaataacgagttacaagacatctacgcaatagacgattatagaccgtactgattatcgtttaatattaaatttatttcggaagcagagtagcagagttagagaatttcaatgtggtttttcattttctaacatagtagatgttttatattattttttatattacattctaaatgttttagttttgatatttattactttactagaagaaaaaaaaggttcaaatgtggtttgagattatatttttctctgaagattcagttttcaattttactatttttgaaacattaaaaagttattttaacgccaagtaaaatgttgatcgtttagcgactaataaaaaccactttgagcttaacag

SEQ ID NO: 63600 - DNA, 2106 bp, Arabidopsis thaliana landsberg
aagctagcgtgaaccaattaatacgtcgttagacccacaagccattttcatttatggttagatgacttttgttcagagtgaatttgaagattgaaacgactttagtgactaaaatgtttaaggtgccatggatggttccaagaaccactgtgaacacaaatcatgcatctaaccagaattgaaattggcttgtgggtctaaggacgtatttaatggttacagttgacgatcttgtttttcatgatctcaaccttgtaaaacacgttcgtattaatttaattctaccctaagcttgtgattttatattgtcgtttttccccttcatgatgaactatttgacctttttggatttctatatcaaccattaaaccaaaaaagaaaagaattgtgaaattttttctttcaattaattaatttggttcagtaaaacacaaggtgcatagaaaatccacgatgaatgtgaaatttctcttgtttattttcttatagagaagaaaatatcaaaatacaaatattaggatgtgaaagaaattgttgtaacgttaaaaagagatactatttatcgaaaataataaatatctactccatcaacaatacagcgtctatttttgtcgtccaaccgaattataccttcttgtttgggcaaaaaccgaaatagacgtttataagaaaattcctcggttttgaatatatatcactatacaactacgcaaaacacggcccttcataatttaacccttgtggtctgaaatttctactaattctttttgttcttactcactttctaacctgctatgctgtaagaaactatttaaacctaggtaagttgagatgactaattttgtataaattttaagagtctgattacacacgacttcagtttaaacaggaagtataattttacttgttattgataaaggcattacaattacaaacacgttggacagtaaagtcttgttttaatgaagtcattacttgtaaatgataagtcattacagtccctcaaactttatttattgtataatgaatgatagtaccaatatctatattagttttcaaatataaatataccattcccttgatagaatattggttcggctcaattaaagttaatatcatacttaggctgcttgttgggatagaacaatccccaaaacttctcaacataaggaggagtcggcttttgattctcgtcataaatggcaaataaatatgtctcgatttctttccctggtctcttcggtgtcccattcttcacatgcttaatcaaattattgttatagattctcgcattctctatatttgtatccactcctcctcccgttggccatccagtctccgccacaactatttccaatgatgcgccaccgaatttctctagagctgagtacatcgcatcgagcatcgcatcaaataggttttgataagatctaggagggtccgaaacgattcctgaaggagccgtgaagagagcgtaatcgagccggatttggcctatattgcccgcgtagctgaagtaagtgtagaggtttaagagtaaaggagagttcttgcttaccaagaaacgtatgattggttccattatcaccataacgtctcccctaaacgaacctttcgatggtggataagattctccaagcactcccatatctaccgatgtggatacctgttaaattccgcacaattataataaaacagagttgaaacttacaatttttgttatataaaaaagagagtaaaacgcaattaagttcttaactaaatttacactaaaacattgaatatctcctatttttaataaaataagttcgcaaatgttgaacttaaaataaacgcttgattaatgctcaaaagaatattcatcttatgaaaatacctaatcgatatatatgagtaatgattataccttgatacgaccaccgagtccggctgctaaaaccgtccgcacaatgttttccatggcaaggactaggaactgtgcgtaatactcggagattttaactgtattcccaacagatatgtaacaaaacctgacaccattctcgtacttcatgatgtaggtctgtacccacgccttagcttgtcattgattctaggccactctct

SEQ ID NO: 63601 - DNA, 450 bp, Arabidopsis thaliana landsberg
ctggggtccggtgatcatctacgaacgcatacctgaaatcggcaaggtcgccgccgccatcgtccccaccgccttcgaggtcgccggcctgctcgggcccatcctcatcggcctggcctcggaccggctgttcggcgcccggcgcatgcccgcctgcgtgctcagcctgctggcgctggcggcgtgcctggcgctgttcaccccggtgctgctcagcggcaacctgtacctggtggtggggctgctattcctcatgggcgtcaccctctacggccccgactcgatgatcagcggcgccgccgccatcgacttcggcacccgccaggccgccggcaccgccaccggcttcgtcaacggctgcggttcggtgggggcgatcctcggcgggctgctgcccggcttcttcgacaccttctcgggggtcatccttttcaccggcgcccccctgac

SEQ ID NO: 63602 - DNA, 1772 bp, Arabidopsis thaliana landsberg
cttacttcatgtcggtgtcttctgaaaccgaacatctcatgtgtgtccgtgcgtgtgcattgctgtatatcaactaaatagcttacacatgtcatattataagaaaccttaaacagcacaatgaaaaaatatagcagttttgtacgatacgaaaaatactagtacatgtttcctagtgaaaacagttattgcttaatttattttatattagtatacgatgagaaatattccatgttttaaaattcaggaaaagagatacttccatacatggaaccaaggccaccagtggggattcaccgttacatattggtacttttccggcaaaactcaccggtgggtctgatggtgcagcagcctccatcacgagccaatttcagcacacgaatgttcgctggacatttcgatcttggtctacctgtggccactgtctacttcaacgcccaaaaggaacctgcttcacgcagacgctagtacaaaaagtaaacaaataccatctacaaataagccaaaaatccggaactttttggtttgaaaaccgaaaggaacctttacctataaaaaaccaaagcggacaaaaaatgtggtattatatatcaaaccacattatctattagtccggttatagctaaatctatctatggagctctatctatatggcttacaaatatgtgtatcttttttatgtctttttgatatggagttgtttgtaataatatatggtgttcgtctctatattctccaaataatcataaattaagagttataaagaagctaagaaaagattacataccaaaattaaagagattacaatcgctggaagaaatctaatatactgtgtttcttcttgattatagtcttgttgttctctgaacttttacagcttgttttcactttgaaattctcggttctaggttttgttccacgcactctctttgtcgtcatgttcacatgatcttgaacttcagctagatctacttctgttgtttcaaatgtttctttcactctgttcttctcactgtcctgtttgattccagcagcatcaagtttggacagatcgattgtaacacactctttttgatcctcgtgttcgtgagagtttggtgaagaagaagccacgtccactgctttgcttttggtcacaaacgaatcagcgagttcttgcacaccgtattctgcgatttccagattgatttcatcggtttttctaatcttgaacgggttgttgtccggaataagtgagggattgctgggtcgggtaaccacttgatccctgttaggctgcgcaagcagtttgtatagatctgaatcttgtttagagtacatcttcttcttcacaatagcttctggatcaatcatagcttcatctgcagtccttttgagctctattatttcctcacttttagacaaagaacataccaaaaaggagcttcccttttcctgttccttgaatgatcgaacaggcgtcttcaacggtttcctagaaaccgagaagtggttaaaagctttcatggttatgggatcaacattaccttcagcaattgcaacagcaacagatggcgacagatctctgataagtttaatgtgtcaaagagaacagaactgcaaaataatcaagtggacttttatgtgatagttctttttttttttttttctggtcttattatgtgattagaatggttgaatgctctgcttttgcctattaagagaagattgaaatatttgagggagaatatgaaaaaggatacggtcccaggaactcaagttgttcaact

SEQ ID NO: 63603 - DNA, 1871 bp, Arabidopsis thaliana landsberg
cagggcttgttttttcatccgttttacattcacatcgatcctacgacggataacctcaatttcaggtccacattttatcattctcaatatacatattgcttcaactttcaagcaaccatataactgccattatacttatcactgatcaactaagtcgagtcattggccattagcaagtaacaaatgctactctttaactacctcttcgcctcacaatgagttcaaaaagtttcacttgttgccacaacaagttgcactatttgctcattcttattgattccattttaatatgcttattactatctctctctttcagttattactatacgagtacaaagagaatcttataagaatatagactcaacaaattacaaagatatgacaaaatattaactgaatacagtatatacaagtttagattaatagagtcgagtgaaaaaatgaatatatttaacagcaagattgcataattattttatgaatttatgacttactcaaaacaaaattcaataattatccatccacacccacatgcataatttcaagaaacaaacaaaaggtttctcgccacattatctcactcacatgaagccaaatcctcctccaacctcacattatttaacatacaaataataataattttctcaaaaaaaaaaaaaaaaaacagagacatatgtctccatgtataatctatatatacatccaataaaaaccacctgtatctgtatatgatataaccttaaagccagagactcgtaacagaaaattttattagtctctcaatctcattttccacaaaacaaatcatgtcatcatcatcatcatcgtcagccaccgatactaacacaaagccatcgtcttcgttgccggcggtggagtctgtcacgtgcgacacgtgcggtttcgctgaagagtgtacgccagcttacatcaaccgtgtcaaagaacggcataagggacactggctttgtgggctttgtgcggaagcggtaaaagacgaggtggttcgatcttccactcgtatctccgtcgaggaggctctccgccgtcacacgacgttttgccaccgtttccgttcttggagtcccgatgaagaggaagatccgatatccgtcattggtaggattctacggcggagtcttgatggctctccacggagaaccaccacgaggacaagctcgagtggagctttgccggggatcgacggcgtagagtcacgacggtcgcttctccgatctgggagttgtttcccgtctctctctgcttgattaataatcttgttagttttgtaaatttgtttttttacttttttggtttaagattatttgcatcattttagaaggtgaagaaagagttggaatccgaggattaagtttcctatgacgttagcctttcttcataagtgagttaatcaaatggtgtaaaaatgagcaaagctcatcagttcaaaataaaataaaatgagtaaagctcatgttctgtgttctttattctttaatttgggttgcttaatctctattattttttattaatttgaaatgcttttacaaagataatctactgtaattaattgtatattagggttaagaaatataaaaattcaagtagctaatgaagagaagataaaacaaacaaatctgtaaaacattgatctcgttcaaattcggtaggatgtgcatgttgttgacaattaaagaaaaattagtttagattgataaaattagtgacgcaatgcttattttagatatataaactcgaaatcttaccgacttttaaatataagaaactttcttttgcttaatcatcatagtaaaaaagattccgctgacttcacctcggatccgctcggataggtcaaatgatatgtcccg

SEQ ID NO: 63604 - DNA, 1577 bp, Arabidopsis thaliana landsberg
cgcatcatatttatgctgtaatactctttacatccaaatttggtgggcttgggggaaaacaaatatatgcggacaatttttaagagaatcaattgagttagttaacaagcatcttttgtccaaaaaaaaaaaaaagttaacgagcatctagtcgaatgtgtatatattgttcacatgttgatatattgaatgccaattatgcaggacaaatagtcatacgtagagttctttgacttccatgcgtggattaacaaattacatgtcgacgagacagggggattcaagatttgtgtaccaaacaaacatgagtcagtttcagaaacagtaactaaaggtacattcatttgtttaactctttttaaacaacattatatttttttattatcacactatcactatctactgcagaaatatgattgttttgccatgtgataaatcatatcaaattgtactcatttaaagacttttcctcaattattccttccatcactttcattctccctaaaatctctcatactttttcttttctcatcgatgatatcttttttttatacaattcctaaataactaatcatgaaatagagtgtagtagtttgtgctaattgatggtattgtgtcactataaatgttgatttcaaagaaaactaaacaatgataacaaatccttatattttcaacaaaaattcttatcttatgcaattgagaaagaaaaatctatagtttattttttctcacacattattcttacaattaaacttttgtatattcaagaagtggacttgtgaccatataataatcaagagaaactattgtactagtgtccccatgtatagaaaacctactgttttagtacttgctatttgagccatagacataactttttacaggttaaatccaagtttgaaatcaatctcatcgttaaaaaggtgaagatcacacaaagaaaacgtcaaatggatcatactgggcccattttgcagaccaagagaaagtgagagagagttgtcctctcgttatcaagtaacagtagaccaccactaaaccgcccaatagcttataatcaaaatagaaaggtctaataacagaaacaaatgaaaaagccttgttccatggactgcctacccgaattgattgattcgactagtttttcttcttctttgattaagacctccgtaagaaaaatggtactactaaagccactcgctaccaaaactaaaccattccagactgtaactggaccaatatttctaaactgtaaccagactctaaacatataaactaattaagaactataaccattaaccgtaaaaataaatttactacagtaaaaaattatactaatttcagctatgatggaatttcagctcttaagagttgtggaaatcaagtaaaattaaaatcataataatattcttcatccttatttttgtttcacatgcatgctgtccaatctgttattagcatttgaaagcctaaaattctatatacagtacaataaatctaattaattttaattactaataaaatgcttcatatatactcttgtatttataaatcatccgttatcgttactatac

SEQ ID NO: 63605 - DNA, 623 bp, Arabidopsis thaliana landsberg
caattctgcttttttttcagatgttaaaaaagaaaaacaattgtgtcaattgttttacttcttttcattagtttaattcattaaaaaaaattaacacaatcatcagagttatattacaaacatatttttgtatattaatgattgttgaaagacaataaaactttttttcttttgacataacacaatttacatttattgaaagacctccaagtcctttcccttcgtctcccacttctcacttcacactgtgagtctgcgactatctccaagaccaagcttcatactttatttttgcaaattccgtttctaaacgtaagttttcttatcttcgtttctatcagattactccttaattcttagtctcgaaataaaaaatttgaaatttattcgatgttatgcaaatcgccgccgacataaaaaccctaatttcaatctcatttttcatctgaattacatttcttttgaattgaatgtttctggattgtgttttggttttggtattaactgatctattagactaatccttgttcacctatcagataatattattgggctctgaaacaaatttgactcacttttgtgtgtgtgagcattgtatctcactacaaactctagcttgaatg

SEQ ID NO: 63606 - DNA, 1188 bp, Arabidopsis thaliana landsberg
aagtcagagatcactaagatgcttatcaaagctatgggttcttctgatacagacaaaagattgataattttcctggccccaactgtgaatcttgttaaacaggcaagtctcttgtttgattgtgatgtatgagttgatgatgttggctaatgagtcgccttgggagcttatttttgaatgttttattggtgtgtgtggttttagcaatgctgtgagatcagagcacttgtgaatttgaaagttgaagagtactttggagctaaaggagttgataaatggacatctcagcgctgggatgaggaagttagcaagcacgatgtaagtttgtgtttctttctgtgtatattttggctagttatggctagttatacgccaacaagtgacttgctagtaattttggtgatttatatcaaaatttctttgtgtggttagtgaaactttggcagaatgttgtaatccacttgaccagctcattgttgtattttgagtcatggatgttcactgagttagttaaaagcccattccaatttgttacttttggggttggttcttcttccattgctgattctttcttaattattttgtttgaacttgtttgcttgagcccttgacgtagatttgtgactgcattgatctcactaacagaatcacatacttctcttttgttgcggaatccacgtgagtctattatctgcaatgaaattatgttttgtatggttcaggttttagttatgactcctcaaatattattggatgcccttagaagtgcattcctgaaactagagatggtatgtcttctgatagttgacgaatgccaccacacaacgggcaatcatccctatgcgaagttaatgaaggtgtgttttctcagtaatgataagctctattagttttttcataatagagtttccataacttgtcaaagaactagattctttcttgttttcatgaaggaattctatcacgaatccactaacaaaccgaagatttttggattgactgcgtcagccgttgttagaaaaggcatgctacttaaaaatttcttatttcctctgtatgccaaaccaaagatcctgcttcctgtaactactttttaatgtttgaacttcatgtaagtaacataaactcatactacaagtgtttcctctccctctaactatgcagctcaagtatcagaacttgagagac

SEQ ID NO: 63607 - DNA, 273 bp, Arabidopsis thaliana landsberg
gaaacttattgacacttcgttatggtctttgatttgtataggacatttgaagattgaatataacagagcaatggatgctgaaattctacagtttgtgagagtatcatctgggctatcggttaaccgactgaaccatctgatcaatctcatcaatgcgtggtcaacgaactgtcttgagtacgattgatggtgtgattgtggaggctgtatacaaatgggttcctggttctcttggactagaattggatggaggaagctgtggatatttttcac

SEQ ID NO: 63608 - DNA, 295 bp, Arabidopsis thaliana landsberg
  unsure (1)..(295): unsure at all n locations
nnnnnnnnnnnnnnnnnnnnnnnnnnnnnnnnnnnnnnnnnnnnnnnnnnnnnnnnnnnnnnnnnnnnnnnnnnnnnnnnnnnnnnnnnnnnnnnnnnnnnnnnnnnnnnnnnnnnnnnnnnnnnnnnnnnnnnnnnnnnnnnnnnnnnnnnnnnnnnnnnnntgctacatgcatctgcatcgggtcagatatcgcacatgcgcgctagtattccatcagtttatcggctaaggactatctggggtattctatatcccattncgcttcccctatgctttcgtgctctcagtagtc

SEQ ID NO: 63609 - DNA, 491 bp, Arabidopsis thaliana landsberg
gccaaggacccgagggaggcggggagcactaaacataccagtcctaaacctggtttggtactgcaaaatctatatactttagcttttttgacttcggaatcgtgcgtatttaaagtttgataaatgtttatgcattatatatctatattccaatttcccaaattatatattggctcactagttaagcttatgctattgtggggtcgattaatccgccaattttcttaggttaataggattgtatagtagttatatttatattacttttggccatgacgtggttcaaacccatataaaagaaagtgcttcatccactctattaaagtcaagtgtacggaattctctggaatttgggcctataaagcttagtttttaagatggaattattcgaccaaatgaacaaagtaaagccaccaagggccacctaggactattcttccatatgcacttagttaaactttgaagaaaacggaaaagaaattcaacaaaag

SEQ ID NO: 63610 - DNA, 532 bp, Arabidopsis thaliana landsberg
gagagagactcgtcccagccgacacaggggtcatggattggatttggccaagctgattccttccgtccaggaagagcttcggatattggacatgatcttcatgacccaacgacccgagtcaaatctccagcgcccactcatcctttgcaaaatgacgtgaacgcttctcccagaaggtctccgccttcgaacgctcatcatttgcaacatgatgcggtgaactctcgtgccaaatcaccccggccacacaccctcgaggcggacgagtcggtgccgagtaggtccgcgagcccagggccacaccatctccaacacgacaagtgagggactttgatcgcggatgacaggacgggctgatgatgtggacgagcatggtcgaggacgggcctcggatggcctcggaccaacatgattagactacatggcgattagtacctgaaagcacgccagtattgttatcactccatagaccaaggcagttgttgaatgatattcggttatgaaagtcgtgttcgaggctgggccgatgtct

SEQ ID NO: 63611 - DNA, 1951 bp, Arabidopsis thaliana landsberg
ctgtagaaaaaggcttgaaaacgcaatgtctcacttcattaatcttctcgctacgacttgatatccacacttcatccatcctttcgctacgaatttctatccacttgaaatctaagcttacaggaatatgatatgagccactgaacacccagttgtttggcattccatgataaaaatcgaggaacatatctgcaatgaaactcaaaagtcactaaatatatatactgatatacaataacatgatataggatgggagataaaactgataaagtaaatatagactatacttgatttcctagcatggatttaaatttttttttgagagaagtgagaaacttcgcaattctttttaacctttaacaaggtcagaattttgacagcataatgttctgtaagtgaacaatatatgagttggtgtcaaaattcagtatttgttgtattctgaaagactagtaactagtagtaggcatctctcgctgcaatattggtctgatcttgatgcgtgttggatgcattcccaacgtgtacattgctcactcatcaattttatcatcatagctacctgaaaagtatttgaagtgatgattattaagttcaaatatattaatgtattaagaaaacaaaattttacaataattataatattgttctgaaaagtatatgtaacgttataatatgaatttaataagaagatccttgttgaaaatatgcatgcaccaactagaagatcacaaatatcttggttaatcaatcactgctgtgataatagcaaataaatcttataaatatctaagaatcagtaaatctaatttataatcgggaattagttaacttctacaaagagatataattaatcgtgattactaaagtactcaagcacaaagtcatacctgtaggcaagtgattcggcgatgaagattgtttgcagagtgacggcgtcgatctgtttattaagatgaagtgagactaatcgaagaaccttatcaacaaactaggcaaattttactctagataaatagaagggagacttgactaggtcttaatgattttgttttatttttttcaagacttttccatttttgtaaatcgtgtgaaaaaggataactttcccaataaaaaaataggaagagaaaaaaaaaaaatgttaacttatttagatcatgatgaacgtatagatgataaccggcgatttggttagaatcagagaatatgattctgatgaacatgtgaagtcggagcttctggtgaagaatcatcgcgaatagttgtacgacaaaccgaagaagtagcttaagtaacacgacgaccaattcgacgagtagtcaccatcggaaaagcttaacgctttgatactatgttagtaacaaagaatcttgaagaagaacaacaaagaagacgaagtcaaagatggaaaaatgatttcgctactcaacttaggaaagtttgttaaagagagacacttatataataagaaaatcataatactaatttgttaggaaaatataccttcaccaccatttaacttttacagatcaaatagtacataaatatgtttagaatatttatccaatactttttggatcatgtaataagtttttcatctaaatttgcaaaaaaatataatactttcatatatatatatatataaggaaatattatgctatgggcatttttttgaaacttaatttggttatggagtattatttgacacttttctaagttttttttatcactacaccctcaatccaacctaaccaatccaaactaactatggttagcaacctttatttttgttctctcttcattcacttttctttctccccactttataaaagggaatcttacaaaatctaccactttttgcaatgtgtcttacaattataccacatttcactcatgcttaccagaattacccacatttattgtcacatgcatatttgtggaccaaatt

SEQ ID NO: 63612 - DNA, 521 bp, Arabidopsis thaliana landsberg
  unsure (1)..(521): unsure at all n locations
gtagaccttctttcttgatgaggaatgtgcgttttctnnnnnnnnnnnnnnnnnnnnnnnnnnnnnnnnnnnnnnnnnnnnnnnnnnnnnnnnnnnnnnnnnnnnnnnnnnnnnnnnnnnnctctgtgaaccgctctctatcatgcatattatcaagatagtcaagagtttccagcccttcaagtctaacttcactgataaataccaaaagaaaagagaatgtattgagttctacgttatattatgtgacagcagagactagtagaggctaaattcggtgtttcacctaatatcggaaatggagaagtaagtgtggtaagcaatggaaaagctaaaaggctttgaattgatgtttctgactcgtgatatcagtgttaggttcccatctaatgccaatgagactctcagatgaaactcaaagctgaaacaagagcaatagcaatttaatcatgctgaaatgaaaagaatcagatcatatcgaggaatcaaaataaaatcatttgatcgggtttgcaacctac

SEQ ID NO: 63613 - DNA, 277 bp, Arabidopsis thaliana landsberg
acaactagcctcctaactttggaggaagagggggtggtgctgatggtgccctagtttgacctaatggtggtggaggtggcgcggttggtagggggaggagaggcagaatgggtgggaagccggggaggtgcacgtggtgcaggaggtgaacttttcatagcagagattccattatattgtggtgttggaggagcgggcggaggaggaggaggatgaggaggagggggataccttgccctaacctctctgcgtgcgtgcccttgcttgtcgtatgatg

SEQ ID NO: 63614 - DNA, 1284 bp, Arabidopsis thaliana landsberg
gtgaacccagtataagtgtatagacaatgtggaaattgtttggaaagtgaaagacattctacattactactactttagtatcaatcaacttgcagggacgttggactgttggattatggacttggtggtctgtattgactgacaagagactaacaacaaattctcaaagggtggggagcagtgaacgaatacaccagaatccgattttggcggacattggcttagcagagaaacaagagtagagaaagagaagcaactgcaaaacttcttcatggttttttaaagtctaaaatgagcatctgacagacattgtatcccccttttagttttgctaaaacttgtttctatctccgacaaactagatgctaaaatacttcaaaagaaaacgataaaacaataaagagactgaaaactttggtcttcaaatcttcaacctttcacctatagctcatcctgcaaaaccaaatcacgcagttttaaccacaactcaaggaaaacaacaaaattatggatgagtgaaatttctccaagtgatattgtggtagcatacatgagcggtggcgtctttctcagaggtttcctcgctatcttctgatttggtctcctcggccttagattcagaatcggaatcatctcctccttcatcatcctctggttcgtcttcagcctggaatttatatcacatataatattaggaccttgacagaaacaaacaagactctaaaaaatttgatccttcacaagtgcttacatcagattccgcaggtgcgtccttggattcctgtatcaacacagaaaaaggagaatgccgtcttagattatctattcccaacttggttacaacaattacataattggcagtagaaactccacaaaagtccaaactacttgttttagagagattcaaatgaattaagctaaataattaggagagatatttacctcttcctcattcttcttctcagcctcatcgaaagctgctttctccgcctgcaatgtgatattagattggatattctgatcagtaaccagaaacaaaaaaaaaaaactgtgttatgaaattgggtattttaaacacctacatccttgagctttccccatgtttcatctgccaacttcttggcatagtctgggtcatcgcagatcaagacattgtcgaacaatgatcctgatttcacctggaagagtaacatgtgttagatgagaaacatgggattaaagcatctcttcgaaggtcattcaaagtgacaaagatttggttacctggcacaatacgagtcaaag

SEQ ID NO: 63615 - DNA, 201 bp, Arabidopsis thaliana landsberg
cgaagacgtgaggcggttaactaccgaccgctgatttaccgcaacgatcccgcgagacaccgcagggctatgcattgatccggagtcgtcccaatggtcgcctcaacgatgatcggaaaaaaaattccaagttaaactttaacaattgaattggcgacctcttgccgacgggagactattggaggcggaaaaaggaaggac

SEQ ID NO: 63616 - DNA, 510 bp, Arabidopsis thaliana landsberg
cccttacattcattaatttactaatcaataaattccaaaaacatattctagaaattatacaacattattttattcccacacaaaaaaaaaggtttcagtggaaccatgattttaaagtctctccttttcatagtaatatatatttttatatggataagaaccattaaacgagactatctttttttgttttatcggtgaccgaaaaaaacaacacaaaataattccatacaaagagatgtaagatatccattttgttgatacaaaacccacaacacagatggttgaagcttttattgctgattcactatgatgtatactctaagtgtgtaacccatgaatgatagtaatacagtaaattcttaacccacaatatgtaaagctaagcattaaccagacaatgtttcttcttattgtaccatcaaatttctaagtatacaaacattctgcataagctgttatatcgtcgaatggggtagacctgaggggtacccgctattattccccccgcct

SEQ ID NO: 63617 - DNA, 562 bp, Arabidopsis thaliana landsberg
aaatgggggcagaaacatccaagaacaaagtacacatcaaatgtcatcaaccatttagtttaacttaagattaaagacataaatgggggcatgatatacatcgacatgtagtgtaacaagagtcatcataaaaaccaaaacacatgggccaccaaaacctacccaagaatgttctctttcttacaaacataaaaaccaaaaccctaataatgctcattatcctttgaatcttacctgtttggcacgctatgtatacatatgcagacactttaaaatagtgtttgcacaatttacaactcataattgaatatgtgtttcctatttcattttattctcatttaattattgatgttttcgaacatttttttaattatgagaaattttcgaaacgttgaaggaacatcgacttgtgtccgaccttgggaatcaaaagactaatataattgaaacgagatttgtgaaacacacagtgtttataatttaactttggtaaaactaatatatatcctcgattttacccaaggaaatttatatcttgataaaaaaaaaaagtggacaatta

SEQ ID NO: 63618 - DNA, 525 bp, Arabidopsis thaliana landsberg
caacagcagaggttcacattgtgccgaccaatccaccgttattttcgttactggaaccggatatgcattggtgatggcggatattgttaccggtgttgtctcacacacatcatcaatggtaacactgtaagtggttgttgccaatggggaatcatgcattgtactttgagttccgacatctgtttgcccggtagaccaggtgatggtataaggtgcaccgatcccacctgaagcatacactgtcaatgaatcctcatatcccggacaagtaaacgcatctgaagacattacagcagaaaggaccggattcatcatcacgtagatcgaatccctgttagaccaacaccccaaattgctttcagcctgaaccggataataagtatttaccaatggactcacctgggtcattgcggtcagtgccggactatgatcccaatgataggaataacttgcacctcctgtagcagaagcccaaatcgatgccgtaccgttttgacaatgatcgtatcgtcgagactgtattac

SEQ ID NO: 63619 - DNA, 545 bp, Arabidopsis thaliana landsberg
ccccaccggcctgaccggcatgcagcatgccgacggcgaaatcctgggcgccaaggcggccgaacggttcggcaccccgtacgcatggccgaccatgagcatctgctctatggaggatgaggccgccaacacgcatgcgccgcactggctccaactgtacgtcaagcgcgacaaagacttcatcgccaacctcatagatcgtgccaaggccgccaattgctctgcgctgatgcggacgcttgacctgcaggagatcgggcagcgtcacaaggacatcaaaaacgggttgtccacgccgccgaaacccaccataggcaaccttatcaacctggctaccaagccgcgctggtgcctgaacaatgctgggaacgaaacggcgcacattcggcaacatcgggggccacgccaagggcgctagcgacctgacgacgctgccgtcgaggacggccgaacagctcgaccccagccgtgactggaacgacgagcagcggatcaaggaacgctgggggcgcaagcttatcctgaaaggcaacatggacgccgaa

SEQ ID NO: 63620 - DNA, 489 bp, Arabidopsis thaliana landsberg
tctggggtgggtacatacgggtcctgttttttgatgagcgccctatctgtgccttggtgaggctttagttacgcacacccgagcagcatgtgcattcagattatgatgagctgtgccggatatattcactctgggagaccgggattgttcagagcacttgattggttctggttgctctgttgaggactgttaaaaggcggcggagcttatactatcggccgcttcgtaagagctatgctcagccaactatttcacacacgatctttgtggggccatgaaaagcagccaacaatgaagaggatatcttatgctgaccacagactcttgagagcgtgcacccatcttatggactcctagccccattatgatacgtggccgactgtggtaggtgacaaaccctggtgggcgattatgcgatctgtgatgacaccaacaggggctttacctcatgccttgattaaggggaaaaactaacctacttcatatctt

SEQ ID NO: 63621 - DNA, 696 bp, Arabidopsis thaliana landsberg
atttcccgatcaacaaatgaaagatgcgaagaatctctatatagaatattcttctgcgtaatttaatgaaaaaaatccttaacatttgtaggatccatttgtaaacaaaaccttgaaataaaattcattaacaaaaattaaacttttcgtttactgaagccgtctacttaaaagttttttttaattaaacaaaacgacgaggtacttgttttttaatttacacagaaacaacaaagtgttttcttaaacgttgaatgtataagaaaacaaaaactacttgtggtcatggtatttataagaaaaatatcaagatgtttttgacatttacggcttgaaatgctcttaccttgccatccaaatttcattttcaatcagctcgtatatctatggatcttttcagtttagtccattagaaaactaaatcacatataatatcgtacatataaggttcacaaggaaatagactgggacgaacaaattttcatgatcgttagttagtactagataaattattgtcactctcaagaaattgttagctttttatttgtgttgttacttaagaaatatcattaccaaagagaattggtctttaaaattttgacacgttcgataccacaaccattagccattaaacaatataaatgagttagcaaaaaattagtataagaacaaaatggtccaaatttatgttaaaac

SEQ ID NO: 63622 - DNA, 717 bp, Arabidopsis thaliana landsberg
gaaccatagcaaaacactgaaactaatgaagatagttacacaatatcatacaacacagccaatttgacattcttctacatcataacataatcctaaaatcttacaagtttttttgcttaatcatctcagagcaatgtatctacttaagctacgaagtttgattactatctaatcttaatcagaacgatagacacgataactaaagatcaatagcctaatttacaagcaatctctatttcctaagaaaattatcatccaatcttaatctaaagaatatacacaataagggaatttcaaaccctaacccaaccctacttaccaaatgtgctcgtttcatcaaattgaaagcaataaaaacaataaaaaccagaggaaggattcgaattcgatgaatttcagacttactttaaattgcgactttcgacgccggagtttttcgcggcgaaagaatctttggcggcaatcctttctttggcgcgatggtattgagcatcggatcccgtaaaatcctttgtctgtttagcttcctcctgagacttatagagctgagctttaagctccatgattgaggaaggaccaacaccttcgatggcgcgatgcttctttggcataatcgaagattccgttaaccatcctagcgattcagtgactactctcttcttcgtctactcttcgcctaccattttgatctcctctctctcgttctcaaaaaatctg

SEQ ID NO: 63623 - DNA, 842 bp, Arabidopsis thaliana landsberg
cttactactttttattcattgtggtttgatgttattttctttttattattgaaggtagtggcgattgcggctgatttaacaccggagcgttattggagcactgctttaccaaacactcccattcccaactctctccataatcttttgactttcggttaaaatattttactttgccattcccaactctctcacttatttttgttcttaatgttagaaatacatgtttgttctgaatttatattatgaatttatattatggttttcactagtgttagaaatacatgtttgccattccattcccaactctctccataattaactgttttttttctttcttttctttaaaacacacaaaacatatttatttacataaatgcaaataaagatgtgtttgacttgtattattacaatttcttttatatttcaacatatttttctgaatttgtatgtagcaaataaatgtattcttttttagttgttaataaaataaatgtttccttaccaaactttttttttttgcagattttaccgacgagaaaagtaccaacgtccaagtaggtaaaggcggagtaaacgttaacacccataaaggtaaaaccggtagcggaaccgccgtgaacgttggaaagggaggtgtacgcgtggacacaggcaagggcaagcccggaggagggacacacgtgagcgttggcagcggaaaaggtcacggaggtggcgtcgcagtccacacgggtaaacccggtaaaagaaccgacgtaggagtcggtaaaggcggtgtgacggtgcacacgcgccacaagggaagaccgatttacgttggtgtgaaaccaggaacaaaccct

SEQ ID NO: 63624 - DNA, 1724 bp, Arabidopsis thaliana landsberg
tataaattgatacacagaatctgtgaatgtttctgatttggtcctcatctttttatttcttctgttttagcataaatatatatttgcagaagttagtgaatataaatgtaacaattttatttacctagacatcatgatgacatctaactaagtaaaatgtattgcttcgttgctggtaaaaaggtaaataataattcaaattcaaatatcagggaaatattcccatttatgatatatttaaaatagttatatatctcaaacacatgctaacaattttagtcaaactaaaagttaaaagaaatctgaaaatatggtataaagtgtagggcacttttagaattttaacatttttggtgattgagtaaattaaatacgtgtatataaagattcgaagtgctcttcacgcgttttttagtatgaaattaaaacacaaacgaaggaagagcgattaactccacaaatactaatgtcgaaacgcaacgcgccgtttcaagcaccgcctagaccgctagtaaaacaacattcatggtcaccggacgcggatcgagaagaagcttggcttcgaaagaaggggaagcaatcattgggccgactcggtcggagtaagagcgtgacggacgaagatctagaagagctcaagggatgcatcgagcttggatttggattcgagccggattcgcctgatttagatccgaggctctcggaaactcttccagctcttggtttatactgcgccgtcaataaacagtatagtagcagattgtcacggacttcgtctctttcgtcgatcgcatcggaaggtgaaaacagcaattccagcacgacgatcgttgatcaaggtatgtgaattttgaattttctgattcctctttattttcttagtatttgtgttttttaaaaaatctgacggaggagaattgaaattgaaaaggtgatgatccggagacgatgaagctgaggttgaagcaatgggctcaggtggttgcttgttcggtgaagcaattctccggcgaaccgaattgatgtttgaatcatgatgattaaggataataatccctttaatttttttataattacctcttgagaaattattgtttgttctgatgtgatgtacagaggaatgacagttttgtaaaatagatgcgaatttagaatattcaaattttgaatctaatggttaaccaaacaaaaatattataatttcattcttcttaatgtgattttcagtcattgttctttgctttcttttattttgtgtgtgtgtgtttgtaacttcgtagtgtttatttgtttatatggcgagaaccgattaagttagttctatggcttctttgggaattggtcgaaagaattgtactcttaactaaggatatgatgatatgaatcatatcactagagtgtacgcgtcaaatttatgtaaccatcgtgagaggtttaggatgtgtatattcaagtattacaatgatgttccaaaagtacaagtatgagcacttcttagttctttttgttatgtcaagctatcaagcaagtattacaattatgttgctaagtgtttcagttatgatgtcattatgtattgcggtgaccagttgtatatgtgggcggttggtttgctctttcatgaagttcacaaaatggtagcattactatgactaaagacgaaaagtaaagacgtaaccaaccaaaaatagtcgcagatagaagacatgacggatatgtttcca

SEQ ID NO: 63625 - DNA, 516 bp, Arabidopsis thaliana landsberg
agcattctggattgagttttgaagtttttaggagaaggaaatgatggcgtcggatccaaaactgaaggctgagatcgtttccgtttgtcttgcaagagaagcttctgttattgcttacacagagaaggtaaacttgaatcttcatgtattatcagaacaagtgttggtgtgatgctcttttacctgaacgcgtatttgatgattttgtatggatcagataatcgaggaagagcaagttcagctgaggaagtaagtaatgtatctaaatctgggattatatttgatcgctttgttcaatttttaaaggaatgtagtgtacattttacgatcttagcttctctccagctagcttaatcataagtctcagctagtgtttacttgctttacgagtgctttttcttcctgtttcttagacgtggataaattttatggaggaaacacttaaagttactgaagaactggtccttagttattacccaatcatttggaacgctgttgctctaagaatgtgaatgt

SEQ ID NO: 63626 - DNA, 398 bp, Arabidopsis thaliana landsberg
  unsure (1)..(398): unsure at all n locations
cttacggccctgccggccggtgagatcgacaccgtttatacggtttttctgatcaccaacgtgatccacgcggggagcgggtcggcgcgtagcatccacgacgacttacgactccgaggaccctaccatggccgacatcctgcacgagatccttgagcgcctcgagcggttcgcctggatgatctcggtcgagaaccggggagccgggcacagcacaccgagcccgatctgtaagtaaccggtgacgggcgagatcgttatagcgcgacagaccgttaacactcggccgatccaggccgagagttgacagtactgttgggcttttgcttcaccggtcagttgttgaagaccgtgatgccgnnnnnnnnnnnnnnnnnnntggtgccgtggagcattac

SEQ ID NO: 63627 - DNA, 1221 bp, Arabidopsis thaliana landsberg
caatgacatgagaccaaaacatgggttcgaattttcgagtcagttgaggcacagttttttaaacgcctcacactcagtctcactctcacatgactcgattttttgtttgtgtttgtacagctatttccactgtattgatttctttctgatacgattgatgtgtgtatatatatgggaaagaggttggtaaaaagtaagaagacaattgttccgtggtgaaccaaaaaaaaagctcaacaaatcttcagctttgttttcaccgaaccatttttgtttcaataacgtcacagcagaggccagaggggaaataaaaagagtagtttctgaaaaaacaaaaaagaagaagtagagtttcgcaaaacgtcaaaaacttaaaaatctccaaattgagtttgaagctaaagccctaagacgatctttgcccaaaaaaaaaaaaaaaaaagccctaagacgatatctctcgaccttctgttctctccgccgtctgcaccgccgtgatcgaccttctccggcgcccactcagctttctccgtgcttagccgacgtaatttttcaccactacgtacgtctctcgtgatctccttgaaaaatcgaaccctggtttttgatttctctctctctctctcccttctcttatcatggtcgactggttctcaaaagtctgatgattggttgtgattagttccgattacttattagtataagtagatcgttgccttattggatcatcgaagctcctgttttgatttcccactgaaaaatcgatacttgggcatgcaaatacttgtttacttgaaacaatgttacttgtgttcttttagactgaaagacgaggacatggaaacgagaatagaactgaagaagaaaatttccgagattttcaaagactttatgacagtgtaaatttattgttttgcttttgattctgttataactactttcaagtatgttcacattgagtccctctgaatcttgaatttttgtaatgattatagaatcacgcagcttgaagaactagggaatgctgcaaacaactttcttctacggtttcagcaaggactaagtacgttcactttgcataaaccttcactactttcgattgcaggttgacattgtttcttatgaaattactactttcaggttttcttcaacgccctccaatagttacttcgtccaagttgattgagaacattatcaagaagaatgaaacaaggcggctta

SEQ ID NO: 63628 - DNA, 1950 bp, Arabidopsis thaliana landsberg
cgtggataatcgtttaatagcaattagacaacagtcaacattcccaattcacatcaattacattgcacacgacaaatgacagatatatcagaccaaaccgtatttaattatatccaaaatcttatataaaattgtgattatcacaaagaaccaagatttgtacggtgtcgacacaaaacaaagaagagaaacaaaaactatttcaaacatgtcccgactaatcttcgttcgctcatatgcaattatgcacgtgtctacacatgcgaataatttgttcaaatatttccttttgtcatctacacctaccacatgtaatttaagacctcactagctgtgattttgatatttaagaatataccacatacagttttaaactaaatatttgatatgaatgaactactaatgcaaagttgcaaactaccgctaacaatcaaactcctattaagttatgttttcaaaacaggttcattgctttaatgaacgtcactaattcaaacctaagtaaaaaacttaacttttgtgtgagtatctacttgcagcaaataattactttttgttttgacaatatgttcttttggagtttttctcaatattttgcaaagagttggagtctaactctctgcttaaaaatcctacggagatgattacacctcttgcactatttatacatatccttcaaagttttttgaagtctaaattctctttacacgacatagacaaactttcttactttggatggtgaaaaaatctggttaacataccaaaagagtggtgcaatagtggttactattattaacgtcatttcacgatattgtaactagctagttcaacagttaaaggtaaatttatatcattttttttggggacaaagtaaatatatagtatcattgtttcaataatttctgcattaatatatatatccacagcattaatatatttttcataatgtcatggtagataagatttgctcgaaaaacgaccctactgaattaacaattttttttgtttatttgtcaacaatattttttttttcctgaattaataagtttctgtgaagctaccttcttcttactgagcgtctcctgtgggttcccatatacactgttttctatcacacactttgttgtttacttgtatgtattggaatggttcataaactccataaaccaaaagaatcgggtccaattttttttccaatatctaaataaattttactctataaccaaaataaccaaaattgaactaaaggaatttcgatatcattacacattagattttaaattctataaccaaaaaaaaaacgaaaaatatataaaagactaataaattgtccctacttttctaaatgaataagtttcggtgaagctacctttattacccagcgtctcctatgggttcccttattacactgttctgttctctatcacacacacactttgttacttgtctctatatatcattttaaaattaatatctttttttttcagacacaccatctttgaatcttcttcactcaaagctttgtcatattcaacgaagtctttctttaaacaaaacttttaccgcatttaatactcgtcaactacacacacacacactatacatttattcagcttgtgttgtgtatatatattgtgttattcctcaacttggttgttgtattcaatttctcattcctcctttagttttctctacacaagaagatagagataaagacttgacctttttcaagtcttccttggtgttaatactctggaaattcttgaggtatgtctctgattcttacatgggtcgattataaaagatgaataaaatcataaagtctccacctttatggagttattctgaatgtgtttgttgaaatgtctgaatgagattagatttttatcaatcgtcggctataataaatgtgtttggtggtgatgataggaatgactcagtaacaaatta

SEQ ID NO: 63629 - DNA, 1877 bp, Arabidopsis thaliana landsberg
tatatttaatcaatcgtaaagcagaaagcgaagatacacttccagattgtcttcctgaatcctgaccattagaaaaaagaaatacatgtagtagttgattgataattttctcaaattttggaattgctattattttatgaaatcgttatctaagttaaatgatcagtccattacatcactattctgttttcttcttcttctttcgtattttctacattaaaccaaaatatcaaccaaatactgaaccagtgtcaatactcactagtccattaaattatcatttgctttgcaggtagaaatatcgtatttataaatgaataattgtaatacttttagtagtttgagacctattccgacaaagtgtggaagatgatgtgagctagaaatttctcttattaggtcagaagttttgtaaattcgccactgagaaatttgcaaatcactttcccttttacattttctctacgccgcagataaataaatgttttaaaaaatagacgacgacagaaaaaaaatgttttaaaaactatactcctatatatacgtacgagaaagggaaaggcgcacgcatagagaagaacctttgaatatggcgaagggccaataagtcaataacggcttttgtagttccaagagattgcaaatacttatgttgtgtcgtaggtacgtagagtcaaacactcaatatataataagttaagagtcttttttgtactatatcaattctgatttatacctatggagacacatgcgtttgtgggagacgacgaggacatgactcatgaacaccacgttcctctctagttatttattgataatcattttacatttccaaagtgattggaggaatgtgaagtacattgacgcaagttttacacagttaggcaatcgtggatattgctcatgtatgcccctctttacgaacatcgttaacatttaataacaaacgtttaaagttgagacataaaacagtgatttcaaatttgtattagggtggtcttattgtgtgtctagctactagctagagaatactagaagagaatacgtagcaagatacgcataacatttggtcctctcttttttttactttcttttaacacattgtcctcttatgatttgcttattgatttcagtatctttttgtatcagtaattccctccaaatgattaaaccctaaaaaaatgtgattcattcaccacccgaagattagcatcatcaagtaacacacaataactaccaataacctagttttcatttttctatactaaaatcctaaacatcccataaaaatacaaacaactctgaaccaataatttcctctaatccacgtgcaccccatcgtctcctgacgtaagatttgtctataacttatcaaatcccaaattcagctttgttttcattatatagtacgtactcttataaaaaagagaagagtacacatctttaatactttaacttaaaagaagaaagtaatactaatataagaggagtctgagtcagcgacaagtgttcgcggagaaacggaaacgctctctttctctctcttcccccaacgccaatacctttggaatccctccctaactctgtcctgtcctttcgtcctcactttctctctttttacattttctacacaccaataaaattgaaaccagcaacttataaatcaactcaagtttgaattaatgatcgaaaaactagtttatttgtgtcaatatgacccattctttattcacataagtattttaacttttcaaaatgttatctcaatctcctttgagtttctgtcttccccataataaatttcaaataattaatacacatgggtttttaattagaaataatggaaaagaaaggacaaaggaataaaaagaaaccca

SEQ ID NO: 63630 - DNA, 1573 bp, Arabidopsis thaliana landsberg
cccgtctctctaaggcggaaacattaaaacggttaattgggttaaaacctctcgtgggctttgtttcatccttgttcacaacctggagatggaatagtccaatgcatctaccaagaaatctgtggatacattacaacacacacaaattcattatagatattatacaatctcgttttgttctttggtgaaacttcataattttaagcgatatataaactaagaatttacctgcatcatctttagtgaaacacattggtggctttatcctgaaaacgttcccatgaagtcctccttttccgacgagaatgccaagttcttcattaagagaaaggagcgaaacattttggttaaccaactgatgcttatcaaatcgatgcttttggctttaatgttgtttacctctaagttgctcaaacaagacagatgtttcagccttggctggtgtcttgtctttccggtcactcacaagctcaatcccaaccattaaccctcttcctctcacgtctccaatgactgaaaccaaacagacacggttgtaagtaaaaacagagtaaatgatctgattatataagtttgtttggtacttactatcatgtcttttctgcacatctttcaaacgttgtataaggtgtgaaccaacttcagcacaatgttcttggcgtttctccttatcaataacgtttagaaccgcaagtccaccagctgaacaaaccgggttcccaccaaaagtgttgaacagaatcttgctagctaaaacacttgcgatttctggtgtagtcaccacagctcctaatggcaatccatttccaattccctgtgaatataaccggtgtcaattattagtgaactacacatgtttctttaagtatataacagtaaacgtagtcaaagaatggagaacatagcatatggtaagaagtaagaacagagcaagtggtaacaacttcttttgacaaacctttgccattgtgactatgtcaggaaccacatcttgagtctggaaaccccaatagtggcttcctgttcgcccaaatccagtttggacttcatcagcaatgcatacaccaccagcgttgcgaacaatttcataaaccgactttaagtaaccaggagccaattctacagctcctccgaccccctgaagtaaaaatgataatggcatggtgacgattatgttcaagagagtggtaaatcactaaatttcacttgatggtttgtttaaacaaacaaaaacctggatggtctctgcgataaatccagctacttttccagaggtaccatactcgatgtggtcttgaacatctttagcataaagagaaccatcagagccaaaaactccacggtatggatctggatttactacgtgatggatttccccctgcacaataacagaattggcaaccaaaatttacaagcagtctatggcagagaactactttgcagagaattttattctgatgggtctaaaacgaggcttaagatgaaagactcggcttgagaggcaaaaatcaatgctaaagaaaatatctcaactttgaagaggaatcaattcattaaatgaaagtctctgggg

SEQ ID NO: 63631 - DNA, 224 bp, Arabidopsis thaliana landsberg
  unsure (1)..(224): unsure at all n locations
aacagtcaagtaccttcaagatcagtaataatagaaagaatcntttttttttacgggctaaagtaagataaaggttggggttactatgaagacagggaacgggctcaccagcattccgaatatgaagcatgacacaaaagggtgacgtggatcataataggcgaaataaaagcctcaaacaataagcagagactgatcaccttggcaaggaatctataagtgac

SEQ ID NO: 63632 - DNA, 207 bp, Arabidopsis thaliana landsberg
ttgttttaaatcattttcttctcggtttatcactgggatcggtcactttctgttgaaataagcttaatcaagtgatggtgaaggacaaaaatttcttgaatttgggttgtagaataataacaagtacttggtttattaacagatattcaataagcaggtttgcccgagtggttaagggggaattatttcttttcttctcttcatttt

SEQ ID NO: 63633 - DNA, 527 bp, Arabidopsis thaliana landsberg
  unsure (1)..(527): unsure at all n locations
cgatccggctgagggagactccgaccgaagcggatcttgcctgtgaagagaaccgctacctgcgaggcttgatgtcgcagccattgtgccgcgacgggtatgtctatctcctcgacaaacaatacggcctcacctgttttgaactgaagaccgggcggaagctgtgggatgacagaaaccagatgacgccgcgcggccgcaatccgcatgcgtcgctggtctggctcggtgagacggatcgcgccatcatcctgaatgaagaaggggaactgatcctggcgcggttgacccccgaggggtatcacgagcaaagccggacgaaaatcacagagttcacgtgggctcatccggccttcgccgggcagcgggtgttcgcgaggacagacaaagagctggtctgcgtcgccctggatgaatcgccatgacagaatcggaccgcactgacgctgcagatcgcgaaccggaaacctcgttctggtcgtgggacacgggcgcggnggacgagttcgtcgaaaacgaaacgacgc

SEQ ID NO: 63634 - DNA, 522 bp, Arabidopsis thaliana landsberg
acatgggaccattggaaaattataataatatattcgtatactatctcaaaatatgtttgggtaagcttacatgactcggcttatatatatttagcatgcccaaaaattaagttgggttcaacgtatctaattggcccaccgaatcataacactatgataggctattaaagctaacacacacatgctggctagctagaagtatatgaatttatataacaagtgaagtataaacacaattagatttatcgcctatacaaacaaagaaaacggctaatattgctatgtgggcagcagcatccgtggcaatggaaggatacgatactctaataaccccgacttcccacttttattgtgtttacatgtggtttacatcactttcatagaacggttgttatactattcagatagaaactcaggtagcaatatccgcataatctataatcagtccttgtaatagttccaataagaaacaagttaagcaagggatcatatatgattcaatgcatgccggacgaaaagaaa

SEQ ID NO: 63635 - DNA, 655 bp, Arabidopsis thaliana landsberg
taattactaacctatagaaatcatttaatatctccgagttaattcaatctttgggcttataaatccacgtggcacgtcatgctgacaaatactaaaccacgtggagaaggtgatgatgagtcaagagcgggtcctaattttgttggcccactttttaattttttactgacccgccgactacctaaccacatcaaatcaatttgcaactttcttaattttattattgcagctatctttttattatttttgcaactatatcattctcttttgtccttttaagcaatttcaagttttatatcaatttccactccctgagaacatttgtataatctccaaagggaataattggaagtttgttacatcttttaccccacttgaatacttgattatactttagtggatcttattaaaaatattaatatcacttacatggaaattggaatacactaaatttagttgaagactttcattggaaaaaatgaaataaaagttggcactcatttccttaaatgcaattgtataacaactttttttgttcctaataaaaagatatgttaataaaattagcattcatagtattaaatggatcataaacgtacctaggtctagaaactcgtagaattcctcaaaatgtcgcacatataatatttttggg

SEQ ID NO: 63636 - DNA, 1623 bp, Arabidopsis thaliana landsberg
tttttaatataagaaaactaattttcaactataaaatagatactataaaaacggatgaacgaaaatgaaaatgtatctattatatatgtagttagatttatcctaccaaaaaaaatgtagttagatttgttgaaattttgtttgataagtcatttaaaaaaaaaagtaattatcacgatagtcttttcctaaatgcaaccgtttacaattatcgattctgaaatttacataatgacaaaattgaatacagacatgagagtattaggattacaactataactgtaagtttcgtcgttgaccaaaaactaaaactgtaagtttcgaaagaaaacaaattattttggttaaatgattaatagggcgaatactactccactagtacaaataaattattttattggcttacaaaaactgatgattcttttattcagaaaagaaatagagaatgtaaatcaaatagttgtaatattttgtaaacttttattgcagtggctaaagtattaaagtcttaaaaaaaaaaacttaagtttatcatagttttgtagagattatgaaaaagaaatttgtaataaacatcgaaagttcaaaatattgttatcaagtaaactatcacaataacaaacagagatacagtcttacagagtgtcaacacccaaaattagaaaaaaatattcaaaaaaatcaatctatatatgtaaatatggagataaaagtacattttatattctgtcccgatttatagatgcaaatattttacaggagggagctccgacatgtaaggaagtgcaagctttgttattctaatctgtaagaatttttgatagtatgcaacaaaatgattgcctttgatatcgcttaatattaaatatcgtgcatgagaagaaataagaaaataaaaagggagttcgataacgaaattaacaataatatgtatatatagacgaagttaactaataactagctttctttataattatatttatatgaataaataaaaaacacttcgccttttcttcggcttattcatataaatttattaacgaatctcacgtacacgagctcctttatattaattatgtactaaacattgattttaagcactaaaataccattgatctgttaatttaagttgaaattttaacttatatatatttaccaaatgacattccattcccaaagcaaatgcaatctattcgacgattttttttcgtttcttagtttcgtttatgttttattttagggtgttgggcttcaaaaacaatttacatatgtctctttagtaaaacttaattttgatcgattacactaaaatcgtcaagaccaatttttctttcaaacacttatacaagtaaaaacatcctcaccaaggaatttagaacttgaaaaatatccactaccaaattgttttagataacatcaggcccgtaaagatcatcatgcgatacaatcttatatatattaccaattaccaaatgacaatttcgtaggaaatatcttaagaaactacacaactccaattgatattgtaaatccagtcccgtggaaatatcttctataaagaaagaatacaagagaaacccaactctattagtgagtaaggatatttctcgagaagcatagtgt

SEQ ID NO: 63637 - DNA, 640 bp, Arabidopsis thaliana landsberg
tgaaccgtttaatgtttgccactctcgcttgcatcttgatcgcactattcttgttttagatactcatgttgtttattactttattagtaccttgctattaatatgcaatttttatctttcaatcgtgtattcatattttataattcggctctctacaatttccaatatatggctgtaagcattcacgatgtttaacaattactttgttgatgtggataattcaaccactggttgtccatattttcactatatatgaggtagcatccccacctttcttaaaaacattattttgtggatatttttggagatcattacccatgtgtggtgggttataataaaattaccatatattgatgggattaaatcttccattttgtacattttctattacataaaactgtttattaactaaagtttctgagttaaacattatgagagaagcatgatgtttctagatagataataatatatacattgcatacatcgctccccattgcattctttacgctgattatgggaaaaccaacagtgtgggaaatccacgaaatgccatgtggcacagtacttgccgaatcgtttggggccgattgtgtttatctgacacattaagtcctctgacattgaacttatctcccaccaa

SEQ ID NO: 63638 - DNA, 525 bp, Arabidopsis thaliana landsberg
  unsure (1)..(525): unsure at all n locations
ccatgttttaattctcggggatcggttggttttatcgttatatgtctttgaccgtcaacaatgtttggctcctcgatcgttttttaaccttttaacccatactatgaaatgtccgcaactactatttacttgtgacatgataagcatcttcacattaaaatcttgatattggtcggtctaaggtttgccacaaacagataacaatttgttgaaaaagttattcttgttttaaganataataatgtataagaaaacaagtgtactctctatagctgagtactagctagctagtagtgtcgtcagttaatttaactttatcaattgatatttattcgaggcatattctttttcgaatttctataaccaaaatttgtggggttttttcatgaagaatttgtgggttttaatgatgtaatttaagtcagagaaaacggcataaaattaagagatggggttcctaattaataggaaagctactgatctcggactgcgtgtaagggtaggtctcattaatagtagcatatg

SEQ ID NO: 63639 - DNA, 271 bp, Arabidopsis thaliana landsberg
ctaattaactattagtctttaatttagtcttcttggctaattcacatttctgtttttgtcaaaaggcttaacttgctatggctaattcgttatacacgcagttttcgtaatgcgtgaacggatttcaaaaacaatttggtcaaactcaaaagtactaggatacatttgagtcacgagcactgataataaccattcatatatcgagaaagtactgtgacggtgtcataagtatagttcactgataatgggccagtttgagagcagtatatgg

SEQ ID NO: 63640 - DNA, 811 bp, Arabidopsis thaliana landsberg
  unsure (1)..(811): unsure at all n locations
gagagacgaggatgagcgttaaagacggcgtctatatcccagccatgacgacaagcgatgttcacaagtggcttgtaacaagcctgacgccatgagccaacgttctcaccgcgttctttaaannnnnnnnnnnnnnnnnttgaagcttcttcgtctaggcagtggagagcgtaacagtgaacgtagtgtcgcattttaggcttgtttatgtaactcgctcctgatttcttcgcgtacctgaatacttggttcgtcacctatttacacattttccccaacatcaatataatcaaacaaatcatttatcatgagatatatagtaggaaaaatgaaacctaataagtttggttttaattcggtaaacaatgattaaaaaaaaatgcctaccaaaattataaccgtagttgttagatattttttataacccttgttagacttgacacttaactaaacccaaaaaattagataacaaaaaggtttttgataaaaacaacacaataatcaaaatattggaaccaataacaaatttagaaagaaaacaaataaattagattttcttagtaacgtgcgtctgtacaagcaatggcacagagctcatggattctgtactatcatcactagaggaaagaggaccctctattatccgccgagcaatagactgtaactagatataataatatatacatacaacaaatatccctattaattgtcaaaaagtctaataatatctatgtgtactatgtgtgaatgcatgcaaaaatttgtatatcgtatctaactatctcatgtcgttatagccaaaaacaaagaa

SEQ ID NO: 63641 - DNA, 1661 bp, Arabidopsis thaliana landsberg
aatttcaagaccacacccgaagcatcgtgtgctcctggtaacgtgatcagtcacgacattgatctgcttacatctcctgcaactgtgaccccacttcatcgtcatcgaaaccctaattttctgtcctgattataggattcttcttctttcaatggagtcgcgtgaagattttcgagaacaagaaaatggagggaatggacagaataaacggttgattctcattttatagacaaacagaggagaagggtgagaattccgctgtggtctggtgcacgtagttgcaatagtctggaacgttgagatgaggtgtgacccattaatctttgatcggacggtctaatattgtttccagataaatacgaaaatggtttatgtgagcgtctattgataggagaaagggaactttgtgccgtttcaaggccatgtcacccaaaaccagtgccgttttttggcggtttgcttgaaccaataaaggaaggagcctaaaacacatcgagttttacaacactaatgagtttcaatatgcaatctagtgcattctatttaataatgaaaccaaagtgctctaatttaatcatacactgtaggtttgttgataatacgaacttgttccaaaatacaagcaactttgcatagttgaatatcatcaaattcgttggatatatgatggcactagttagtatacgtttgtaaaaatatagtatccattcacaacatatgtaactcacaagccacaaagaaaacagtcaaacactatattggaaaatgttattactctgaccaaaacctttaatgggttattgaatctgatcacaataatgggtaactggtaaagtggtaacacatcctcaatagtaaatatatacctttaattaggcgatggtaataggaaaccagctgacaatgcccatcaatttattcgtttgcgtaaatcacgaaatcttttcttcacctttatttaaggtttccaactaaaatacttcagtacatttacggtcacaacgatacgaatttaccaattaaaactacaaaaaacatgcatagtacaatctgtttgatcaaaaagaaaatgcataatacaaatcagtctaacagttttaaaagatactatattaagtcgaaacaatgatttatatattttcaatttgcaatttttaattataataaccacagtttacttgggatttcatttcaactaataaagcaataattaaggaagttatctctattagactattactgaaaaagacttgaccggaggaaaaaaaaaaaaaaaagagtaacgacagttccttgctcttctttgacacgtctctggttgtttccatcagctgacgaaagaaacgaaactcgatgaagaaggctaaacaaaaacataaaatatagtactagtattttaaagaaagtcatcgaaaacaaccttcaatttgaaaacatcctctctctctcaaaagtctctcctgctctgtttctctcttgatgtaagagaaagcaccataccccaggttttatatttagaaacaaaaacctctttctttcttctgcgatagtcagaagaacatcaaaagtcgattagaagcatctaaaaaaataaaactttgcttgtggggtttcttcttttgttcgatagaaaatggttcaatacaaaagactaattaaaa

SEQ ID NO: 63642 - DNA, 616 bp, Arabidopsis thaliana landsberg
  unsure (1)..(616): unsure at all n locations
acaagggtttatcttcatccaaatattaacaatacaaagaaaatcattcaatccactcatcaagttttgtgttccattttggtacttagtaatggactaaatgaaaaaaacaaaaattgctgaaacatattccacatatattactttacaaatttgaaaccagttgaaagactatttatgttgatcaaattttttatccacattttttgcttcatgattataacaccatatcaataggaatcacatttccagtctctattccatccccatcatatttaaaggaagacttccaatccaatcctgataagtatagatcaggcaaactgattgtgtttcagactagtgtggatatcgaatccgtacttaataatctataaatttttggtcttgtaatacaaattatatattgaatcgcagagcagtaataaatagcaaatagttntttttgtattgatcgtaatagtatgtttttactacaacaatagtccatctcctttacaattcatcagctcctctatttataacactcctgaaaatcatttaaggtaaaatgttaatgtagtatgcgccacatatcactttttaaagtgtttacagattagacatttttactttg

SEQ ID NO: 63643 - DNA, 1483 bp, Arabidopsis thaliana landsberg
attaagattaaaaagaaacaaactcttcttcctccgcaactagatcgaagcctttgaaaaatgtttaaaaagctcgtccttattctgcgacgaataaagattctaccaagaagcatgttgtcataccaaagggatattctccaagttctaatgctaaaacaagtgttgacactaagaggtagctttataactctattttcatgtaactaactttatgtttatgtgttttaccactcttaacggttatttggttctgaaatggcagacaaaaggaattgaagcctaagaggattgttgaaaccgttgcatgtcaagctccagctacatcaaagaaaactgagatcctaactcctttgttggctacaagagaaaagaaaacaagtactaatggttttagtttacgaagtaacgaacgggccgagaagaagaaagaggtatacatagataacttatctcacttttactctgttccgaatttcagagttaaatttttatctgatgagggtacattttatgatgctgtagaagaaggtggaagctgtggtacgtaaagctcttaacttaaaagcaagaccattgcctaaaagcacacaagctagacctcaacacacgtcaacaggtcaggcaaaggcaaaggcaaaggcaagagatgatcactcatctacagctagttgtgatcggtcattgacaaatagaatggccaaaagtaaggtcattattaacaaacagaaggcggatatgcagagaagtctaaatggaattcggccaaagacaagcgaccagaccgcgagaaacagcacgaacataaggagtttagcggttaggcgttctgcggttcaggttgctttgtgagcaatttcactgtctctgcttttgttctttagtactattggcctcaaatgtgtctttgtgtttgtgtttctaggctgtaatgagtagaatgttacatcatcgaaacgcaaaatacaaataaacaatcagaacctatgtaaccttatgttagaatcaccattgcaccattaaatttttaaaagcttataactaatttactacccggtcattgactcattgtctatagtagcttctttatagatgtttgagtggtgtgtttattacacgtttcaaaatattaaaaaatacttataactgtataaatatactatatatatatatatatatatatatataaaaggtttattagctcttggtaagtggtaaattataaagctggtttgaagtttgaaaagttatattagaaacttgaaaggacaattattttgaaaataactcaagactgagattttttgtgcaaaacccaaaaaaaaacctctgtttttccatacaacattaaatattaattctgattttcaactgtagtttgattcgaggcggcctcaatatcctttcattctctgcttacatgagtttccacatgataatagagtctattattaattactagaagaacacccatgctacgcat

SEQ ID NO: 63644 - DNA, 1548 bp, Arabidopsis thaliana landsberg
gctttctctctccacttcgactccattatttggggattatttttttatttttaattttcttttttgtcttcttatatttatgtacaaaattaattaatattcatgttttttttttcttactagaaagtaaaatgtaactctttttttctgctttcttgcctccatcaatgtttttacactttacagtttcgtcctctttattttcttcagatctctattttagcaatgttttacttagaaaaaaattcaacattatccatttctatagtgtaggacacttgcatacccttttttcgagataagttgagaatttaaccatattggttagggtaattttttttgtcttaaaccaaatcactaagcatagataatatgaacaaattggttgggatcatttcaagtaacctcctacgaattatatgtatagacccgcataaatgatttcgaactagtgcacttttttggattctaacatttttgatccgtagattattattaagtaactcacaatagtttataacttcttataccttaacctaaggtggtaagtggtaaccgatttagctaatgacgtctttaaattttatcagtcaaaaatgtatttatatatgtgccacaaacaagcacatattattctaccaatcaaacaaaacaaatacagtataacacaactaaatacaaaacccattcatcattgaggctctgttttttgtgtgcaaatactcatcgttgtggctaaccatctgttttagttatctttaacttcctatcaactcgttatatgcaaccaaagaagtacatgaacccctacttatcttcaaaagcatatcatagagtttcaacgttcgaatctagcattacaaatttggaaaaaaaagatctgttatagaattagaatggaaaaccctccaaaactcacaaaattttctcttttattatatcaatcgtttgtattaaaacagagcatacatactctagttctaaatttggtaaaacgagtatcatctttaatgcaaaacatcgaaacatagaagaaacatcacataaatatttctaaaatgttacttaacactttgggttataatatttagttgcgtttcatagtctcctcaccgaatatgcacatagaacctagctagataaggtgtgtcctcctaagggacacaaaactagcaaaacagcattccataaagtttggaaggatttttttttcagacagaagggaaatatttgttgaggttgaaaggaagagcatagaactcttctgttctcgggtcgttcttgaaagtccagaatctgtcccaccagtgtttacctcggtctttcctgatcgaaccatctttcttgtgaagcgtcgtgtccaacaagtaagccacacatcctcccacaaaggccttggactagaagggcacattgaccatgtcgttgaaccatcttgccccggtatgaactggaccatagcctttgatggctgcgtgctcgttgaaatattgaggaattgataggcctaagaagattgtgacccccagtatgaacaatgtcctgaag

SEQ ID NO: 63645 - DNA, 483 bp, Arabidopsis thaliana landsberg
tatgcttattcttacacttgcagctcatgttatatttaaatgttacatgtcatatagtacccaattttctaaattttgtgaaaccaaacattgatgttttaaaaaaaatattggagaaaagaggataggttcttgacctgacctcacagccatacatatggttagctcttttatacatactgctatcatacattattcaaatataatatgatctttttctttatcactaatgaacttatattttatttatgtatatccctctatattggctctaaacacgaggttcacttaattaaaaccattttggactgacttatattattccacctatcaggatatgctgtgtgtacaatgatcctcatgaattggaaaactgggacaatggatcatacccgtatgatactatgaccaaactgattctgatgacatatgaacgggaattatcttttatgtagcgcattaaataaggataatcttatgatt

SEQ ID NO: 63646 - DNA, 1670 bp, Arabidopsis thaliana landsberg
  unsure (1)..(1670): unsure at all n locations
gttctctcacaatcaagatttgaagcaaacgttttgagaaaaatcttttgacaccatcaagtaagtttttatctttcttatgttttttgtggtgtacctgcattgtgcctagttttggtacttgaatcatctattttggaatctagagtattgatctggagtatgattagtcaaatctaggatttttaaggaaaatggtactgagagattgtattatttgcacatatcaggtgttcagtggtagtgatttgatatgatttggtcattgtttgaatgaaagttggattattgttcagatttggttggcggattgtgggaggaattccagagcaatatagcaggtgatggttgtacaacaatggctaagaagaagggcttgttcactgtattgaaaaggatttttatttcagaagttaattcagaaaaggtgaagacaaagatgttaatctcattctaatgctgattgttgtttctgcatcttgtttgattcttcttgtgtatttctgcagaaagagaagagaagaaaatggacattttggaagcttaggattaagaaaagattaccttccattacagcacctccagagcacaggacaagtcatgaatcgcatgaggaacagaaggaggaaattgtgtcagatgtgggtgagatcagccaagtgtcttgtagtcgacagttagattccatagaagagtcaaaaggttcaacatcaccagaaactgctgatctggtagtccagtatcaaatgattctaaatagacaggaagaagttcttgctgctactcgcattcagaccgcctttcggggtcatcttgtaagcttgtcttacccttttcttatgaagctactgaaagaatcgactcattttcatactggagttatgtagttaccttgtagctgtgttgactatagttgagtaggttaggtagagagctaagacgttgaaagtaagtttaggcagaaggatttggggattctgaattagtttaggatcttggtttgggcagtaatatatacattttgtctcctgtgtcagtcacctattaagtcttttgagaaccagatgtgaatcttttaaagcgatttctcttcttcttttattgctggattttgggttgatttttcaggtgacatgctgacaatgtttttgaacttcattgcaggcaaggaaagctctacgtgccttgaagggaatagtgaagctccaagcatatatcagaggtcgtgctgtgagacgccaagcaatgactacactaaaatgcctgcaatctgttgtgaacattcagtcacaagtctgtggtaagagaacacagattcccggaggtgttcacagagattatgaagagagcaatatattcaatgataacattctcaaggtatgtcttctgatctaaaaatgtaaactcgttgccaacagtgcagcagtttattagtatgtattggtttcaggtggacacaaacggtcaaaagagatgggacgatagtcttttaacaaaggaagaaaaggaagcagtggtaatgagcaagaaagaagcttcactaagaagagaaaggataaaggaatatgcagtcacccaccgggtacttcctatgcacttgtttcatttggctttntattgctttacaagtttcctagtattgacttgaaactgatactttgtcaacatca

SEQ ID NO: 63647 - DNA, 1710 bp, Arabidopsis thaliana landsberg
  unsure (1)..(1710): unsure at all n locations
ctacatatacttgtatctgtgcgaatttatagttgttacctaagctacaaaaaaaattgaagagatcttccgtaatatagatgaactaatttgatgtcccattatgtttctcgtaaaagaagaaatacatgtgtatttgacaagatggtacatagaccgctaaaccatcatgtcctaacaaagtagattggtatcatttgcaaaatatgtcacttaacattaatgttcttcattccttaataccagtctacttgatgagtctctcctctttttgatgagctagtctcgcactttttttcatctctaacttttgtattttatgaaatgttcatagactttattcaaggcacattactatcatatatctggatttaaattgccataccgtattcacgagacaatttatatgtaataacaattaaaaaaatgcattgtctgctcagaagctagcttgcccatattgtgtgttcttctaacaattttttattgtttcttctgagggtttttgcattaaatatgttattgttgacatcatagatgctagtggatatatcatcgacgacgaactcgagttgcttaataattatttccagtttcatacatcatcatcatattatagaacatatacctttatcatatgtatctcaaaaatctataatcagcttgatattaacttattctaaagttcaaatcagttttaacttttaagaaaatattatgagttttctaatttgattcggttttcgccgggttaacctgaaatcggaatctggattggacaaagtccaaaccgtgggttagtattagtaacatccaatttgggcttgcccgtatttgtctgctcagaagctagcttgcccatattatgtgttctccaaagaattgtttattgttattttggagagggtttttgcattaaatatgttcttgtgttgacattattgattattggatgctagtgatataccatcaccaaaattagaattgcattatcatcattttatatatcaatctatatatttatcatatgactcagactatcatgagacgcatttttttttaagtattatgaataatataccacttgttgacgttttaacgtttgaaaaacatgattttgctactttttacgattcaaagtatttattaagaatttacgttcttgaaaagtgattatactgtatatataactataagtaaacaagacttttttcgacgaaatttctgatgataaataaatggtcggatatatttgactttttaattttattttttaatatttttttgacgatagatttttcgttgaaaaatcatcgaaattttcgacggattctcaatggtcaaaaatnnnnnnnnnnnnnnnnnnnntattctgaccaaactaaatctgatgaaatatttttgacggctttccaaccaaaatatttcgttgtgacttgtcaaaaatccgttagaatactaagcaacttttcgacagattttcaacaaaaatattcggtaatataacgtgttaaaaatatgataaaaaaaaaacttgatgaatctactaaaactaaattttcaatcatatatatctattattcatatatttcattcattttattatttttctcttaacaattatttagttattctggtatcgngtaattatattcatatgatttattctggtattgattcggttagcatccggatagatctttatgggtt

SEQ ID NO: 63648 - DNA, 527 bp, Arabidopsis thaliana landsberg
ctcgatgaaaagttctcagttaggggatagtgatttcctagtaagtatatctagttttggacatgttatcctctttagctcatttttgagttttgcttctgtgaatctttgaatctcgtctgcttaatagtgactcatatcaatggtttggttacttctctgtcttaactagacttgctttggaaaaagttgttcttcttgggatgaattgtttttgtgcgcttagtgttggataaaaattcacgggtttggtccctctgaaataagttcccaaactgcaaatgattaagatctctgtaccaatcaaacttgctgataatcctcttaagcaatttggtaagtctgcaataggatgtgttgatctagatcttatggcctagttacctttatggaatagattttgccttgctcaaaacttcttatgtatttagcattgaatttatagtttctggaagcattacttaataccactcccctagcctcactgttcttgagtttaagatttctaatatctcaccaaaagtcgt

SEQ ID NO: 63649 - DNA, 532 bp, Arabidopsis thaliana landsberg
acattctgacaatggaccaggtgatgtgcaccaaagcaactggcaataaaaaggttcttgtggaaaaaagtataaaaagcagcagtaaccatgtggaatgaaagtggcaatataggaattttagaaattggataaacgaaattaaaagctgaaatactactgtcttatggattttttggtactcatgactccgaaggagtcgaacaattatagcctggaggattgttggaattacgaccctgaaggcggtcgaacaggccattgcctatattctttagttgtaattggtacaaacaatttgatttcatatattggctttaccaatatccattcattatgccagggacgtttgcgcagatatatgttcaggtggtttttgccgtaaaacaccgaaaaagtttaattgatccaacctgagaggatgccatgtaccgttgtattctaggaatcgtccaaaacaaaggacagaactttatgattgcaagcggaaccagggaccatattcatttactgattgagataaaaccatact

SEQ ID NO: 63650 - DNA, 1183 bp, Arabidopsis thaliana landsberg
gatggctccgactctccttccgccgtcaacaaatcacgaaacgtctcatcagcgtccgacaagaaatgcatcaaggcggttgcaagaaacacgcctccggcgaattgtgtaccaagaaccaaaaacccttggctccatttcaagaaataaggagatacaccgcttatgaacgtgaggacaaagatgatgacaagacatgcgatcttgacggagattaaggatttggatttgagatcggaactcttaacgtgcggagcctcatcgtcgtcgtggtctcctccggttccatgggagagacaagggacgaccaagacaagaaagaggaagaagaagacaagagaacgagacatttgaatgttcagtgggtttgtgtgtctgaaattcgaagttaagcgatatgtcgtgtaatatataagtggtgtttaagagtcgtactttaaagtcatggagttttgttttgtactacaataaatttatagtttttggttggttgattacgacacattgaaaaggattacggttgaaggagctttgtaagtggttgttagacttggaccctctttatgaattcaaatttaggaaaaagtacaattatttggttcagattaacaagaaaaatctgtaattgatttacctaattgtaaacctgatattgcaccttaagacacgcattgaaacagacagataaatattaagcgtactagaaaaggtaatttactcttttttttagcaatacatacaaattgacgtttcaaccaataatttctcaaagttcataatcataaatcatttgtcaaaccaagtaaaaataaatcagagaaaaaaaacggtatttgttagtcaacgaaaaatgaaccttccatatgataatttctttttcgttctcatagaaattttctatgtaaagcagagagaaagacgaggaaaattgggtaacataaaaactctttgatgacaaagacagtattttaattcggattttacctaataaatccatagcgaagaacggtagctcatgttcctattttatggtgtgcaccatcaatgatgatataattgtctctcgctctatacataaatcttagatcctttaacgcctccagaatcgaccttgtccctggtgtccttgctttcgcctgcataggagatatgacactcttagtgggacactaccaacagattt

SEQ ID NO: 63651 - DNA, 620 bp, Arabidopsis thaliana landsberg
atacatggatggccgaaatgtatttgcagagctagagatgatgatggcgagagaattatatctttgtgagctcgcgaggtatggcaacatacacggggttgcgggattgatgattcaatactttgcctccactttttgttagatcgaattgctgtgaacaattggcagagcaacagaggaaagtgctgcagccaaagtatgagtttccaagttcagaaaatgtgtttttgcttgaatctgcagatgattcctttggagatcagagatgtcttggtatgatttttcctgaagaaaactatcttttgtaaagtcaatttttggatcaaactttgtagataatcaattcttttgtaaacaaaaccaaattgtatatgtgatttgattgcctcaatataaatgagtatggctttgtggattacaagttggttaagagacactggttacaaagagagggttttaaaaacagatgaaataagaaacagagctttgtgaataaagtctggtttatcaaaccgtcggtccaatccggtttttggaaacctttgatgatttgaaaaaaattgggggcgtttcctctatacaaaatgatttaaaaatgggttccttaaccttgttttaaa

SEQ ID NO: 63652 - DNA, 546 bp, Arabidopsis thaliana landsberg
aagcatatcaatttcaataccttcctttttgaatcctgtccccaaattaactttctcttatcagttttttcttctaatttattagaacactagtccctaaatatatcagccctattgtcccattcgttgagcacactaaaaaaatcagacaaaattcagataaactgcgtatatttcgccttagggatgtgcgggcttttttttcgttctcttattatggggtgtttgatctttttagtatgtttgctgttttctttttcctttttttttttttttttttgttcttttttttctattttttgtttttttttttctgtttgttttttggttttcttgttttgtgttttttttttgttgtattttttcgtattttttctttgtctatttttttttttctttagtttcttgagtttgtttttttttttggctttttgtttttttattttgtttattttttatcttttttcttctggtttattttttttgtgctcttgtgttttttttatttctcttttttttttttgcatcttttattttttttttttt

SEQ ID NO: 63653 - DNA, 1700 bp, Arabidopsis thaliana landsberg
taatgtgtacccggaaagtgttcattgtacttgccgggctctttgtaattcactttaaacctttatcaatagaatctttttgatgaaaaagaagaagaagccatggagctattcaaactcatctaacggattggataaaacagctcattcataggagactacgccaccaaaactattttttttaatatgtttcatatccctaacaatacattcttcttgaaaaaatattctacatagctcacaatacaaaaaacttggtttagtgacatttgacatttacacatatgaatggttgcaatatggtcatagcacgtaaaaaatgatcatatattgttcaaaaatatagatcttaatgcatatcgatcatgtccctctggtccaattggttttatgattttttatccatatcaatcaatcaaaaaggaggatcaattgatctggccctctataactaaatctgttttaactagaaaaactggaccgctcattctcctcctctcaagttctggttagcgttttttgaatcattttcaatcacaaagttatttttaagaaaaaatctaggaaatgcacaactttgattaaaaaacaaaaaaaaattataagattacatctaacttaataagcaatacttaagaaaaaaacaaaagtacataccgataaaaacacgacacgtcaaattttatatctagacattataatagacatatgaattttaataaaaggtaaaacaaaatgtaaatgttgaaaatagtaaatttaatttaaaatttttgaaaaaaaatattaataaaatacatatctaatatagtaatttataaaatatcacgtggcgttcggcaatatatggcacaaaattttcaaggataagattttctaatttccaaacttttataataaatctgataaacttgaattaatgttaccagaatcccatttaataaaatcagaactaaaattaggcattttcataaaagtattgtgaaaacatacaaattaaagatgttcttatagaaaaaagggattttttcactattaaaattaaaaagacaataatctaaaacaaccttgtagacccaaaaaaaaaagattacaaaaatgcctaacttctttaacattttaagaagtcttatcttcacagcaccttctaaaagaaaagtgttctttctgtaattaaccttttttaaacattaaaacataaagtctatccttttaataaatatttgacttttatcatttgactccttcgctaagtccgacgtgacggacatataggtaatttgtgtatataaaccagaagtgttctgctggtaatcatatcttgtaaccataatcgtcttgtgtcttttatttcacacagacaaaatggaaaccccaaacatcatcagccacacaaatcttctatcgaagatagacctggaaaaacaaaaccctgcccccattttcccgacaatcactgagcttaaaagtgaggctaggtctctcttctccttagccttcccgacaatcctcgcggccctcatcctctacgctcgctccgccatctcgatgctcttcctcgggcatatcggtgaactagagctagctggtggctccctggccattgccttcgctaacatcactggctactccgttctagcaggtcttgcactcggcatggacccactctgttcgcaagcctttgcagccggcagaccaaa

SEQ ID NO: 63654 - DNA, 1590 bp, Arabidopsis thaliana landsberg
aagaatcagcatattcagtccttagtgtgtttaactgttaaccaacctgaagatcttagcaactaatgttttggatacttgaaattacagcagaaaatgacatataatcaagccacttctaattacgagttaagtgttaatgtctattacattgcccaagaactgaaaagctgtttgaatcccatggtgctccttgatgtacagaaaaagacgtatgacctgcaaggagagtttttcatcagaaaatagatccatacttagtttaatccctcagcaaataataaaaatgaacataataagaaagagcttcttattgcaggcaaaaaagttcaaaactgggaaaatgataacagtaaatatagagtctaaaacggtcaataccatagtcgataagtcctctttaacttgggcattagtcactgcatcagaagatgggatttgaccaccattattctcgattgtcttgattagttgagttgaatataatatcaccccaaatctcacagggagttgattttcatataaagatctgagagtttcaatagactgtaaagatccaacaatagtcagctcaaaagatctgtactaatgaataagggacgaagagtcagcaatgccaggaaagtgcaggtataagacttacctcaagaccacaggcagtcgcaggatcaatgacgtaaactgcatggaataggttctttcggatgtaacgtagttgtccagggaaggcaggcatcaaaatcttattacaaggtgagaggaacacaggccattagatattttattttccagatggcaccttgcctacaaataaatcatatgtatcctcacaaataaatcatatgtatcctgcactagttacctcgttaatattactccgccaacgcttgtacatatcatcctcttccagattgttgagataggtaacatgcacggatcggaaatcaacccgatatgaatccggttcagggagaggggtagttagtagaagtttccttatggctccatcaggtatctgatagttgcataaacatgttagcacatccatatggtcaagactaatcacagttagtttcctgaatagacaggaaaaaaaaatcatcaatttgtatagttccagtttttcctccatgttatataaactacaactttactttttatttcacaagaaataggatgtatgtccaagatctccagcaaaacagaaaaaaaagaaacactaaattataaaatttaggaccattattataagtgtaccttaagcttcgaaaaatggttggccagggacaattcctgatgagccaaatccatcaacctgcaaacagaaggatcagatgatcatgcaaacggactgtaaccaacaatttaggcatgttagctttggaaaggagtatgataatatatataaaaagcaataccacgcaaactgatatcaaatgtaagtgaatagaaagatgggaaactaggtctggccatgctcaaactaaaatgggcttggggaaaagtaccaatcgaagagaataatatcaaagtttcaccctggtatcaagtgagatatgtctagaccaaggtaaagtaacacaatgtgca

SEQ ID NO: 63655 - DNA, 389 bp, Arabidopsis thaliana landsberg
cgggtgccaggaaacacacgacgtttgcgccgtagttcccggctacctgccggagacatcctgagaaaacaatttcatgaagccgtctggaaaaggaagatggaggagattgttgtgaggagatgggggtggacaatgcgaatggcgacaaacaaccggaggaaaaagcgacggctgacagttttactcccatcacggtggtggaggcgatcgcgccggagaatattgcgactgaggagaccgtcaacgacgtttatgagagtgtcccgacggttgacgaacatatgggtacgcaaatcttaaatgtccttcaattaaatggacaaattcacatgtctatatataggtgaagatctcttgatatttgacgttgactttgtctttttcaa

SEQ ID NO: 63656 - DNA, 1157 bp, Arabidopsis thaliana landsberg
atgattgcagggatctaaatacgaaaaaacatattattataataatctcgatagatgaatatataaagtaattatttatagttcttgcttgagtcatgttctattggtattggcatgccgacggaatccattaaaacagaagtcgaatttgttatggtgaaattgttattaattcttctataaatggtgagattttaaggtgaaacttgctgtttgtcttcttcactttttgtgttggccgttaaggtgaaaataataatgacttggtactttgtaagtgaaaaatgagggaataagagatgtccacgtaggacggtggtgggtcggccggcggtcactaatcaagcggcggaactcatcatccctaagtgggtcccatccaccctcccctgagtttttggccggtgaataaacaaactctttcaataactttattttctttacatctctttatttttcttgcttggagtttctaaaattcttatattcgatctactggattttcacaaaaatattctagtagattaatcagaacatatgtatgaatatagatgttgatcttgatcaagatcaagtgacggtgttagtttttttaaaagcaagtgactgtgttcataacttaagaaaattatttatgaaaagagaaagggagagagagaggttagcgtaaccggcaaaagaagattctagtgggacacattaagatcattttacaccattgcgagttgttacaataacatttgtccaaattctttctaaaatgatttgataataaatcataacattttttcaaattctttcaaagatcatttgatcataaaccattatgattttatgaattttattggttcatttttttcattttaattatgaaagagtcatgtcatgtctaagcaattatatagctagttgacaaaccagtaaactgtaacttatatatatatatatatagaacttaaagcatttgtatctttgtcgtcgaaatatgtatcttgacaaattttgcctttggatcattattgaaattaactacatatgataagcttaaagaaacaagtcaactctaaatcgccgtcctatatagatcattcacatgcacttaagattgagataatgactaaattggtcatcttattttatgctgagtttgaaaaaaa

SEQ ID NO: 63657 - DNA, 1860 bp, Arabidopsis thaliana landsberg
tttttctaaagctgctcgtcccgacgatgcctctgctcgaaagcaaggggaaacgacggcttctggttgccctttttctaaatctgctcgtcctgacgaaaatgggagtaaaggatgtcctgaacaagaaggaaacttgaataaggactctactgattctgcaacggtacctgccaagtgcccttttggctatgactctcaaacattcaagcttgggccttttagctgtatgttatgtcaagcacttctatatgagagcagtagatgtgtgccttgcacacatgtgttctgcaagtaagccatagttgctcggccgcttatttcttttttggctcatgattgggtctacttttcttatactttgtggtttcttgaatgcagagtatgcttaacacggtttaaggactgccctctatgcggtgctgacattgaaagtattgaagttgatgaaaaccttcagaagatggttgatcaatttattgaaggccatgctagaattaagagatctgtcgtcaatggaacagaaaaagaagaggtcgaaaatgataagaaaaaagtgatttacgctgacgtttccatggaaagaggttctttcttggtgcaacaagctatgagggtgagttctgtctctaaattttgttgacctaaccgatgggattattctcttttgcaccacttacatttgttatgatgtcccgctgtgagatcttgttctaattcaacttgtatgcgcaggcatttagtgcccaaaattatgaaagtgctaaatcaaggttggcaatgtgtaccgaggacattcgggatcaactagggagggagggcaatacaccagagttgtgttcacagcttggtgcagtccttggcatgcttggtgactgtaggtatgatattgtcttcttttttatcccaagttgtttatttctaagatgtatccattctcgagtttctgtgaacaattaagattatgaaaacaacggtgctttcgaatgtggtcaccaatgtggtcttttatgatcccgcttgagccactttgttgttcaaattgattttttttaatttggagtttctcaagtatgtggcccttccttggcagtttcctcaattgatagtttctcaagtcgactggttgttgctttcatcttgcttagagtgcgcatggcactttgggaaatactaaaataatttctttctcgtttgaactagattctggttttctagatggaccctgtctacatcaattgactggaaatatattcatatattcagatttttctgtatcctcttatcatttgcatacatctttctctgtggttcaatcacctcgttcagaataaatggaaaggagaagcaacagtacatgcttggttcgaaaaacctactttatacataatcattttctcctcctgaactgtgttattttggccaaaatgtttgatcttctgtttggtgtgttgaattttttctttttccgggacttaagtttgatggttaaattattttttgttgttgttgcagccgagcgatgggagactcaagctctgcagtcaagcattttgaagagagtgttgaattccttatgaaactgccgttgaatgatttggaggttatagcacattggttcttgttaaattttgatgttgaaaactttttacctttttgcttacaattttaacttaacttgcagattacacatacactttctgtctcactcaataaaataggagatctaaaatattatgacgaagatctacaagctgcaaggtcgtattatgatagagctttaaatgtcagacgtgatgcaatgaagcaccacccaaatgctccttcacaagtaagtgtgccctcatacagttttctgtc

SEQ ID NO: 63658 - DNA, 2006 bp, Arabidopsis thaliana landsberg
tggcgtgagagagaagaagaagaaaagtaaatgtgttggttaatttaaagaagtaacagaggaggtttatgtaagggagtgatgatgataggcgagtgcaaaggtggtgtgaaggttgaccctttttaaaaaaatttgcttttaaattaacttcttcttttctattttaattttggttaacccacacatctctctcgcattaactcaacgacacaacgtctataaagtttttatctaatctacacttgaaattagaatgtgtgtttttgtttgttcccaagaagttatggttttgatgattatacatatttagcatacgtaaattcaagatatatatataaagaatgaaacaatacattaccttatagtacacacataaatataataaagctagtaccgtatagtccaaggttattaattatcggctacgcaagtacgcaagacactttctagtattatgttgtgaatgatgcaagttggccgctttattaaaactgttgaatgttgttgcgttgctttctcagcttccacttggaggggtttggggcagagccatgctgcatgtgttagcaaaaataaattaaaaaaagcaattgccctaggccacaaaaaaaaatatgaaacttactttcatcattaggtttaagtatttagttttatataatttgtttagttaagctctttttaagaatttcaattattattatcacaaaaagttatgaatattttgactatcatatcttcagagaggaagtaggttagaaaattcaatcatgtaattgaaaaaactttcatttggggttttttccttacttatataaatcacgtcaaccatactaatctattacactacaatcattcaaaaacatatcagttagaagaaaaaagaaaagaaaatatttgccattatctttaagacaaaatgtcttcttatcccagatatacataataattttatcaacgaaaaggtataacgtagtctcaataagtcaaccgttatccatatatatactttcatagtggatagcagttaatttgatcctaacctaatcgcagattacaaaactaatatatttctcgaatctaaccaaatgtcttcaggaacacaaccatatgtgaacaggattacttagaattaacgcgcatgttttataggttgattttccctcaagtttcaaagattgcacttttttctgccaactccaagatatggaagagctttaacaagttaggttacgtagttggtgaccggctcttctttatacaaatttgcatacttttcaatgtgttatgtttatttttcctttttgagtaaactttgttgacgtaaatgaggagatctttattatcttaacacatcatctgaaagaatgaaactgaatatttgactttttaaaacaagttgtgttgctcttatgaaaatgttgaatgatcgtaattagtacatccaaacaaacgtttacaatatctatggcaacacgttttaatttaaaaactgttgtgaatagatggaaatgtttgtttgtatttgtaatcggaaatgcaaatttcttgacattggaattactcaaggagaaaacacatgttgctaagaaaattaatccaactttattttttttcttcgtttgacatcggctaacacttgttttccgtacgagcattgattataagtttataaccaatagacatgacatttacgaataaatgagacaagtcactaccgaacttcaaatcttaaagccagcgacaacttctgcaatgcaagtacagttcaaaatcataatatatacaattagtccaacctaacctatacatgctcattagtttcgctaattaattggaccaaacttagtgagataaattaattaccaacatatcgatgtcagaagaaactaacatatctctctgtctgcaaccataacaattacaaccaaacatcattaaatcttccaatgtactgcaactcttgtatgttcgaaaattcgatgttaatttatcctttttat

SEQ ID NO: 63659 - DNA, 1256 bp, Arabidopsis thaliana landsberg
ctttttggcctaagattcagtgagttgttgtgaggggaccaattacagttatatgacaccgatgaaaaaccacatcacacaactttattctagactctgtacatctttgtgacacaagctgcatcacttaccaagactgaatctaacctaacacgcgcttatacatttatgcaagtatatgattttccaaggtcataacttaacaaaaagacagatctgcacagagaagatgtgtcttgttctttaataggaggttagacattggattcagttggaaatcatcaatgttttaggttacagaaattataatctgaagcttgtcaaaagtaatcacctggtgatatacatcacatacatagttgtttgttcctttaccaaacgggattggagttggcttcatcttgtattacttcctgggtagatctcaacaaagttgatatcatagagcaaagttgcattgccaggtatgttgcagtcacctgcataaagagtcgatttattactcgagatacatatcttacatatacaagtgaaactgttacagaggaattgtgcaagtaccagaaaagcatcctgcaggctctggtccataagctaacttaggtggaatctgaagtttacgctttccgcctgcaaaataaaaccgcaccaatatgttatcagccaaataaaggacattgaacaaaggaaaatacagtacacttgcctactcgcataggaggtactccttcgcctccaagaatcccctggtctagtcccctaattacctgatcatttttggacatcaagagtttagatatatagttgttttgctcaccctaatcacaaagaagaacataagaaactaactaacttcaacaaagacaagtgtgaactttgctagcaatgcaattgaagactatggaagctaacaaagagagagagagacaatggttctttgttgtaccttgccgactccaattcgcatagtaagtggtcttgcacgcttatagctactgtcaaacaacgttccatctgcaaacctcgccgtgtaatggatctgtgtgtgtgtgaccaactctccaaagtctcaagctttgagtcaaaaaccctaaacagaggaaattagagagatggagagattacattgacgagtacgccacgaggggcttcatcaccaaatccaacatcgagatcgaaaaatccaagtcctgattttgcgtagctgtattcgcagagaggatctcctacagtggcgtagtagtcaatcgtcgggc

SEQ ID NO: 63660 - DNA, 632 bp, Arabidopsis thaliana landsberg
gcatacttcattaaccacgtgaccagtaagccagtggatccgagattcagaactaccagccaagtggtgatgctgtacccatcaatagatacgttgccaccaaggacccttttcaaacccgtgtctgaaatcatctgctataagtcgagctacgttgaaaagtgaaccaaacctggtgaataaagaaagaaaatatatgattgaactgcatatcatcgccttatgcctaacgacgaggcttttaagttgaataagaagtgtgacaataatactctaggcatgagaaagtttgatgcaaagaagagatacctacgtatacaactgcaagttttgccagtataaggtgtcattgtttctcttcatcagaaactctgtgtagattccagctagcgcggacaaaccagctgagaggatgcccagcaaataaccttgtattggtgccgtgaataaagaatcacacgaagcttctgcacaacccttaacctgaaacgacaagaccaattgaatggttgaaatttcgatgccagcttagcttttaaattttcagtaaaaaactagtgagctgacagctgagtagaataacatgaaccattttaaaaaacataagactatgagtaataagatagaaagga

SEQ ID NO: 63661 - DNA, 543 bp, Arabidopsis thaliana landsberg
  unsure (1)..(543): unsure at all n locations
tcggccattgttttgatataggcttcnnnnnnnnnnnnnnnnnnnnnnnnnnnnnnnnnnnnnnnnnnnntaatgccatatggtagcaattcaacggcccattcgcgggtaagcgcattacgcccgccattggcagcagcataggcagaggtgtttccctggcctgtttctgctacttttgagccgatgtttacaatattgccttttgactttttcaattcaggtaaggcaaatttggccatcagataataatgggtaacgttgcgatgtaagctgcgcacaaagacgtcgtagttgcctttttcaaggcctacaccgtcgattacaccggcattattaatcaaaccttcaatcctgccaaacttggcgatcaccgcggtgatggctttctcacactcagccggatcagttaactcggcttgcacctggaagcactcaacaccacgggccgccaaacttttaactgtgtttaaattgtctttttcgntacggcccactatcaccggtatagcaccttcgttagccagcacgttcacaataccc

SEQ ID NO: 63662 - DNA, 615 bp, Arabidopsis thaliana landsberg
aaactcatcctacgagttcttctttttctttatattttctaagagagagcctaagctgtttaatatagtcatctaatatttagagagatggtgagagagagaatgtggtggtggtcatcatcgtcgacgaaactccgatcaaaccttgaaagatttctcagaggaatcactccaaaacctccttctttctctttatcacaggtaatctattttatgatattttttaaaaaactactaactgtttctaagtttcttctattggcaatgatcaaaaaaaaaaaaaaaagtttcttcaattggtgtgatttttgtttcgcttcccagaatccgcgtcaaagcatttttgctggttttcaactaatcattttagttaaaacaaattccccaaaatctcgtgtttttaattagttagatattgacaatacaattattaaataagaatttgttgaaacttgcaatagggacaaagaaaatttagcattttatgtcccatttcgggaagttttctttcaccacgtggaaaccttacgacagcaatttgtgtattgaaaatgaaatagaaaaaaatcagaatcataaaaaatgtcttatactgaaattggtttgaatattctg

SEQ ID NO: 63663 - DNA, 430 bp, Arabidopsis thaliana landsberg
atcgacagggtttcagatgaagaagaaaccgtcctcagaataaaggtattttaagtttatactctgatgaaaagtgtcagatcacaatgttcgtctttcttcgttcattttcattattataagttttgttttttatattgaagatttatttagagagagggaagtgtcagtataatttcacttttatattttatatttgggagttgtctttatgagtggtggtaatagaaaaaggtcagaatgatgagtgtatgtgtgtgtagtgtagtgtagttgactactactccttagtatggagagcttttggtatcaaagaatgcctataccatcctgacaaatcgttcgaatggcgactgctaagctggctagattgtaaaataaataccggcaccaatgttcgtctgcctttttggcctatttaaagcttttt

SEQ ID NO: 63664 - DNA, 693 bp, Arabidopsis thaliana landsberg
gtaaatttaaagcttgaaagtatcattttatttgcaggaagcggcaatttagtaagaagtagtcaaagtatcatttaccaaatgtatatggttttgggaagagttgttagggatgtattctttctaaacagatgatatgacgatgttcttgaaaactaatgttaaagacggaatctctcgcatcttcactcgggagatatattaaaccggtgattgtagttagccatgtacttagcttagtgcacaaataatctgctgcaagaaatctttttctattataatatctctcatttaaacattagaacatattgtttaacttgttcttctagaaataaaactgctaatttcttctggtaaactattttcctttagattgcacaatcgaactcgaaaatctagtggagactatgtgactatgtttatatatatgaaacctaaatcaaattatcccaataattgggagacacaaaagaaaaattacgaaagaaaacaggaaatcaaatcaaaagataaagagaaggtaaaacaaaaggcaagaagcactaatgtttaatatttatagttgtctccattaaagaaaaagcgatgatgtgtgtgttctcatcttttgtgaaagtatatatattgcttttgcttttttcaaaagccaaaagactcattccacaacaacaaaaaaaaaacctaaaggttaat

SEQ ID NO: 63665 - DNA, 1305 bp, Arabidopsis thaliana landsberg
acaaaaaaaaaactaaagagaaaaattagagtaaaagacctgtgtggggttgttggttatttggtcggtctgttgtaaattcacattgtcgttcacattacggatttctatgaatttctacttatgtatcttcaaaaacttggtctagcaaaaccaatttaatgtatcgattccagtgtactatagttatgatggtgtcgtgtgacttctgtcgaacaaacaaaattatggtgcttaataatggttttcgatttagttttcacttcttaaaatgtgaatttcatcatctcatcgagctaagttttgtaggttctgtatttttagaagatatttttgaccttgtgtttgcccttttagtgaaaatttcaaagtattactctttctcaaaaaatctacaaaaatcttcatccatttgcattctgcgttcattttgaccatagtagtgttcatcattagtcgaacggttaaatggcaggcattctgagttcaagcaaaactagaatccgctcttaaaccccagaaacatcataaattcatctgccaatccagaaaaaaaaaaccttcgttgtacagacatggagattccaatagagacttcttggaaaaaatttgcctggaaaccgatgcgattggtttcttatctctttctcttggcaccagagcctcttcctgtagctttcttctcagcagacgtatcagctgctttccctctgcctctgcctttaccagccgcctttcttgaacctgagcttccagctcctttcaaatccaattccacttggatccctgcaacccgattatattccgttaagacttgcagatccccgcccagagagggataaggagtaaagtttttggaaagtcgtcgtcattcagagccagtatatatgaatttaggttctagactgaatggctttcttaaggtaaagacaactatctaaagcagtaacaagacgaacctctagcattcagatttttaagattggactccagcttttctccatcggttgcttcttctggaagatcgaaacaaaacagagaagaaaccaagttaggatttcgtctggtctacttccaagtcatattagatatcgaaggtaattttgtaatgtctttctgaggctcagtctttgattatacagatccagttacctgaatctacacaaataagttcacaaagatgtatagtacctgagtcttcttcagcgtctgatccatttccttaaacattaactgctaacggctcaccatcttcatctctcaaactatcaacagttggttccagcatagcagcaatgcgcttct

SEQ ID NO: 63666 - DNA, 321 bp, Arabidopsis thaliana landsberg
  unsure (1)..(321): unsure at all n locations
agaaccaaagacccctgccagaagaaagcaaaaccccctcctttgcgaccaggaggacaagcaccaccgggaggagaaggaaaggggacaccccccacaaccccaggacgaaaaaaccaaaagcaaaaccaagcaagaccaaacaacaacgagaacaaagagacacaacggccgagcaagcaagaacaacccagacacgaaaccaccgacaggaggagacaaaacgagcaccacaaacacaagggcgacagcccagcgagggagagcacccagaacacacgggcgccaaagcaangcagaggagaccaccacgcaaacaaa

SEQ ID NO: 63667 - DNA, 778 bp, Arabidopsis thaliana landsberg
  unsure (1)..(778): unsure at all n locations
nnnnnnnnnnnnnnnnnnnnnnnnnnnnnnnnnnnnnnnnnnnnnnnnnnnnnncccctcccacagggctcccaagctccctcccggggtnggcccccnncncnncccccccncccccccccccccccccccccccccccccccccccccccccccctcccccctccccctcccccccccccccccccctcccccccccccccctcccccccccccccccccctcccccccccccccccccccccccccccccccccccccctcccccccccccccccccccccccccctcccccccccccccccccctcccccccctccccccctcccccccctcctccccccccccccccctccccccccccccccccccccccccccccccccccccacccccccctccccccccccctctcccacccctcccccccccccacccccccccccccccctccctccctccccccccccccctccccccccccccccacccccccccccccccccccccccctcctcccccccctctccctcccccccccccccccccccttacccccccccccccctnccccccccccccccccccctccccctcccttccccccctcccccctcccactcccccccccccccctccccccccccctcaaacccccccccccccccctccctcccacctccccccccctctcccccccccccccccctcccctaccccccccacccccccccaccccccctcccccacaccctcctccctcccccccccccccccc

SEQ ID NO: 63668 - DNA, 551 bp, Arabidopsis thaliana landsberg
gtttgctataatgcgctgttgacagtcatatcgtaaaattaaatctaaaaataaaataaaatatataaggggatagattagatagtgttggcttgggagttagtaaattggagtttgaaagtacattgggtttggtttttcctctttttcgagttttgaccattcaaacttcttttgccccccccccctcccactttattcgtatttttatacctacttaaacgtttttcttctctgctttttttttatctactaagttgttataggttggactgacatattatgtattaaccataaataatttagcaattatgccactctaatctaaagaatttttcatttattttagtgggaattattgattctttttagtagctacattcgcagaaccatcttcttcctaactttttaaataaagaagtcaatactcacaatgttcaaggtgcttagctaaatggactaaattgaactttattttttattgattacatcacattttggcggtttttttctaatctgtgcttttggtaaatgaacaaacttcttacata

SEQ ID NO: 63669 - DNA, 164 bp, Arabidopsis thaliana landsberg
tgaggaaactcaaagctaaatgtatgcaatatttataaaaaaactttttttataatcaatggtggattcgggttttgaacaccttggaataaacgtcgactaatggtaaaattaaaaattaaaaaaaagagatggattggtcatataaacattaagaactaact

SEQ ID NO: 63670 - DNA, 2407 bp, Arabidopsis thaliana landsberg
acgcagatctaatctctacatctttgcttcagtaaaatgggttctctttcttgttcaataatccatctggttcttattctgcaactacaaacatttttcgttttttctcaaaacatcagaaacggctctgttcctgtcggagaatctctcaccgcttcagagtcccaacaaatctctagttcatggcgttcaccttccggtgactttgctttcgggttccgcaagatccaaccaaacgacggtttcactctctccatttggttcgacaagatttctgacaagaccatcgtgtggcacgcacaagccgtcaacacaaccaccggtcttgtccctaatggttcgaaggttacattaactgcagatggcggtctggttatcgctgaccctcgaggtcaggagctgtggagagcgttgagtggtggctctgtttctcgagggcgatttactgacgacggaaacttcgttcttttcagagatgggtcagaagattctgacgaggttctatggtcgagctttgaaaatcccaccgacactctgttacctaatcaggtaattaaatctttattatgcgatcatagacaatattgaccaaaataataaaaaattctatgaaatttaaaacaaaattgatgaattaaatgacaaaaagaatatctttgggagataaaatatggaaaatcttcaattataattttttgtttgttttgacaaaattgcaaacgcggagatgaggtgccaaaatgagaaatttctagttttttttttttaatttacactatacgtattctagtaatttttttttgcatgtaagatatattttatttactaaaacaaaaataataatatgtgttcacaaacgtaagaaattaactcaaaaaaaaataaaagtaaaaattaaattagcagttagcactattaattaaggttttgatcctattgtgagaaaatactttttagttgacttcttttgttagatttgcaatcgattttaattgatttgtttccgttagtatgttgcggatgatatatttatgaatgatgatgatacagaatatagaagttggaaggaatctgtcatcacgtaggacagagacgagcttcaaaaaaggaagattcagcctacgtctagaggatgacggaaatcttcagcttcactctctcaacgccgagactgcctcagaatcagacatatactctcagtactacgaaagtaataccaacgatccaaacaaccccgggattcaattagttttcaaccagtcaggggaaatatatgttcttcaaaggaacaattcaagattcgtcgtcaaagatagagatccggatttttctatcgccgcgccgttctacatttggacggggtttttgctgagtactatcatcccaaaggaggccaggagaatagtgggtgggtgtttgcttgggctgtgccggataatatgtgtagccccgatgatgcacttgggaatatggcttgtgggtataataatatatgtagtttaggaaacaacaagaggccaaaatgtgagtgtcctgagaggtttgtgttaaaggatccgagcaatgagtatggtgattgtttgccagattttgagatgcagacttgtagaccagagaaccaaaccgcaaactcagatgtgaatctttacgagttcattactttagagaagacgaattggccgtttggggattatgagagttatgccaactatgatgaagaaagatgtaaagcttcttgtcttagcgattgtttatgtgctgcggttatttttggaacaaatcgggatctaaaatgttggaagaagaagtttcccttgtctcacggtgaaagatctccacgtggtgatagtgatacattcattaaggttcgaaaccgctccatcgcggatgttccagttaccggaaacagagcgaaaaaacttgactggttaatcattgcttgttctgttctacttggaacttcagcttttgtgatttttgatacttcttgctctttatagaaagactaagaagagtaaaaatatgatgaagaatcaagcgagagatatcggtcggactacagctacaactactgcaaatgagttgaatttgagggtctttacatatggagagcttgcagaggctacaagagatttcacggaagagcttggaagaggagcctttggtatagtttacaaaggatatttagaagttgccggtggttctgaagttaccgtggctgtgaagaaactagatcgtcttgatttagataacgaaaaagagttcaagaatgaggttaaagtgataggtcagattcaccacaagaacctagtgaggctcattggcttctgcaacgaaggacagagccagatgatcgtctatgagtttttaccacaagggacgctagccaattttctcttcaggcgtc

SEQ ID NO: 63671 - DNA, 376 bp, Arabidopsis thaliana landsberg
tcgcttttaaataaaccggagaatttgcccaaaatggagttgggtttgccttttttgtggatttattccttttttcgtttatgtttggcgataaagagaaatgtaaaatttctcagattctcttttacctaagaaaagtaaaattgatgtggttcggttttaggtaaaccgaagaaattggtctatagtcgagcttgggtttttgcctttttgaggatttatttttcttggatcttcttatcgcttgttgtacaaagagaagagagaaatgtacattcgctcaaatcctcttctgttttatttgacgacatttctcaaatatctagaaaagtaaaattgatttggttgatatccactttgatgtcaaaattcgagc

SEQ ID NO: 63672 - DNA, 1363 bp, Arabidopsis thaliana landsberg
aacttggtcaccaaaaaccccgctaatatctgctgatctgccttaacgagccctgagacagaacaggggaacatgagttgcccaaaacatgatataaaccgactctcggaacttgcattcgattctctgttgtcagcttgtgttatccgctcttcttggaattctcgagatagctttccaatcagataacagaggaaggagaagactgagccgtagcaagcattggagatgatcgttgagagagtcccagaatatataaccaggagaagaacttcatgatggctctgactcgataactccggaatgccttcttgcttcaattgttcttcaacaacactgagacactgagatctgatctgtttgtagggtaacaaaagagaaatctttagtgcgagaaatgggtcggtcctggctaagatcccggtcaggctttctgcttcagtttcttcaattatcacctcaggcttctgaagagaaccatctattagttgtagtacattttcgggcatggacaatgcaatgtactttctgaaaatatccagccagcaagaatgtaaaggatgagctgagactacgcattctttttttactttctccacgggttctgattcctgcagtgtttcccatccatcattccaatcatcatcaccccagtcgtttccttggtcggttgcctcattagatggcaatagttcggctttcttagcttcaaacagctcttcccatccttccaaaatagccaaaagagcttcagcttgtgaagctgtagtaacagcagcagagagtttagagaagcaagaaacagatgtctcaacagtagataaatcctccggggagatctctaggcctggagagatggctgctacagcgacctgagatgatttaagtgcaaccagagtgtttgtgagcctgctagagccatcagcctggtcaggcaacgcttggttaagcgcggcttcagtcttctgcatagatgatagtaactcagccgaaccgtcccatggcataacgtttgattgtagctcagacgatgagcccttgatattcttacccgagatgaactgcataagctctaaggagtagacgcgaacttgacttggcaactccaggttctcagaaaatattacgagttgtttccagactacaagcctgacacgtttcagttcttccaggttgccttccaagttactaagagaagagagcagccggtaaagattttgtgtttcaggagccccagataccaaatcttgtaaaataggttcaaggacactcaaatacaggtgtggaagatcctgcaaagctgttggataccgagaggacatatctgagaagacatcagaaatgggcccgaatccacaaccag

SEQ ID NO: 63673 - DNA, 1733 bp, Arabidopsis thaliana landsberg
agctacacataatggacgagacgactcttgtatgattatatggaaccacaacatgattctattgtaacctcaagtgtaaaacaaatgggtctttgacaccaagtaaatcatattcaagacacatatcacaaggtttggtgtgtttttattatagcatcctatagtgttgcatgttgcctaatacgcgcaaaaaatatattaagacatacctcaattcctgagatcaatttatatgatggcaagaccagttttcagataatccaagcaagagaaaggcagacgcaggactcggtccacttctagtgaagtcttcattagattactcttggttttctctctatctcttccctctgaccccatccctctgctcaccaccagcgatacattacatagccatggcacttcacaagcaaacaccagaccattcctctcattctctaataaaccctttttataggctttaccaactttccgtacatacttccccgttgttacaccttcatttgatctgtctatatcagagatgtctgcatcagagtgaaggttcaccaccagagttccatgctcatggtgaagtgttttgctcagagctttcataaacacagaactggaatcccacagactatggggaaagatgtctgctccatcataagcatccatgaagatcaagtcataagtattactttggttcctgagaatgaaatcctcagcttttgattcgtataaggagagtctctcacggatccctccccacatcacttggtcaataatttcaggagttggtaacacacgtttcccagttgctgtcatcacagagaatgcaggaaagcccattgctcgaaccgactctgagataacaagtgggtctagctcaactatgtcaacaacagcacctagaagacacatcaactaacataagaattacagatggaagttctaaatactgatatacatgtacattgaaagttcctaccaagaatgtgtttagctataaacaacggtaaacttcctccaccgtgaccgatacataacacacgcatttgtttgtccccaatagctacactcctcatatcaaatttagaagctgcaagagaagtcaatccaactgaaaccatactcttcagatctgtcaccaaaggaaaaagagttcagcttaataataacacagagaccaactaaaacaacaagagagtcatcatttaacccttttaaacttggaaacacaggactaagagagctttacaaagagaggaataaaagaggtgacactctcacatggaacagcaagacaatgaggctgttgcatataaaaaacataacttggttgcaatgttctacaagcagccataactttcacagtgctttgtctagtatcatcgttaaaccgaagagatcgccattgatacccaagtacattaaacctcccactcttctcctctgtatctcttggcataatctccatataccttttctctaaccatttctcagtttctccccatgaatctctactctacataaagacaaatcatctctcaaatcaaacaatctcaggtttttcaagattgattcatcacagatactcacagggagagaagaagggtgggcgacgacagaaacgatgccgtttcctctattggagacagctcgtgagactgtgtagccaccgtcttgatgatcccaccattccggtgagtaaaaccagtctccttcgtcttttattacgacgtctcttt

SEQ ID NO: 63674 - DNA, 1173 bp, Arabidopsis thaliana landsberg
gccgttttagtgtccttggagccatctttaccgttcttgattcagagagagagacagagagttgtgtttggtgttggaaatataatgacaaaaagaaagtatagtgacatttcttccgaatatcagaatgagagttgtatatatgattactcttctgatttgtgacagagtgtcacaccgttattagttgactttcgacgagttgactgacttaagaggtgggaaagtctctatccttactatatttaatgttcatttttaatcattcaatatagatatgtactaatgttttaatatttaaatttatgtagaattggttttaccggtttttaattgttagttgagttacacttgaccacttttttattttttatttacatattcttatcttatctatatggtttattctaaatctaaaaatactaataacaaacgaaagtacattttgatcaaggttataaagacaactattattcttttaacatttgtttctataactagttttagactgaaaatatattatatttacaaacatgtcaagcatgataatgctttgattgaagtttggctaattggatattacaacgacaacatggttgaatataaaatgctgtctggaataatatacgatatcacgattctccgtcataattgcttggaatagttctaatctttttttaggcgccgcaagttcccaaagaaaaataaaaaaacgaagcaaatcctatagtttatacagttcttttattacttttttgacttcatacattttgtttcaatgaatgatgatcatatggattctccttacatttctactcaaaatcaaagtggaactttttactatggattctactacatatcactagtttactttcttataaaggttcacgttattacactaaaattcaaccgacataaatgtagttttacaaatttcacaaaataaaataatagtataacgttataccatttttgttgtaggaaattagaaagaaacgcatattttctacgaaatttttaccatttttattgtaggagaacgttgcatttcttgtagtttaactaatactctgcaaaagttatttattccagaaaaaccatggaactcattccttgaagatcatttcaaaaaaagagagagaaacagtggctcaaaaaagaggccacacttag

SEQ ID NO: 63675 - DNA, 476 bp, Arabidopsis thaliana landsberg
ctatcctatataaaaagggatgcactggcaaagggttggcgcttggccaaaatacccttggactttgcctcaacaatggaataacactataaaattcggccctaccagaggaagcagcagcgaatgcaaccgaagcgacttttcatcgtcgatgccatggccatggccttccgctcgttttatgcgttcggtttaggcaggcctcttacaacctcctcaggattgcccgtggccgccgtttacggcagcgccgtgttcatgaacaaattgctgaccgagcagaagcccgattatctcgccgtcgcctgcgactcgcgcgagccgaccttccgccacaaactctacgaccagtacaaggcgaaccgcaccgagatgccgccggagcttagagctcagctcccgcatttctaccagctgctcgaggcctacggcgtgccggtgctccgccaaggcgggctcgaggcggacgatttgat

SEQ ID NO: 63676 - DNA, 1191 bp, Arabidopsis thaliana landsberg
actagaaaacattgactaacgaactctaaatcgagttaatcgttgtcatatcaaattaagaaagaaaaataacaggaaaataaacaacaattttcttaccccatttgcttattgactctcttaaacaaacaaatcttaaaaagcaagagaagaggatatttattacaaacacatctctgcaacgagctcatccaagttcttgtaagagctcccaccttctttaatggcctccatagctttctccctcagcttcatcaacgtaactctctccggcaagtcctctctcgccgactcagccaaaatcctagcgagcttgtccgagtcaggaaccgagtctctgttctctccaactcgcactgcggctcttagtttatcaacgatgagcgtcgtgttaaagaaatgatctgcttgcatcggccacgcaagcaacataactcctccgaccattccttctagaaccgaaccccaacccaaatgagttaggtaagatccaacggctcgatgctcaagaatcatagtttgtggggcccatcctcttatcacgagtcctttctccttcactctctcttcaaatcccgccgggatcacatcttcctcaacggagttatcgctggagttcaccttcttagctgcgtctctcaccgcccatatgaaacgcacaccgcttttctccaacgccgccgctaaagcagctgtttgctccgccgtgagccggatctggcttccaaaaccgacgtatacgacggagttatcctcggggcacgaatctaaccaagccgagactttcgccggcgggattgagctttgtccgccacggtcaacgccagctttaaaggggagcaacggtccgacggtccatatacggtggtgattcaggaaacgtgttttaacagtttctacaaactcaggctcgaggtcgtagaaactgttgatgacgagcccgtagctttccgttgtggcagtctcgagatcgttgaagaagcttctatcttcttgagcccacatgacggagatcgaatgagcattgatgggtaagaaactaatggacttaatagagaaagcatcagctactttgttaatccaagggctgagaaatgagcttcctaggatggcgtcggggagaccgacggtggttgacggctgagaaagtcacgaaaaggtcgtgaaacgaaagagacatcaacatgtgac

SEQ ID NO: 63677 - DNA, 1499 bp, Arabidopsis thaliana landsberg
cgaactcgatccctaacaatgatctctctcttataaatcttagaaatatgtttgaaaacaacgtgacagtccccacaaattctcaggttgtttataactctcaccggactctcctcgtccgcgccatccatcatcatcagcccgtaaggcaccgccaatttctcactgtgataacacaaagcattctctttctcttcctctcctatgtcgtgcaacacaagtcccgtctgcgccacgtaaccatcctctcttatcttgaacctatcctcatcaaccaaaataacaagaaagaagtaaatcaaaagcattaaaattcaccaatctcagctgttagaacttgttctgtacctgatctcatcgatcttctcataaatctctctccactgttcatggctcttgtcactgttgtagaattcatgaatcgttcctttggcttctatgtagctaagacctggaattttcttcacttgtttgctttccatatcatctctcactcgtcctacatccttccaccgtccccgcgctgcataaacgttcgatagcaacacaaaatcaccgtcattgttaacacccatttcctttattttcaaggaagctatctcagccatttcaacattattgtgaatctctgaagctccaagaaggctctgccacaaaacaggatccggaaccatcgacatcgaacatataatatgatgagcttctttcaaccttccagcacggcttaacagatcaaccacacaaccataatgcttcatgttaggctcaacgcccttacaagccatgttgttgaatacagacaaaccatactccactaaccccgcatgtctacacgcagttaaagcagctaagtacgagacatcatcaggcttaataccattatcctccaacttctcaaaaatctccaacgctctatgtgcttctccatgcactgcaaaccctgtaatcatagtgttccatgtaacaacactcttcttcccagtgaattgttcaaacacttgataagctttatcaacaaacccgcatttcgaatacatatcaatagccgcgttactaacaatcacgttatgatttaactttgcatctttaatgtagccatggaggatattttcaccttccttaacatcacccaaatgagaacaagctcctaaagcagcaacaacagttacttcacttcttctaattccttccgtttccattctcttatacaactccaatgcctcactcgctcgattccccgacactaaccccgcgatcaacgcgttccacgacgcaacatctttcacaggcatttcatcgaacaacttatacgcactaattaaatctccgtttttagagtaagcatcaagcaacgtagtacaaagaagcgaatcagcggataatccccgacggttaatctgaccatgaagctgaaccatagcggaagaacaaagcgcacgagcacaagctttaagagtaaaagaacaagtcaaagcatcgactctacatatagcaaagat

SEQ ID NO: 63678 - DNA, 579 bp, Arabidopsis thaliana landsberg
aatgtttattattcatttgatatgcattagggttatgttgttcgtattatgttctaggtattaactaatcactattacaatattttcaaataatcttatttatgtatgcataatttttttatccacattgatatgagattataggaaaattagcgctcaatgttttggtttctatgaggaatttaagtgagttcgaatcccaagacatccggagaataaaaggtgaaaaagaacaacaaaaataaaagataaaaattgtattagatatagtatcttttaaatgggccctttataaaaagacacaacatcttttatttgacaaaaagaaaactacaaacagtattaaaaattcattaatccacagtaatatatatcactgggtgtagtgtcattttccaagaaagatcatacctagagatcgtaattacaattaaattaaaatgattagcctagatatcctcgaaagacaagacaaagatcatatgctaatcgagctaatatgatattcaaatttaaaggaccaaaaaagggtgtgatcgaagactcaaaaggagagcccatagtgtacaaaaagaaacc

SEQ ID NO: 63679 - DNA, 510 bp, Arabidopsis thaliana landsberg
ctcaatccacgtttccattcacgccacctctttttttgtcaactcaccaatactgattttaatatctttgtttcgatttgattttatgtttccattattattcttatagttttgtatcgtcagaaattaaataaaagagaaacaaaagaaaaaaaaaagaaaagagagaaaaggggtaaaagagtcaaaaagaggatgataaaaagaggataaacaaaaaagaggatgatagtgacatgtgcacagtgatcaagtggtcaacctaattaatgagtcgttcatgtatatctattgatattaccctaaaatttaaagatgtgattcaactaaataaaataagtttattacaaaaatataaactttttattaccttctaaattcacaaaaccacgtagtcaatttcaagtataaagcaaggttttgacaatttttagaataagacaattttttttacaaagatttaaccacttacatccaatactaaacgatgattttgtactattgtggtga

SEQ ID NO: 63680 - DNA, 532 bp, Arabidopsis thaliana landsberg
cgtcatgtgggccgtcaagcacgtcacggcctgaccgtctccacttcaagtgcgagggtgtgagatgagcatctcgatcggcatcggttggtggatcgccccgacagtcgtcacgatcatagcctttgccttcgccgggtacatgggcagagacgaggggagccatggcgattacgcagccatcggcaacgccttcgtcggcttggtggtctatggcgcggcgctaatcgtttccctcatcgcgtggcttctctgggctctcatcgcatgacccgcaccatcaccaccgttctattcgccatcgccatcctctgcatggctgcagctttcctcgctgggtgccagcatcagccgccgtgtggtgattgctggttgatggtgccgtgaatgccagtcctcgataaccagcgtcacgaggcgttcgcccaggcgatagcgagagggaagacccaagacgacgcatacgaactggctggctcaagccgcaccgtggttatgcgtccacgcttagatcaaatcagaacgttttgga

SEQ ID NO: 63681 - DNA, 438 bp, Arabidopsis thaliana landsberg
cgccgtcgcgcagagattccatcaaggccatgccgtcggtagcgtctatcgtctgttcgctgccctcgcgagtttttacccgtactgccgtcatcaaaccactccatcaaaaaaatgccccggtcgtgcgaccggggcgtgaccgcgtgcggcaaatttcagttctcacattttcgcgagcgccgcggcgtctgcagccggatagaactgcttgaaccacttgcggaactgcaacacttggtccggggccatccgatatttgagagttcggacgatattttttgttgttccacactatgaagccgacgctcttgaatccggcacttttttctccttcagcggcgccgatcatgtgatcgatgacctttttcaaggcatgcatctccggcgtgccttccgggtaatcaacatggcggaagctcatgttcatgcggtttt

SEQ ID NO: 63682 - DNA, 721 bp, Arabidopsis thaliana landsberg
ctgatctgtttcaataacaagatcaagatcacggaaaagtaagaaccaccacaaacaacaggcagcagtatgaaacgttgacaccaggaaaaatcaatcactcgtgaaacaaaaggtaacaccaatgaaagaaaaggctagagaaagaccttcaactgattgaaccgtgaaccaattgcctggcccgctttctgctgtttaagggaccaactacgatcaaccaataatctcttattctgtcgacccataatccatttctgtgacatggtgtacttaggcgacggttgcaaattaccttcctcttcatctgctatgtgccatatatccatattcgaagagttatcaatcaaattagttaacaatactacactgcaaaagggaaagacccatcagttaaaacaatcccatctaagatagtcactaaccagaagaatgaaattcgtcgagttgaacatcataagttgagaggtcattaattttgattactccagtccaccccaccatatctgatggtgcggtcatggtcaaaccaggagaaaacgttaggtgagaatgactaaccagaacctgagtttgtgcttgaaaactgggaattctaaatgctagaagctttttgcccggccaaaaatacaggtttttgcgaaaactttttttgcccctaagtcttggatcttctcaagtttccatttgggaatgaaaaaagttccattttgaattccaa

SEQ ID NO: 63683 - DNA, 765 bp, Arabidopsis thaliana landsberg
  unsure (1)..(765): unsure at all n locations
tccttcgtaggatttaaggttataacgacgctagtctaaaaagtttatcgttgggacttaccaccatattttatcatatgttataactaaaaatcatatatacataatgtcccacaattataacccaaaaaaaaagcgtaaaaaaatttcattaatctaaataaggtgacgccaaatagtagcatccattagcctatttgcccaccaaacacctcttagtctctgtgtcccatcgtgagaggataaaaaaaataaaaaacatcgaaaagtaaaccttatgataattaaacgtgtaatattcgactgttctttttctccatccctctcatcaaatcaaacactttgtttaaaaaattaaattaaaaataagttgtgatggaccttttctttctatcaatcaaagtccgatggatttgacaaaacttaaggtcactattttcaaatacttttgatcaaaagttgagatcccacacactttcgtaatcccatatcaacagtgaggaaaaacataaaaatgggaaagtttaaatgtgataaattggatattacgtacgtgatttttattttaacatataggttttgattttacagtttttttttctttttttttaacatgccactgtaaatgatttacacataaattccgttagcggtaaaccgtgaacgctagccgtaacagtcagatcagttcaagactatatggacanatacttaatgaaaacaaattactatatctcaataacattaattacttattctattctg

SEQ ID NO: 63684 - DNA, 1162 bp, Arabidopsis thaliana landsberg
gtaacacattatggttcctcaatactctagataatcattctcgtgtgccatatatgatagcttatgaacaactatgagtatgcatatgcatacatatatcttttgtgactaagcgcgtattatatcattggtgaaactgatcaaacgtgatagacacacaaacacgagaattctccaaacctcggcgcacgagtttcaacttaattataaaaaaaaaattaagatgatcaatgtttattcaaaaaattggtcaaaattcgatatgtttacttgtagtatataaagttcctcacacatatttgtgtcctgccaagaaaccaagtggtaggtaaacatcagattaaaaacagggaaaaacaattcttgtcattgaacatagcaaaactatacgtcattgaatattaatttaacatgtttcacatacactaagaaaaatatgtaaatatctatttctagttatattgagttgatataataaagataaacacaagattaatttttgtaaactgtattaaaaatacaaaacaacaccgctcattaaatggagagaataataaaattcaccaattataaaagaagatcaaaaccgctcctcagttctctacatcaaatctatgaaaaaaaatgacagacatttccagtctctttagaaaccgaagtcgcaaggaccaacttgactatggtttaactgtgatagttatatcaactctttgttggtgtctttggctctacgccaaatgcaaacggcggtctccaccgttgccgccgggaccttggggccttcccattatcggaaaccttccattcctccaaccggagcttcacacctacttccaagggctggctaaaaagcacggtcccattttcaaactctggctcggggccaagctcacaatcgtggtcacctcttctgaagtagcgcaagagattctcaaaacgaatgacatcatcttcgcgaaccacgatgtccctgctgtgggccttgttaacacgtatggtggtacggagatcatttggtcgccgtatggaccaaagtggcggatgctgaggaagctatgtgttaataggatactgagaaacgccatgttggattcctccactgacctccgtcgccgagagactcggcaaaccgtccggtatttggcggaccaggctcgggtcg

SEQ ID NO: 63685 - DNA, 1206 bp, Arabidopsis thaliana landsberg
actggaaccaataattaaagacagaaaaattgaatggtggtaatggagttaatggcagtaaaagcacaataatgttgttaatgtcatgtaagagttggcagcacaaaacaatcatcccaaaaaccagaagaaacaatggctcaataacttcttcttctttttttgaactgttgaaaacttgaatgtgtgaatggtaacaaaaaattgacattcaaaccaacatgttttgtcagattgagggggcagaacaaagatgaaagaacttttgatgcatgaaagaattgatggaatcttcgtaaatgttgaatatcacacactatccctaaagaaaattgcatttacatcgttccttcttctccctatttacaaaaaaaaaccacaatggcatttcactgtctcacctctatttctctctcgtctctgctgcaacaataatgatgcgcttaacgtctcttttgcgcgaggatcttctggatcttccatgtccaagacagcaagaaggccacaagtccaagtcccacacttccccatagtgtcactacccacaatggcatttctgttgggtacaatcctgttcgtatcataaccatacaaccaagtttacactctccacactatgtaactgtaaccataaataactaaagcagagcatgtgtaaggaaccacctaccacttccaaacttgatgcagatgagaagttctactatgcatatccccagtgacagccaacagaatgctcccacctttttcacaggttttctgtgaacaaccaaaactacacaagttatatacaaaactctttccaaactaactccaaccaatatcgcagtggctatagctttacctgtcttgaagatatgaattgtactcccgtgttgttggtatcgctatgagccaccacaagatcagcctatagagaatcactgggtttcgaggggggatccacaggctaaacttgagaaagaatgtgttcagctccactgtcaagaatatgatgcaaagagtgagtacttgaataaaacgccaaggtccctgcagcgagatgccactcgtctttgtcccagtgagctggtgtgaactgccccagtgtccttttcacctgaaaaaatatacaaaattctcattggatgtacaacggctaggaccatgtgtatgcactctcaaggttgaacaaacctactttgccaataatgttaggcaggcggc

SEQ ID NO: 63686 - DNA, 253 bp, Arabidopsis thaliana landsberg
  unsure (1)..(253): unsure at all n locations
nnnnnnnnnnnnnnnnnnnnnnnnnnnnnnnnnnnnnnnnnnnnnnnnnnnnnnnnnnnnnnnnnnnnnnnnnnnnnnnnnnnnnnnnnnnnnnnnnnnnnnnnnnnnnnnnnnnnnnnnnnnnnnnnnnnnnnnnnnnnnnnnnnnnnnnnnnnnaagggggatgagaacaccacgttgaaccatcctaaaaaagcggtggagtggacgaccatttaccgtgttgaacgggaaaccagctttgccatgcatt

SEQ ID NO: 63687 - DNA, 712 bp, Arabidopsis thaliana landsberg
ctttttaaccctggttgattccacattatcaacatttgggccattataacaatagaccgaaatgacctggtatccattctcgcttggcccactaatttttgcctacaacaaaagattgagcactaaaagacttaggaaattgatcaaagtaaaaaaaaaagtgaacaacaaaaagaagttgcatcacattctcaaaatcttttggaaatagataatggattttgtttaaaaatttgtaaaagccatcaaaaactgagttttctattttctttaggatccttgattggccttgaatgttctactagttgttgtttttaaaaaactcattttttactcattcaagattttggaaaagttggttctagttttgggaagattttaacaatcttcattgacaatctaaattccattttatatgacttttcactttctctaaacaaaattcttaacttgacaatcgtatattccattatttctttattatgcaaaatccaataaccaaagctataggttatagaagagattttggttttcgctttttcaaaaactattaatatgtcgaaccagtcaagtttatcaaattttggagtccctaaaattaaggaaaatacctttgcattatgtaaaaatcaaaatttgaccctatttatattattttttctcaaaaatcaaatctaaaaacgaaaaactgaaaccaattccaagactgact

SEQ ID NO: 63688 - DNA, 404 bp, Arabidopsis thaliana landsberg
ccctcccatgaaaaagttgttggatgtaaaaatgtttgatagttctatcgtgacacattcataataaagcagagacaagagagctcagagtgggaaatatttagttgaggaggggtgaaactgtctattgaaaacgtagccaagtaaaaaatgcaaaaaaaacccgacccggaagagcaatgcatgtccgacaagcggagagcgtggaaacaactaatgctttggtttgtagtttaggggtattttaatcaatttcatcgcctgccagatcttttgcaaccttgttctagacaaaatttcttctgcgcacggctattaaaatagtcacctacacaactaaacaattgttggcctttgcctttatcacctaacacatgttaccatcgaatcactaaagaatatgc

SEQ ID NO: 63689 - DNA, 376 bp, Arabidopsis thaliana landsberg
agaacatactccgcgaccgcatatgggtcatcacaacaagcggtgacgacacttccttccatttatatcacatgcaagttacccaccaaccacctatggtaagagcaacgttaccttcaacggatcaagaccagcttgttcacggagaattcatggtgagagaacaccttctggccaactattagcacgtggatgagctacatataagccaggaccaacccgctgtagattgaaaaccttatggacgggctctggtgcttctcaagaggccctgaccatggctctgcgctgaggggggcccccaagatcatacaccttctaaggggtatggcctggcttgttccgcctgcaacaaataaccaacatgggtatatga

SEQ ID NO: 63690 - DNA, 600 bp, Arabidopsis thaliana landsberg
catttgcacatccttgcgccgagcgtcaggacagtggcggtgccaggctcttcaacatagggaacgatttgctgactgattaccgggcgcgccaggaccggctcggaccggcggatcggctgagctgccggacgctcgctgtgtgatgaagtcgacgctgcggggcgcgacggacgagcgggcttatatagcggacgggtcggctgcgaaggcgcggcgcggcccgacaggccgagacggtgcaccttgccgataacggcgttgcgcgtgacgccaccgagttgtttggcgatctgactggcggaatggccttcctgccagagctttttcagggtctcaacgcgttcgtcggtccagctcattactctcactctcccatgcttatctatcgtcgcttgcggttcaaaagtaatgaaaccacaagatatagatatttccgaagggacttgctccccagtcatcaacagatggtaaacgaaatgttaaaaaccgcaatatatggtgtgaggggaattccatctgtccacaacatatctatatctagcgtttaaggcgttcacatatgtggatatctggtccagatatagtcaggcagcgggt

SEQ ID NO: 63691 - DNA, 703 bp, Arabidopsis thaliana landsberg
aagtgattaatccaattagtatatctacaaattcgatcgcctaacttttttttgacattgtttcgcctaactttaacaatacaacatttatattatccattttctacaaaccaatgaactatcgactcgtgtcttgttccctctcacaagcccatgtttcgcccaaggaagcattagtcaaacttcaaatcccaacttaaactaaagtaattaactaaattagttattttcaaatactttaattatgataattaagaatagttttagaagatgcttaccattttctcttccccactgatatttcaccacgtgcgcattttggaattgctagtacgtgtgacgtgtccatgagaaggttggcattgccaatacgattaaaactcttgccgtttcaaagaaaaatcgacacgtatgtttcgggctcaccaaaactaagatatttttatggaatttgttttaatatttcctgaaaaggaaaggactgctaaaacaaaaaagaaaggattagctttagaatgattgatttgatttcattaatagccaatattacaaaatatcgcaataagagtccaactattgattgctttaagaagggaactcagtctaaaagtcacatgattaatagtttaatacactaatacacattttcaatgaaattatgattgtgttatatgactataatctatcaccaaacgttatattc

SEQ ID NO: 63692 - DNA, 283 bp, Arabidopsis thaliana landsberg
cgttggccttgtcacaactggctgttgatgatgagccaaaggacggacttctatcacattgccaaaattttagtcagtgctcgcattccaggtaaagtaacgcaacagtacctgacacatacctaagaggacttcagctgcggtaaagaataatgcagatgcgccggacgcaccattcgagtgggtggttctcatcaccaagggtaccgctcatgctaactgttgagctaggacatgaatgacacacgcgtctgcgtatctatgggattgaatacatgatgca

SEQ ID NO: 63693 - DNA, 490 bp, Arabidopsis thaliana landsberg
ttctttttgaaattgtctggtttaacagagagatttaggtccaatcaatatcctgcaatagttttccaccttgacgctctcaaatatatttagtttcagcaagctaaagacatccaaaactcattccaaaacattgctgcgatatgtcggtttgagtagcaatgcgattttcatccatctatatgcatttctgaattcttcatagtactcgaaataatcggaaaggcaaatcggtttagtattaaaagcaatatttctttaggagataacataaaaccattacattaacagatgatcttaaaatacaaaaaatctcaagctctactgatgaaacaaaattcaactcactacacaagaattattccatccgctcatcaaaccatacacatcgtccccaaaacatgaagattgtgaaactagactcaggggttgggaacattctagatcctacccagtaccctctcagccgcagcaaattgtaactgtatat

SEQ ID NO: 63694 - DNA, 499 bp, Arabidopsis thaliana landsberg
  unsure (1)..(499): unsure at all n locations
aaaatcattgtacacatcaaaatttcttatgaaaagtaaactgtttttttgtacattactctcaattattgtgattctttccttccacaacaataactgatacattagaacatatgaggatctatcctctgatgtttgcnnnnnnnnnnnnnnnnnnnnnnnnnnnnnnnnntaaatataaattagtattagtcaacacaaattaaaagatatacttgatcaatatacgtatatatttacgaggttacgaattattacggaggagctggaaagccacatttttcgtgatgacatttacggagacaaggggtctcaaggacagtgatgctgccaccacattggtcgatgcacatttgcttgcatgatgttcttattataattgcttctcctccttgtatggatgccatcaccactattatacttatcatcatgatcatacctacatttttttcacctccattttttttcaaggttctttcctttaaattttcttccctgt

SEQ ID NO: 63695 - DNA, 472 bp, Arabidopsis thaliana landsberg
ggaatgctctatcgaggttgatcttgagacgctgaaagtcgtctcgcaacaacgctacccatggtctatatttgccctgtctcaagaaacagactattcagccccactaaccttagccacggtagtgagtcttcacttatacgactccaggatgcctgcccaaggggaagaggacatgaccagccacggctacaagaatgctacagctacactccttaaaccctgtccggtctatcccccaccggactcacacgcattacgccttcaagtcaatgactgggcccgccgcataagaagccctgatcctattgataaagaggttgattatgctcctcttttccaacctgggcctttttcggttttacatcccccaactcctcacgtgaattaaatccttcttgctggacggtttccgaggtgtgctgtcctatgaccggcggttccttccccgcctgcaaaagtctgcccattc

SEQ ID NO: 63696 - DNA, 481 bp, Arabidopsis thaliana landsberg
tacccgacgaatgatgcgggggggctgtatggcttcaatgcttccattgacattcaaccccaagaagatgacaacaagcaaggagaatgattgcatcctcaaggaaattatgattacaacgactcggaagaagccaaaatcatgacctctagaaatccaaaagagagaaatcgagaacagcgtgggatgggaactggcgatgcggggtcaccttcaaaggtctgtcacatggattgatgatctcctttgggcgaacctatttccaggatgactgaacgaccctctaaaccgcacggaagaatcggattctcggcaggaaatgagagcagcggggttcaaaaaaccaccatccattcctggattcatttctgaaccgtcctgcaatgctgccattgcggtcccgagcttacccctgaaagcacttcatccagaagttctccggaccagcgtaccttacgttcgtagtccgtagtgaagagct

SEQ ID NO: 63697 - DNA, 484 bp, Arabidopsis thaliana landsberg
gaaagccacgccgcggcagcgttgcctcgggactgacataaaccggaatgtccgttacggcggtgatgcgctgcgccgcttgtctcaggtcggttggctcgccggcaaaaaatagggtggtattgacattggcctgcagcgccagcggcaggctgacattgcgtgccaacggaacggcgtgcccggctatccagggacggtcaacattttgtgcgacccggcgcgcctcggtgctggtaatggcctgcgcaaacaagtcgtgccgctgagcaatgacggcgcgggcgtcatcggatcgggcaaatatttccttcattctgtcgcttagcgtacaagacgacagcaacacgcaacatgcaagggtccatagacggaacaaggcaaaagaggtcatgacgcgcgcaccctgcccgcagtgcggtcgcacgactgcgtgtaagagatgacgcgcagtaccctgttggaatagaaacacgcctgcaat

SEQ ID NO: 63698 - DNA, 1246 bp, Arabidopsis thaliana landsberg
ctcctatctctttgttgtcaacccaaaccggcaaaccctgatattctcttattacttttcatctataacatattgagtactagtacttgaccaaaacaaacatttaactatatagtacatctctttgggcttaaggaaacccttttgtaaataaagcctaagcccaaattgtagaactagttatagtcaataacacaaaattgcttctaaaaatttcccaaatctcaagtcttattatgttattttcaacaacgatatgcatgagatcatgatacaatttgaatctgcaaaaacaaaactgatacaaattggtaaaaacatattttattgtcgaaaatgtttgaaacattcagatccaaaagaaaggcaaggcgaaattgatacaactacaaatcattcaaatattcttatgtcagaacaacagttcctggataaatttgctcccacttgaagaaaagtgtagtcatcgctagagaagatgaagagattcgtgatgaagtggacttggaaaaagagttgaaccataagagtggaagacaacttacaaagagtttggagacatcataccaggaatcagttagatcattggcatagaacatcgaacagccttctcgagtattaatttacagagattttattgtattatataaaatattcacaaaactgtagaagtttcaagaaaatctaaatccgacggttgaaaaactccctacgtaatctctgttgaacaacaacggtccgatcaacatagtaaaaacgaaaagtaaatccaacggttaaaaaaacgaaacaaaacaaaagatccgacgaggaagagtagaaccgtttgccctctctctctctctctctatcttccttatctctctccgccactctccttctctttctccgaactcttcgatggccggtctactcaaaacgccgtctttacatctcacaccaactcttcttcatgctccttctgtaccctttaagcccttttgcgtatctttcgccggaggaagaaacgttagcgtctcactctctcgccgagcttctctccggtctgtctctagcggctatcctctccgcttactaaacctcgtaccctttgcttcgggagaagctgagacgacggagacggaggtggaatcgaacgaacccgaagttcaggtttttcgatttcggctcacttctgttcaactttcttgggggttatttcattgttagttcggtgattagggtttcgaatttgggatatggtaat

SEQ ID NO: 63699 - DNA, 1818 bp, Arabidopsis thaliana landsberg
tgattctccaatctgaaaccatgcttctctttttgtatactagcatcatcttttaattccccgcagtgatagtcagctttaacagtgatcatgaaaatcttaaaattgaagaagatctgctttggctaattgattgaataattaatcaaaatttgagataacaatcacgaggtggtcctgtaggattagtatattaaaaagagtaatgagtgtgaccactttaacaagggtagaaatgagatttaatgcatggagaaaagcaaaaggcaaataacgcaaatgtttttggacagtgacattgttcttctgctataattgagatgcgtgaaaaaacatgaaagcaagaatctctagagacacagggattccaacttgtattatttaaaggcttttcttttttccttggatcagtttgtttagcacaaactaatatgagatggaaaaaaaatatgttttggaaaccgacatgtagggaatcagatgctactttttctgaacaagactcttcttctcttttagaagaattgtgattgatgttaatgtttaagatgatgtatgatcattttattaccaaaccaacaaaaaagggatgatgtatgaattatcatgatacatgatacatgtcaacatgtatatagtatgtatgtattatcatgattcccccatagagtcccgcctttgccaatttcgtcatggatatatatacacgtaaagtttgcttactattcatttaataatgtcaatattgtgttacgtctaattaattaatgtttatttgatactctagatatcaatactataagcttgagaaagagtataggtacttgatacatgtgaaatggaaatataaaagggttgataagataagatgcttagatcttaattagctttattcgcttccccttagatcgtatcaaaggttgcatgtctttagttaggcttgcatgttagcttcctcgttgtctttattaattaattaatccacattccttttgcatttgtgatacaacatttatatatatagtcacatttttttttatatatagtactcacattaattacttgttcatatagacttagactcgatttgtgaccaagaaaaacaaagtggtgaaacaattggggcatgtcttgttgttgtcgtttgataagttaaactgttaaagcatctttcgccaaaatatttttcagttgctatcttttgttttttgtatctgtcactctctctctctctccctaagttattggtgaccacatcttaaagcttccctaaaatgttattgttatttctttctcacggaaaagggagagttacttacttgaagtttgaatattatactttataagaatggaggagttttatatatgtcgcaacttgtggactccctcagtatttgatcatttccttacataaaacgtttgattacttcattctgttaaattccgtttacaatgttcttcgtctacatgtgaattatatatattagcaaacgaaaaaaaaccatgtaaacgagacatctaatatatgacatgagttatatatatcatacatgtgaagaatgaagatgtccttatttttttaatttatcttttggatcgaggccgagagtcgaggcaaaagagatttgaccggaagttagtaaaattgaagggccgagagaaagagagtcaaagattgtgtgggagtaatgatgtaaaagagccgaacaacgtctttaatccatatgtaaaagggactaaagaagcctcccaacactaaaaccaaagtcgacttggatgcctcctgcttttttattctcccatttttgaatcatatat

SEQ ID NO: 63700 - DNA, 220 bp, Arabidopsis thaliana landsberg
gctaaatcattcaatctggttagaagctagctccgaatgtcaaaatggattcatgatcagaatctgcaagcagctcgacatggctaaatcaactgatctcaagattctatcccgaggttatggagaaaaagctgagggtttcgaaaatattgagctcgttaagaccgtcgtaaagagcttttacacttactgcgctaatgaagactctgaaactgtttca

SEQ ID NO: 63701 - DNA, 558 bp, Arabidopsis thaliana landsberg
gcggacggctggcccgattgattccgcgtgccatttttccttcgacatttcgattcttggccgggagctcaacttcacgggcggggccagcaatacattcatcacgctgcagctggcacccgtagcgctggcgggggccgcgccgccggtacgccccatgggaagccgtggcggtgcttgccgccgaggtgtacggcgtgctggtggaggcgtacatcccgttgccggacatgcccatgcacggcgacgggtttagactgcacctgaccggcatgaccatcaacttcatgctggcggcgctgctgctggcggtcttcgtcgggcgcaccagcggcgcgctgaatgcgcagcgcgccgcaacccaacgcctgcgcgaacgcgcgttgcgcgacgaaagcatcctggccattgcgacccatgcggtcgatgccgcccaccgcctgaacacgccgttgtcaacgcttcgcaccctgttgacggagctcgcgcgcggacgcgagcacgacggcgctctggccgcggacatccacgtcatgacccggggaagtccagccgttg

SEQ ID NO: 63702 - DNA, 591 bp, Arabidopsis thaliana landsberg
cgtcgatgtctcgccgcagcaggtcttcaggccggcgtcgcgcacctggcccagcgtttccagccggtcctggtattcgcgggtgtggatgatctcgccgtagaattccggcgcggtgtcgatgttgtggttgtagtagtccagcccggcatccttcagtgcctgcgcgtgaccgtcgccaagcaggcccaacgtggcgcaggtttccaggcccagccccttcaccgcgctgacgatggcggcgaccttgggaatgtcgcgatccttcggcccgcgccacgccgcgcccatgcagaagcgactggcgcctgcggccttggcggctttcgcgcgcgccagcacgtcgtcgatctccatcagcttctgcgcctgcacgccggtgtcatagcgcgcggcctgcgggcagtaggcgcaatcctcggggcagccgccggtcttgatcgacagcagggtcgacacttgcacggcgttcgagtcgtggatctactgatgcactgagtgcgcgcgggacaacctggtccctgaacctgtaggtcgaacagctcgagcacttggtcgcgcctccagacgcggcaggtcggtgcagcgagc

SEQ ID NO: 63703 - DNA, 591 bp, Arabidopsis thaliana landsberg
ccggatttaaggaatgtgatgatgcatgtcgaaaaatcaaagataaattataatttatattaaatatctcgattttgagaatgtgatgatgcatgtcaaaaaatctaagataaattatttactacatatgttaccaaagtgcatttatcttttgaattaaacatttgattagaactctaataataagttttggatggatgatcaataagcataaagcatcatcccatccaaaatttatatgaaaaatattatgtggtgatttgtatgactaataaacaggtttttgaaacctttaaaaataacttttgttaatctaaggtgaaatccacataccaaaataaggcgtaggaactatatgtggtgattgtggcattatatatatatatatatttcttttttatattcagtttaataataataagaaactttattttaaaagtaattatgatttctcatataatacattttattataatatatatatatatatgaatataatatgttcggtttccttttttttttctttctatattgtgaatctcgaaataaaaattattatgattcttatctgtgaaacccgcagttttaaga

SEQ ID NO: 63704 - DNA, 1717 bp, Arabidopsis thaliana landsberg
  unsure (1)..(1717): unsure at all n locations
tcccggtcggagaaagtctgctactccggtatttaggagacaagttaacaaactccaaagcctgtgttctgagctgaaccggataatcagctgcacaaccgattcttggaccaactcctgtcgaccatttcagtgacaactgatgtcccaattgtaatgatcttgactgtttctttgagtttatccttagtagcatagatttctgcggcacgttagcttttggactcccaagtccacctgagagtgttctctggtagctactccgttttgcctcctcaagtgttcccactgttccgttaccgttctcatctgtttcagtctctgcttggaatgttgtgtcctctttctttaacggttccggttcagatcctccgttggatttaacataatcatcgtagctgtcagaatcttcactagctttatgcacctacacatacatagatatattagctctcaagtagtctctttttttaaacaaccaaactctagttaatgatatcattcaccagccaagattagaacaagggcattacctcaacattgtctaggttcactgcgttctctctgagaaacccgagaaatgtgtcgagactatcgtctgacggcctgtaatgtccgctatatgcagagattgtctgagattaaaccgaaaacagaacgatcaaacagagaaatcacagaaggcagacataataaaaaagttgatatgaatgaacatgtatctcaaccactctaagaaaaggacgtggccttagtaagttaccttgagaactccattgtcaacaatcaccctcccagcagctaatgtagctcctccagccaaaaagcttgagtgatggaaccttcctttctttttctgaagtaaacataaacaaagaaaagaaccattagaatctttttcaatactaatatcaattcatcaccaatagaaagatataacggttttaacttaccagaccggcatagagtttcttgaaagtactcataacaaagatccattttgttccttccgatccatgcattgtgtgtaagaactttccagttaacttgtgaacaatcttcccttctatgatcacatactcatactcttccctctcttgctgataccagaaaaggcttatatgagagaaatcccaaaaacaagtaaaaccaatattgacataagagaggaaaaaatggcacatacaggtccaagatatctaatgcattgctgcttaagctttgacctcggacattcgttaagatccaaatctatccctcctccaacatccaacctgccaaaaaaaaaaaaccggatatatcacaaagttatagataagaattatcacctaaaaaagattcttgagctacaagaaaacactaactaaatgaacctaagattttaagcataccagtaaaagaannnnnnnnnnnnnnnnnnnnnnnnnnnnnnntcatagtatttatgcaggttgtgtccataccggtgtctaggatcaatctgattttcaaattttcatattattagtcttctttttacatttaatcagaatataacacaaacaaatattgaaatttgtggaagaaaggaattacagcttcaatccaatgctgaaaggccaatttctgagctttgtcgactatagacagacccttccccacctaaacccatacccaaaccacaagattacaaaaccaaaaaccaaatggagatctttttcttacaataatatatatt

SEQ ID NO: 63705 - DNA, 491 bp, Arabidopsis thaliana landsberg
cggcggtctgcatgcgcccgcgcgccgcctgcaactgctgttcgttttccgccagtgccttctcgatgtcgttgtgttcggcgtcgatggcggcaatgcgcgccctggcactgtccatgcggccttgccggctttgcatgtcgccggccagctcggacaggcgccggtgcgcattgtacgaatcacgctgcgcgtcgtcgcgggcctgctcggccgcgcggcgctggtcgcgcaggttggcctgggattcctgcaaatccgtgatgcgtttttccgccgcggcgagttccgccgtggcttcctgcagctcgcgttcgcgcgtcagcacgcccacctgcccgtcctcggtacgccgcacccgcgcgaagcccgggcccagccacacgccgtcgcgggtaatcacggtacgcgccggcgccagcgtggccgccacgccgcgcgcgtcgtacagcgacacgggcgtgcgcacctgcgccagtaacgcgcgcgcc

SEQ ID NO: 63706 - DNA, 588 bp, Arabidopsis thaliana landsberg
ttttatattttaaacccaaaacaatatttttaaaaggtataaattgatgaataaattcttagaaatattattcttgcgtataatatatgctcaaataggtttggtgttatcttgaataagatactcggcataagtcttgtgatttttgtgtttgatcacatcaccgcaaagcttttggtaaattaaaatattaatggaaatataaaaggtgataaagaaaatcactcaagaacaaacatatgcaccgaaagtttgatcactgaaaggtgacgatcacctatttttttaatttctcaaatccgtccatttgctttctttagtgaaatttatatttatttaaagtctaaccgataaagaaagaacaacttaaacatcatattattgggctatacgctctagcaaaagaagacaaaataactgaacagagaatgaataaacatgttcgcactaatcttggtttgtttttgtttttgttttcatttcctgatcaaagtttaatgctaagaaagagtccaaagagaacagtcacgtgagctcgaggatacaaaaattggttgcaccaaggagtgaaaaacagattaaatatct

SEQ ID NO: 63707 - DNA, 533 bp, Arabidopsis thaliana landsberg
ccgtccccctatgagcccggcgaatccgaatcatatgcctttcttttcgctatctctctctctctctctctccctttaacccaaacccatctctcaaagacttgacctttctctctctctatctctaatttatttatcgtttcgcgtgtcgccttctctctttctctcattctctctctctctttcccttcgtatctctctctcgtgaggccgtgccctagaagaagaagaagaagaagcccctttctccgggacttcaatccctaacttccgtcgccggatttctcgtccttgattatcggaggactctttaacaactttattccgatttcagattcccagatttgtaagctgctttctcctttctgggtatttcctctttttgtatttgcttatgtaatttcgatgatttatcttacttggtgaggggttttgatgcttgtgtaatgttaatgctgtttaattaaggactgatttagtgtgattcggtctaattgagtttctttgggggggaattgggtttatctccaatg

SEQ ID NO: 63708 - DNA, 399 bp, Arabidopsis thaliana landsberg
ctaataggctcttcaccttcctttgctgcttcgatgtaaatcactcgaggtttcaacgaaccaagtttcctgttgatcacagagacagcaaactccgcctttgtccctgttgtgaatcggtagtctttaccagaaacttcacaaaaaacctccagaaactagtataccacaatcaacaatgttttagttaccaaaaacaacactagtataaacaaaaatcaacgagttaaggaaacctacaggtgatgtatcgtccaccattactttatttgatcagccagatgcatataagttactgccaaaagaagcaaagaacataacaaatcaatatactcaaaaacaaatctttgacagaacacatttgtcttcagaaattgacttgaagttagatctaagcct

SEQ ID NO: 63709 - DNA, 592 bp, Arabidopsis thaliana landsberg
ccgccgtcgacacctacgtcggtgaccttttcgtttagaacgttcgcttttttatgaacggcaccgacctcaagggccaggtcgatcgcaccatcgaagcgaagggcaagtacgtcatccccggtgggatcgatgtgcacacgcacatggacatgccgttcggcggctcgttctcggtggacgacttcgagtccggcacccaggcggcggcgttcggtggcaccaccaccatcgtcgacttcgcgatccaggagcggggctcgtccttgcgcaaggcgtgggagacgtggatgggcaaggccgagggcaaggccgccatcgactacggctttcacatgatcatgcgcgagtacaacgactcgctcggccgcgagatgggcgacatggttcgcgagggcgtcacctcgttcaagctgttcatggcctacccgggcgtgttcaatgctcgacgacgcgtcgttcttccgggcgatgcatcgctccggcgagatcggcgcgaccatcttcatgcacgcggagaacgggggtgtgatcgacgtcctcacccagcaagcgctcgccagggacacaccgcgcccaagtggacgcgcta

SEQ ID NO: 63710 - DNA, 1574 bp, Arabidopsis thaliana landsberg
tgaattctaaagtagtactatttggtcttcattttgtagatacaacatcctagatcacatttaaataggtttgacatggtgatcacgcctcgtcacgactactatcctctaacactcgaagcgcaggagcaggtccctagatttatgcgtagttggataactccacgtgaacctcctcaggatcatgtagtaagtatccagtaccatgctttttgctcaatgctcttctccactgttgtgaagatttcatttgtaattaccttgaatggacacgcctattttcaggtcttgactactggagctctacaccagatcgattatgcctcactccgtaaagcagctagtgcctggcatgatgaatttgctgctcttccgaagcctttagttgtggttaacatcggctggcctagaagtatgttctgtttactttgttaagttaatagaaggcgttattacatttgcatagaactcatgagctcccatattctttgaacactgaggcttttaccttattgacttggtttgttgttttgtctttctaaacaggtaactgtcggtatggagcagacctcgcaaaacagctaacagactcccttcttaatgtccttgctacctgtggaagtgtcagaattactctttcctacaaaacccctgcaaaggtctcttacacatttttctttttctacccagagttataactgatgttcttcttgagtttcacctggaactttactatccaagcaggtttcaagagtaatcttcaaagaacttggagataaccccaaagtttacatatggaatggccaaggtacctacaatccagagcaaattttgcttgagctttgtgcacaagtacaatgcgaccacaaaagtttctaatgggtttttaaaatgctaattcagaaccaaatcctaacatggggcatctagcttggggtgatgcttttgtggtgacagcagattcagtcagtctgataagcgaagcttgtagcaccgggtatataatatgctgacataaaccctttctttcttccaacaacttgaactataaccttagtactccttctctgctgcaggaaaccagtgtacgttgttggagccgatcactgtaaatggaagattgcagaattccaaaagtctttgagggagcgaggagttgtccgctcatttacaggtttcgaagatgtaagtatctttacattatagagctgtcttttccccttatttttctccatgtcaatggatcctgtaaaaaataagagaggtctctggtgggagttctgttatatcctccatgtcttcattggtttggttctaatggttttcttatagatgtcggaaagttggagttatccgccattgaatgacacagcagaggcagctacgagaatacggcgtgaattggctgcacgtggatggagtttacggtcttgaattatatactcttctttgctgtaccacttatttgcggaatcacattttgtccaaagctggagaaacagaagcctaagagaatcggatgttgtgcagaaagaaagaatagttgaagatatcatttaaaaagggtcctttta

SEQ ID NO: 63711 - DNA, 632 bp, Arabidopsis thaliana landsberg
aaatgttccctcgctgtattgtttctggctcaaccatgatactcaacattctacttgttacaaggagctcgcccacatcagggtattcaacatcgtcctccgagccatccgcattctcttcatttttatcttgagactcataatcaccggtggatgttatgatcatcacgcgattgttgggacattctctagccatgtgtcctttaccctgacatttaaaacatgttatatctctagctcgttgattatttttgaacttactttgttctgtttgagcttctttcgatgttgcaggtgcttgcttcttaaaccgtgattcaacttctagtgacttttccttatctacattcctcacagatggtatattccaatgcgacttggatcgggtagtagatgctactttcctttgaatgtgttgttcggcctgaatagctaagtggaggagatccctaaataatggtatggttgtctttctacctttctagcaatacggtcttgcaagccgtcaaggaattgtgccattagcgtctcttccgactcctcgaactctagacggttcttgagttgttcaaattcctcaaaatattcctccacactttggtttctctgcacacactaacgaaacctttttg

SEQ ID NO: 63712 - DNA, 182 bp, Arabidopsis thaliana landsberg
gctgttcttcgtttcgggcggcatagctgttcgatccgagcatcgtgctgcgcgcgccgctgcaactgcgggagacgctcgcgatcatcatcgtcggcaaatcgatcgccgcgtttctgatcgtgcgcgcattctgggcactctgcgcgcgacacgggatgacgatcggccgccagtctttc

SEQ ID NO: 63713 - DNA, 676 bp, Arabidopsis thaliana landsberg
attaaatcgaaagttagtcaattatagatgcataacgttaaaaaaaggatatgaaatatgtgtaatgcttataaaaagagattgatagctcagtgcagtcacataacattgcaggtgaaagaacattacattctaaaaattaaaacttctttatttttttccaaaggatcattgtatcatcatattatcacttccacatgaagtttctctaaagcaaatgatttctcttctcttttctagttggctttcgaatcaatcaccttcttagcaaaagagggcaagcagaaagcagctgagtgaatctgcaacacaaaaagattcaatcacaattcttaacaatgattcacacatttcgaaaatgattgttacactaactactttttatgtacctcagcgttgtaatacttcaagggacagtgtgatttgatagagctttcatcagtatcgattagactcactggcttcttgaaatcgacttgtggtccttcagatgaacaaagcatgaatccaatgactccactgcaaatgaatcacatacaaactcagatgtttgagatcaatgcaaacaaaaaaagcataaatgttttcaagatcaatttcaaggacctcgggtaagttggaacactggtccaagcgtagttaacagatcctttaaagatgtcacggcaattagaaa

SEQ ID NO: 63714 - DNA, 1842 bp, Arabidopsis thaliana landsberg
tagttaaaacaacattcgatcgtagtttattcatattagtatgtgatcaaacactcccaaacacagaaacatatatatatttaaagcatagatatgaccatctcagcttttatcttcttattaaaccgatatggttagctgaggattgactctactataaaagagtagattagtgatcatatcatactttcaccatttcttcacatagaatcgctcctgtaacttagctgcgagttctcaggttccagatactctgcgtcgaccaacttgggtgcatatcctttctctcgatggccctcgagatagcatttatggagagtctctttggaatcaagaaactcacttagccgttttccacatgaccttatataacgtttcatgttgtcattataatcgacgtaatagagcccgaacctgactttataacctttatcccactcgaagttgtccattaacgaccatatgtagtaacccttcagcctcactttgaccatcctgcaaagtgcaaaccatccattacataactacatgatacgacttatcattctgacaaagtcgcttagaaatgttagatgataatggcctaagatatttgtatgttatttgctatatataagtatttttagtagaaatatatagttaagtatattatacctgatggatttacccatgattaagatgtgactcttgatgaactctttcctcccgtaatcgttagtagcttccgttatgtttttggtcccatagtcgatctcgtccatccctacaatttatataaattagtataacttaccaaaaacattctaatcatcatactaattactcattcacacacatatgtatatgatatacttcattcattaccattctccataatgtaaatctctgggtccatgtattcgtctttgatatgtttcaagatattcttcaaacccgctggatatatcactatacccattgaagttgtctgcaaatcaggaagacttaggttattagtaataacttgaattagtaggaaaaaaaggatactcatttgaatttagttgacaaagttgacgatttttgtttgttaatagatatagaaatttttttaaaataaaatctgcgctttctaattttgcagcttaacatttttttaaagagtattaaaatatatgtcaagtgttttaggaggattgttaaagagtaccttgagatgtggtgaattgttttgactatctgcaaagaaccaaaaagaagtaaagcaaccattacttttcatagaaattaatgttaaaatgatattgtttcattttgaaagaaatttcttgaaaacggtcaaggttatagtacctgtccagtttacacgtaagtcggtctcataattaagctgcgatgaattgactttggcgagaggggtagagaagaatgctccatagtaatttaatccgacgaaatccaaagattttcttagtttctcagactcttctggtgtaaattcacgcagtcggatgtttacatcttctaacatttccgctggatactgtccatatgtgagagggcgaagaaacctgcccatttgtagttcagaaagcaagcatgtcacatcttatgtatgatcaatttaaacattattttaattaatcatggatacatactaagatcgatcccaaaggaaaaatagttaaaagaaggaagaaaaaatcaccagccgagttggtactcgagggatcgtcttgctgctttgacgtcttcactcgaatttggatctttgggctcgacccagtgagatcccaacatttttccatttttcccctcccccttttgggcctatttttgaccttagaaaaaaattttttaaat

SEQ ID NO: 63715 - DNA, 586 bp, Arabidopsis thaliana landsberg
  unsure (1)..(586): unsure at all n locations
gataagatgtctcatgcatattggttaatccattttgtttactattgtccatttatggtattggccttaattgtaagtcaagtccccacattttggaattctgatattactgtcaccatgactccatctcaggactgatgtaatggcaatagcatatgatcttacaacatctaagaagaacgagatacaaaagttaacagttttgctccaaagggtaagtaagctcaaaaagaaggcacaagaaactagtcatttgcttatgttgccatttcttaaaaataatttcttctcgtgttcatccactttccaggctgaagaacagaatcgccagaaggaagcccggatcagcatgctcaaaaaacaaacacaagatctctcaggcacagcggacagaatcgaaaaggtattataacttctttaattctcagaatcttaaacccagttattcttcgtttcaatcgtcctcaaaatgtcaaacgttntgcagctgaatgccggngtctcgggctactttgaaggaaaagacaagctacctccaatatagtttcgagaaaattgcaatgaagaagcgtgtcatttccattcc

SEQ ID NO: 63716 - DNA, 1352 bp, Arabidopsis thaliana landsberg
actttctctcccatttccagattttgatggattctgcatgagctgagcagagacttccattttccaacgttttcttcctcagtcatctcttctgcaacaacccttagagccttgtctagttgcccagctcggcctaacatgtcaatgacacaagcataatgctttaaatttggctgtagcccaaaagaagacttcatttgatccagatatctcagcccttcatggatcagaccactatggttgcaagccgttagaacacctaagaaagttaggtcatcagggttatgacctgttctttgcatctcttcaaagagttttatagcctcttttgctaggccatgtattccatatcccattatcatggcattccaagatgccgtgcttttctccttcaagccattgaaaaccttagatgattgtgttatagaaccattcttggcatacatatcaattaaagaacatgcaataaacgcatcgtcctccaggaggtgcttcaaagcataagcatgcgcttctctccccagtcgaagagaaggtagcagcgaacacgcaccaaacacaagcatcatagaaatcccacgaagctggattccatacaaaaccatttgtctaaagacgcccaaagctctatcaggaaatccattctgaaggtaaccggtgattacagtattccaagatactaagcttttatcttccattgcatcaaataatgcttgtacagtgcatagctccccacaatgaatgtataatgagagtactgataaataaacaaacaaatctctttctaaccaatttcggattataaacccatgcacttcctttcccaaccgcagggattttagtttagaacaagctgaaagaagactacagacagtaaaactatcaggtagcaatccagaaattttcatctgcaaatgagcatccaaggacaatctcggatcattgctctgagcatggccgccaatcaaagcattccaagagttcactgttttactccttataccatgaaacacacgctgggcataactcagtgagccacactttgcataagaagccacaaaggcattggctactaactcattgtatacaaactcttgttttaaggagtaacaatgaagttcctttaaactcgggaagaatgattcatggaaacaaacaggcactgcatttagaatggttatctcgtccgctttgacatcttcgccttctgccagcatctgtctcaaaacatcaaacgtcccatgtgtatcaccctctgctgaaaaacctcctaccattgtgttccaagaaaccacattcttgttattgtgcatcttaaagatcatttgtgcattagtaatgcaaccgcattt

SEQ ID NO: 63717 - DNA, 1190 bp, Arabidopsis thaliana landsberg
tatattaccgagtcgcgaacaaagaaaaaaaaaacagatcatgtcaaaactcacgggcgacgcacgtgttgtatgcgttgcatcattatcctgtcggtcgattcaatccaaatgcagatccaagtctcttaacgaattctcataaaacataagtttgattttatttttaattccacagatattaccaacaacaacacaaacgtcagagtctcaaatcatcaaaagctagatagatatacccgagagagagatcgatctacaaaaatccaattaaagatctataacgccttgaaagactcaaggctcttagaatgaagccaaagcttttcaacaacaacagcctcatagttcttgatcttaccaccaccatccctcgccgcaattttcagatcgtactttgtaccggagaccacttgcgtcgttccctccacaaccttgacgaaaaccaacttctccttcgactccttgttatgttcctcgatggcatacttggcgaccgcaacaacatccggatcagatacattcttgatcggcttccggctaccaagaccaccaccaccaccgagaccttccacgacggagacaagtgggaggaggatgagagagagacagatcaacgacttcatcatcatattttcgtttccttaaccttttttaattttcgtgtgtttaatggtctctggtgtttattatatagacaagacttgtagatttggttttgctttggaatgtgggctgatagttccagaaatttacggagatctcaattgtgtgttacgcggtgacgagtgaattgtctttttacaccgtcagatttgacaactggataagtccacgtggcgaaagataatgtacaacatgttaaagagtcaacgagggttgtcccgtcacgtgtactcgtagtggagcagagcactaaatgggcccatatatgttgatttgggccaatctagatttgcgtcggcaactcagtatttgtagtacgacgtcggttttgctctttagtcaagaactatgttcaatgttcattccctgcttcttaatagcctggtttgactggttggcccgttgttttattccctagggtggaaaaatccacaaccgttaaaacccaaaccatggttaaattgatttgttattgcatttaaatctctctaaattaatatccagtatccaatataatgttcgtt

SEQ ID NO: 63718 - DNA, 544 bp, Arabidopsis thaliana landsberg
aatttttttgtcccattttaattgttcctaatagtaaagtaaacgtataactacaagcctatatttattaatgcagtattattatgaaatcaaatcatcacctgaaagcgaaacatagtttttagccagtctagcacgtcttcatcgtcattgatcttgagacctatctgccatgttaagacacttgtgtaacgaattgcctttaatacagctacaatctgcagagtacataaatgcaaatattgatgctttttttttgtttaatttaatcaaagtggcagtttaacagaaaaaccacgacattaatctatgtaaccttaggatctctcatcatagcgtgatttttactatcaggatcgaggggaagaatattgtgaggcacatagattgtgatttttgcttgcacctcggcatgggattccaaaatctacgtgcagacagaaaaagaatgaacgtaaacatcgaggaaattaaagatatgttaatctcgctagtatcagatataccttagcagccactttgatattagctttccgatgaacag

SEQ ID NO: 63719 - DNA, 648 bp, Arabidopsis thaliana landsberg
ctgaccggcatggcaccgtgatcaagcacgacatgcgagatcggctgcccgcgcaacagccactcctgctccggcaacggaacgggtcgcatcggttctgctggcggatagtgcgccgccacggacggcgccatcagcacttcaacttcatacgcagcagcattgcgggcctgaaatggcttttcataattcaatgtaaaactttcatcgacttccttgagtgcgtccatgatcggtgcctccttcgcggaagtgagcaccagcggcgcgggcgccgaccatgtcatgtcgagatcgttggtcgagtcatagccggttgcgaaacgctcgcctgcctcgatttcataagccgccatggtgttggtgccgaccaccagcaaggccgcacccaacagcctgcgctcatccaccgcgcggagaatctttccggccatgccgtcaatcagcggcaatcgcaggctgcgatagatcctgatcgtgtcagccatgccgccaagtacagcgcgtgcacgttcacgctgctcgcgttcctgcgtgtaccgcgcatggagcgcttcagtttccggcgcacgcggacccagagagcgcgaatcgccacgccgggtgcgcgcctcgtacaagtagtcgcgtccctgcgagacttccaca

SEQ ID NO: 63720 - DNA, 1874 bp, Arabidopsis thaliana landsberg
tcttttaaaaagaatccgtcattggcatagtttaccttttaaaactgcagaatctttgacattattagttttgtcttgcagagctgccaaaaattggtcccatcctgccagaagacattgatcgagctctgagcaacactcgaccatcggctcatctgcacgcccatctttacgacaagttcaatgatgattatggtagccaaattctcaagtaaattcgatgtaatatatacatctatgccatctagaacttgctcattatttgtatggaagcatccaaattacggatgctcaatgaacttttctgtcttaaattatgaataaatgctcctagttccttgggactcagtttcagcgtatgatatctttggggaatgtttttttcaagttggcttcttggtctctgttaaatttgggagtctctgttacacgggtcgtctttgcttgaaataaaatgagagtataacagcaatgagacttaagctctagtctgattggtgaccaaaatttttgtatgcagtagaaaaagtaaggactcaagatgtgttatatataaaacaactgttttcactcggttctctccggaccagactttcccttttttgaccgttttcttgacctcttttgtgtatcgctcccgccttctttcttttcctggaaacccaaaacaaatatcgaatttgtgtcaacactggaacattttacttgtaaacataatggagccatgtctctaatgttaccttttgtgcattagagttagaatcggctttggatttggattgaggattctccttctttttcttcatgcatgaaagtgggtttggaccctgcagagttttgagacaacaatgttagtttctcctccattgctacttcatctaagactaaaaaccaatggattctaacaatgatactacgattaatttccctacctagaagctactaattaaatacgactaacgttgtaaagagagctgttcattaccttggctctatttcgcttgaactgaggtctatccttcacaccaagtccattttttgtagaaactactcgaggcattccccattcttcatttgcaattgttgcttcttttctattagaagctatgattttcgcagtctgtttcaccaacaactttttttccgtatcggtcatagttaagcgcttattttcagagtctttggcactctgacgttggaaatcagaaggttgatcaatcagcagtatgttccttagaccaaacacaagaggaacgatagactcctgaaagaggaaacaacacacatagattctttgtattaaaaactctaaaacccacacagtaaatccatactctgatacaaaagaactctgctcatcaaactaacctgctgaagctttctcctaaactccgcgtcctgagtaccaaggaagaaatgctcagtattttgtacccctattacctctgacaaacactcgtctgctgtttttgcctcctcgtgctcacatctaaaaactcaaatcgaagcaaatcaatcacacaaacatcatacaaaattcatgtctggcacataacaaaaacctcactttctacacattaacctcattatatcagttacacaaatcaatttcatcatatacactatacaaaatccagcttggaacttaaaaaccctcactttctacacattaagctcatcatatcagttacacaaacctcattttctgtacattaagctcatcgtagatgtaatacaattacaaactcaactccaaaccttatgaatcaaattcgaaatttccacaatctactaatcaatcacacattcaagtaagataataagaaaaagggaagcttacgttgctgtattaagcgtctgggcagctcgagaga

SEQ ID NO: 63721 - DNA, 1514 bp, Arabidopsis thaliana landsberg
  unsure (1)..(1514): unsure at all n locations
aaaaaagttggaaccacaagattcccatacaactaactctttgtctaaagaactattattgatcctctgattttcgggttcaggtttggtatgaatggtcggtgtcttcacctactccatctccgatgcataacaccaatggccgttcgtactgggttggcctttaggattagagacttttgactgatgacgaaaaagttatgtaatcttattgtgctgtatttttgtcacaagaaagactaaagtttacgagtgaatcaaatctctcttgaccttatttatgtttgtactttttcagtaatttcattgcacttttaatacaaagctatctctttcatctcaaaaggccaaagtatacaagtgaatcaaatctattttgttcatttaattgtttgtactttttgcagtaattcagagctatctctaatacacgctgtaatctcaaacggccaaaacgacccaacaaatcctgcctcggccgtttgacaaaacattggtaatagattaagaagttgcgtttaaggagttccgttgctgttttttaatccattcgtcgtaatctttaagtaattgctgaagcagaaggggaaccagtgtatcgaccagtgtctgcattactctgcaatcatcgtatcaaaatataacattactcgggcacttcgagccaagaagcagaagaaatgtaaaacgaacaataatgtacacttacagattcccaggagcctcaacagctgatactggaagcattgtgaacggtcgcgttgagatctgccatgaacaagggggattttgatgaacataggaaacaaagctttttcatatacacaaaaccgaaatgagaatcataagtcgacatgacctatccacacaatgatggatcacagacaaccatcacggtgcagtgcagtatttgatactcttaaggctaataggattgcacgagaatgaagttatgaaggaatgaaagaaactgaactgcaatacactacctctagagtgacattcaatctcacgtcaacttccaaaaatggctctggatgttccatgttccaagtcatgcagtttgtcattattgctgtgaaccagaaatgggaaaacacttgtattacttttgaaacattagataccaagtgcttttcttcacaagaggaaagttacctgaaaacctttcactttggttctttaataactctgatccttccaactgcaagacagtggttcaaaacatttgtcggtaaaaggaaaacaatagaatatatatctgctaaatcagaacgggagtcttcatcattcaaccttgcaggaaagcagctcaacagtacaatcttcctgtgtgggagtgacccttaaaaccagtactggataaacttcaaaactcattaactgaacttttggcaatgtacatctgcactgtaagacaaagatntactatctccctttccagatagaaggcatatttccaaatgatgatgctaacatattagaaaacatctgacangcttgtgactggatat

SEQ ID NO: 63722 - DNA, 312 bp, Arabidopsis thaliana landsberg
gagcaacttcttcattctcttctccatcctcgggctcttcttcttctgtatcattactgaaatatttacgggtgagtggtgggcatttagatttcctccttagaaggaagttcatcagcacgcatggcctttgcaaccccttttggtatccatgaaaatgtagttatcattctgcaaaataaatttacaaattgaaaatcaattaggggaaagaaacatactctctcttttttagagggacagaaatccctaacgaaatccccataataacacgacacatcttttcaaaaccactcaaaacaagaattgcca

SEQ ID NO: 63723 - DNA, 1963 bp, Arabidopsis thaliana landsberg
acgtatatgatgaagttggcataggaggtggtgcttctggtgtttctggaggactcctccatccttattctcctattggtagaagaaattgtcccctttggtgattattgtattgtttcataaagattcttactttatgtaggaaagctactttggcatggtgctgagtgttggagagaatgtttagagctcttaaatgtggctgaaacagctgcttcttctagttaccaagctacggagaacagagactttagcgagagtttcggaaattttatggttcgaagaaggtaccaatctcaataacactaataacttgaaatgttcattcaatgatactttagtttgaccaagttcttcttgctttaggggaatcttgagaccagcaacaaatgccaagactttagatttaatgagtgatgtaagtttgaactcgacttagatacctttgaaatattaactaaacccgtagttttactgtttattacttatgcgattagaatgctcgaaactgtcttgctagttgtgtagtagagactattgacaaagatggtgcacaaaatctcgtccccaatctatacctgcctttgaactgcgccttctattttccaggagctatgaatgttaatccgcaccgatatctccaggttaagacaacacaaatatgttagcaccaagcttttgcgtttttctttaccgagtttttctcccttctctaggcactctttctagcatgccagagctcagcaaaaacatcactgggaaggaaaaacataactttggtgaacaagtctataactgatgtgcttgaacttgaaggtgaatgattttgaactatattcttatatttttgtttaattctggaacttgcgtaagctttatagaaacatcctccaaccacaactagtccttttggatcaagtttcacaggcatgaaaactgatgtgataaacttaaatctagagaccgtaaacacaatttagatagccgttaacaatccaagagtatagtatccatgctttttctctgaggttctcatccgcatggtcagaaatttagtatgaacagcttttgtgttgttatatgtaggaggatatgatgcagtagtaatatgtcttggatccaaggtagactttcttccagggcttactggaaagctccctttaaggacatgccgaggtgtcattactcatatgcagttacacgagagtgccaggtattgcgagaccttgcgcctatagttatccattcctagtattctttttcaactctgatgtcaactttacatcctatttcaattgtacaattcttctctgtttttttttagtgtgagaccttccaaaaaaagaaagtatgtgttgatgtagtcgcatactcgcacattactatgttgagctcagctacttatctttgtggtttttttttcctgtccaaaagcttttctttattaaatcatgcaatgcacaggaagttacccggacgatggaccttcgatcttgtcagatgcctggctcgcggctcagggaccccgtaatctgcacatgggatccacatgcgaatggcaatcatgaaattattcatcggatgtcccagcagaggaagcttcaagagctctcaacgagcttcttccgaaagcaagtgcagtttatccagacatagaaaagtgggaatttgcgggacgaagggcgggcttgagagcaatgccacctgtcacaagccatggatcactgccgctcttgggatgtgttaatcagctcataggtgctggtcagttttgcaacttctgggtattttcagggctcggatcaaggggactactctatcatgcttggcttgggaaactcatgtctaaagctgttttaagttgcaatgaagaattacttccttctgaactaacttcttggaagaaaaacacactatgagagcaccattgtctacttcagagttctcactcttgtttgcagct

SEQ ID NO: 63724 - DNA, 2924 bp, Arabidopsis thaliana landsberg
  unsure (1)..(2924): unsure at all n locations
aaagagagaccaacttgagcattaccaatcaaaccaactccttgctccaaaagaatcaatattttcttggttgatttttctcaccaaacaaaatttgagttgttttgtgtcctagcttcttctgtcatgtaagaaatcagacattaatgcatagataccaaaaaattcctttaaatagtaatgccacaaaacatgacacaatgcagagaaaaatcaaagaaagattaaggaataaaataaaggaaaattaatggaatatcaaaaaaacaactttgttagctccgtctttgagttgttcatctaccaaaagaagactgtccaataaaataaaaacacaagtcaagaacaacaaacctttcgtgtcggcaaccataaagaagaaatcaaaatcagctcatgaggattgccaaatcaagaaagtaaaaaacgcatgagaaagattttgggaatcatcgaaagcataaaactttcatgcagaagaagagttaaattaaatagacagagcaaagcttatgtgcaagggagaggaatggacataggcattgatgggtacacttggggaaagggagagacttttttgtaacattatattttggttatggggatatttaagggaaggtgcctaacttcggatacattcattaatggcacatgaaaaaattactccatctttttttggtaccagtcttcttcatcacctgcattttttatggtttcttaatctgaacaacatttatgaaatggtcttttagttataccggcatttattatacaccgaagacaaaacaaatagatatacaaattaatcaataaatgggtccgccgcaaataaaaatctatgcgttatcttctgatgtgtcatgtatatataaatgatgcgatcacctaacaaagacacactttgtactaatgaagttgattttacattaaagatgttcatgtcanctataataaaccggatttgattattacattaagatactcaaatcggcctttcaagaccttttagttgggccagaagttttaaggagatatgttgttgaattatttctatgggctctctcggatccactgtagaaaccgatagacctctctcattcgatcatttcttcttcttcttcgtcttcgctgcagcctgcatctgttgtttcttctagactttgcaatcacagagatagtgagtgagatagagagagtgataatggcgagtggactaagcgagatcgggagcacgaagatgttcgatggctacaacaaaagatacaaacacttcagtgagacacttggatgttccatgaccttttccatctacttccctccttctgcttcttcttcccataaatctcctgtatgcaatgatattccttcttcttcattactttgatctaaatttcttgttgtagttttcacgattcatgttctgaggtagagatttgattgtttctacagtaaaaaagggctcttttgtgacttttctcaaattttcactcttatcttcactcatctgatttcatgtctctagtttgaaccaagtattactgatatttgtgggtttctcccatatttgtctaaagacgaaaactttaagttttgcatgattggttttgggattttttattgccttgatttcgttgggatgccaaaacaactgattggatttttggatgaatgattctccatgttgttgattgacaggtgctttactggctttctggcctcacctgcacggacgagaactttattatcaaatcatgagctcaacgtgctgcttctactcacggcattgctcttgttgctccagacacttctccaagtgagccaacactattttcatttttttgatttatcatcttcccttgatgtgtatttttaacactctgtgatggttttgatattgtaggaggactaaatgttgaaggggaggcagacagttacgactttggtgtaagtatgcacacgttacatgcttctggtttgcatttcacacactcctttttgtagctttggacctattggtctggtctttaagtattcagttaatgatcaagggtgataaaatattctttctttcctgtttgatttcgactaggagccggattctacctcaatgctactaaggaaaagtggaagaactggcgtatgtatgactatgttgtcaaagagttgccaaaactcctgagtgaaaacttttcccagcttgacacaacaaaagcatctatatctggacactccatgggtggacatggagctcttactatatacctgaggaacctcgataaatacaaggtattcatttcaaagagttttcttgtggcaatgcaatgtgagttagatgcttgaaacgtggaatctcaaatctaaagatagattgtctttcatggtggataatgtgcttgaaccaaatacttgttactcctatatcattcttttaatttaaccacttcatctgtgtaacatgttcagtctgtatctgcgtttgcaccaatcacgaatcccataaattgtgcatggggacagaaggcattcaccaattatctaggtgacaacaaagctgcttgggaggtaaaaccaacccaaactaaaaccattatcatagttccttttccccaaatttgatgcattgttccttttgtaaatcttcaggaatacgatgccacttgtcttatttcaaagtacaacaatctttctgcaacaattctaattgatcaggtaaaaccccttttaccatgtgtttttgctggtttatctgtcttcctttacgtggagcctgaaccatctttgcttctacctatatatagggagaaaacgaccagttctaccctgatcagttattgcccagcaagtttgaggaggcgtgcaagatagtgaatgcaccgctcttattgcgcctccatccaggatacgaccactcctactatttcatt

SEQ ID NO: 63725 - DNA, 399 bp, Arabidopsis thaliana landsberg
cgacgacctgcatcccgagggcaccctcgaccgcgacctcacggccctcgaactcggccagtcgcaggacccgttcggccggtgcggcccggaacgcctcacgcaggcgggtcgcggagtcgctccagcgcgccagcacgtcgtcctgggcgaggacgggtgcggcgtaagccgccagcggtgcgtcgccggcgcgcaccgcggccgcgaagccctcgttctggccgatcatgtgacccagcagcgcgccgaggtcccagccctcgcacggggtcgacgtagcgagcggcgcccgggcggcgcgccgcacccaggcgtcggcgtcgtccagcgcctcctcgaagcaggccagcagggttgccatcgtcataggtagatcatacgcgcatgtagatgatc

SEQ ID NO: 63726 - DNA, 568 bp, Arabidopsis thaliana landsberg
ggcggcacttcgcttttgggaaggcatgactcgatcatgaggtccatatgacgctaacagttatcactatcgaaaaataccttaacttttagatcatataaaaaaagctttctgctgagtatagctttgttcatgtgatcatatcgacatatgttgtctgtcatgattagaattaattatctctgataataattatggacttgtacgatcatatcattctactagtgaatgctgaatcaattgctatgttactatcttgggaacagtgtttaccattgagatatttttaagctcttacggacttacctgctatttgtaggcagctgaagaagagcatctgccgtaagagtatgagagagaagggaagaagttgcctactaaagatggattctcaagttattgactctaatgtaattactcctggaacagagcacatggctactctgtcctttgcgttgcgatactacattcacgttagactaaattctgatcctgggtggaaaaatattaaggtcttaattactggtctgtgatatcacccttgacgctgtatacaattcacttcaag

SEQ ID NO: 63727 - DNA, 3242 bp, Arabidopsis thaliana landsberg
  unsure (1)..(3242): unsure at all n locations
atcgttcttgaaacgaacgtttttaaatggtccctagatagttgatagcttggtcgaggcatatgagctcacgaatccataaatttgttttacacctccaaaactctcatgagtctaggcacgagacagtaaaataacagaaattgatattatgactgaactaatgcactatagccaattggatactggataaaagtataaagtaaatatctgatgagaccagtttacatctctatctctcgataactcttcgactgtttctgaaatcaccaacgtctgtgtctttaccatcactatgcccatgccggtttcctcctcctcctcctcctcttcctcctctgttagatcccctgaaactacctgaaccgcgtcctcggctactctttctatcaaactcatcatcaaaaccgcctcttctgcttcccattcttcccccaaccccgccactatcttctctgttacctcttgatctactagttgaggaacttgaccctctgtaatcttcatcgtcactatcaaaactactccttctgcttcctgttcttcctcctctccctcttgatctattagccgaggagccatttgatcccctgtagctatcagaggcaaaattatcattgaaaccacctcgtcctccacctctcattcttcctctacttcctctcgatcttttaccagagaaacttgaccctctgtactcttgatcatccatgtcatcatcagattctgaagctgaataggagcttcgttttcccttgaaccctcctctcgcaccgttgtttctttgtccacgcctcaaaccggacctgggactatcatcctccatatcagaatcgagcccaaattcttcgtctgacccaaaagtaagttttctcgaaggtggacctctctgggtcgaagccacatggcttgacttccacctgggattggcggaaacctcatcatctgaactaaaaccgagctcatcatccctagagaaacctcccttactgtttccatgcttctttccactgttgtgaaagtttgaacttcctcctctgtgtgcattaaaaccagactttgattctggaaacttttcatcctctgagaactcgtcagaagcaaaagaagatcgagctccttccactgggacatctctctctttagattcgtctatttcatagctatcaatgtcatcttcatcgtcaaaatcatcaaacccaactccaggtcttctgcttctgccaaactcagaactttctcgggctcctggaggaagattaccaaattcttcttcaggatctctcaaaccctcccggagaaggttttcattctttttactggaatccgcatattcaaaagcagcaacttctgctccgtctgattcatcgtcatcaaaatcaaagttccatgcattggaaacatcatcccgtttcacaaccctgtctgtttgtgcttcagtgaagcgataagtttcttgtggtttgttctctaggatagcatcagctggacgcttgcaatcacaatgaaaacatgccatgtttcttctatagtttaagaagttgcatctgtcataaaaacatgcaacatgatcagttccatgacataaaaattcaatcagtatccttattctcagattcgacatttcctcaaaagtgtagcaacttactcagggcattcccattctcctggaaggagctgtctctttggcctctttgcatcacactgtaagcaaatcgtgttctttgcaaagttcatgaaatcgcacctaagaacaacaatgaagtggtattaacatctcaggaaaaatgccaaacttagaatataagacaaaagatgtgcctagcttctgctgaaattaatgttctatgcaagatttatgatttgttaggcctcaaagtccaaaatttgataatctaactggagaacgcttataggatttatcttcaaccaaacctgatgctctatgtaaaatttattagaccacatctcaagctaataactaatcggtctggatggctgaaggatcaaatgtagaagaagagttatgtctcacctaacttcatcaataactaatatgcattgtcacgtggaaaccatgatatattctatgatcgacgccttggactcggaagactctttcttagtattacaagcagaacagggacaaatttatgactttgtaattctaagcctctattcaaagctaaggctatgcatctaattttacagttggttaagctaagactgtgatataggcttataaagaaaaccatgaggtcatcagatgagcaaaggtgtgacttactttgggcatagccaatctcctttcttcatctcaacatcatcacggccaacacgtcgtttaggagttggcggtggctgcttgactttagggggcgctcttttgataactggtggagtgagattaggatctattggtacagcgcttaacttgacaatctcatgcagcagtttacgcaccacagacttaacagactttttcttcaggagacttttgttggccactgttccattcaatgggtcaaaaccataggtgaacaaaatgcgcataaggtcaatggttcgagcctcatcctctttgtttgtcaacaaaaatgccttttcgcatgagttcctcaagctgcaggaactgcagacctgatatatgaatgaatattatcatctgaagaacctattgatagtaaaacaattaggaannnnnnnnnnnnnnnnnngagggagtaaacagtaagcttaacaaagaagacttcataaaacataaaacagttatgaaatcatcttctatatatgaatcaacgattaaaatgtagaaccaatgaccaaagaatcaaaccctgagaaagaaccaacgaaatttcaaaatcctaagctcccacacaatatgaatcaacgatcaaaatgtagaaccaatgaccaaagaatcagaccctaagaaagaaccaacgaatttcaaagccctaagctcccacacaaccaatgacctaaagactactaatctgtccttccttccacctatttgtactatccattatttttcactcatatgtgtcaaacatctcacaatctactgcctatcgaaatcacagttttaagagatccatagcaaaccaaaaactagagatatggcaatgacattgatagctaggcataaagatgaatgatcaaataggtgaaagtaatcaattttagaattactgaacccacacaagttcatacgaaagtctttcgtatgcataact

SEQ ID NO: 63728 - DNA, 1767 bp, Arabidopsis thaliana landsberg
ctgaaaataaaagcagagacgaatcaaatctcaaatcacaaagacaaagtcttcaccattatgatcaattcttaactataaagagtcctgaagatcttgcgcaagcacccaagtaacgtaaggcatgttacactgtagaatataaaaacagcttcaaacgttattgtccctttaaatggttttgagctataagtgagtatcattaccgttcgacgggagatcctctcaacgtagttgtcaaaaagtatagttacaatcctgagacaaacatacataatatatgcgcatgagtatcttatcataatgagatcgtatgttctataaccgcttgtttttaccataagagaagagaaacgagaaagactctagcgattgagctcgtggtgcttcgaatatttgtatgttttccgtaaaagagacgataacctaagtgaacgccaagaaggtacatgccccaataacctggatcaaaacaaagttagatgaggaagaaccaaaagagagtagtaaataaaccaagtcaaaatcttaccaagaatgctatatactccttccttgtttttgctgataatgtcagttcctctttcgtccgaaagcaaatatgtgttcagtccactaagcaaccaagtttggtaccctgagaaccatggaagttgaagatagttaggtttcactatcttgtaattaagaaagaagagaaagtgaaactgaaatatacctgcaagaacagcgaaacctaggagtccacagtacttggctggtatgttaacaaacgatgtgagaattgatatggctgcaagtgtgaaaaagaaattccagtgtactccatattccgtaacgtggacctgcatatagttgataaccaacgatattaagattttgtaaaacgagaagtatttaaggcagaaacgcaaaagcttctttacctgataatccacacctgaagtggtaacaagacgaataaacccgagtaatagcaatggagcggttgctttaattccagttatccagtttctgaagaaatgcaagtaaaaattggactgagtttacataatgctgaactagtaacaaagcttcacaaaatggataatggagtttcaaaggggaatccacaaaccctgatgagacgtctctagcttgccgagaaacaacagcattagccaacacaaaagagccaaccccaagatccatctgttttcatttcaagttgtaatatacatacaaacacaaagttactaactgctttaagaaggaacaacattaatatagacaaaaaaaatgagattagacattgtaaacataccaagctagtaccataagtctctgtcttggcataccttctgggaaagatagtaaagtcaacagccaagatacacaagcatgtaataagcatctacaaggaaaagatcattcagagtagatggaagataaaagcagagttggcttaaactaaaactaagcagtgtcatataccagagcaactctataagaagatacacttgctctaaacgagagagactgtcctctctgcaaccctgaaaaagatctagttataaaaccttaagttagctaaagttaaacccttaactaacaaatgacttacaagttataccttttggcagtcacagaaagaatcagtaccaacaacgacaacaagactgtcccatgataaacccattctgatagaacctgtatatataagttttggtgatcatcagagaacatataaaaataggcactggtgagtcaaaaagtttgaagagagcg

SEQ ID NO: 63729 - DNA, 517 bp, Arabidopsis thaliana landsberg
  unsure (1)..(517): unsure at all n locations
agccaaacacccctgaggcacctccccgaggcacatggcacatccacgattataacctgatcaaccccaganaaggaaaggggcgaccggggaagttgaaacgcggcaacagcgcgcccggcgaaccgaaaggcgacaacaaccaggaacacaggccacgcaaaaacgctcccgcggagaaacaaagcaacgcaancncaanannccaacggggagnccccgcgacgaacgggacgaaaccacgcagcacgggagccgcggcancgggcgacacgccggcgggccccggcgccagcgcgaaggccaaccccaangaggacctaccgaacacgccgaccgccaagggnnacctgaccgaaaaagaagggaaggcgaacgctgaagcccagcaaaaggaaaacaagcaaacgaagaagcgccggcagaaccatgtcgccgacttcatcgacaacgccacgttctacggcgacatccgcgcacgctatgaatatcgtgaaggcgaagatgctgccaacct

SEQ ID NO: 63730 - DNA, 2678 bp, Arabidopsis thaliana landsberg
ataaaaacagcggttagatataccctacaaagacatatttagagtagcattagagatttacagaggatttcggttcatagatttttaactatcagatagataacgcaaagtggtaacaaaggaagttaaagaactagaaaagaatacactagcagaagattttaagatttctctttcttcgtaagcatccataccagatacacccttgaaatcaggcgattttgcttctctttgaacatagacacaaccaaggcatttgctgtcagacaaataagagaggagatataagtttgagatgaacgctacaaacgaataagagaaacaaggacactttaaagttgtgatgagatacaaagattgtttcaagaacttagataagtcattcagaactaacctaatgaggccaacaagaggaagtttggcccactgatctcttcagcatcaaaatcatgaggggagaacagacaaataaatgttaatgtcattgccattaaagaatacccaaaatttgaacttcagacagtagtttaacagagctatgatgatatagcctatttctatcaactaaccttggcaacaaaacttggaaaagaagcagacatatgatacaaaatgtccaagtacgaaacatgattggacacaatggctccaggtctttcaggttcctccgtggcggcttcccctttctggttaatctgcagccaaaagacagaacaaatgaagataaaagacaaacgccaacccatcagtgggaactaaacgttaaatcaatttcagtaaaaaagaggtcccataaggacgatcacaataaatagtacagcaacctaactactcctttgagcaaaatcgtcgtaccaagccaataaattgccccaaaaatatatcttcttacaacaaagtctgacactttttaagttccttataactaactatccaaacgtagaagtacctccaacactatcaaatacaaacacaataaacaaacgaaagcaaaaaactttagctggtttatgagacttagctaagcttatacctctgtagaagtagttttaggattagaatccatgtctgaatctcgatctggacagctctcgtgaatccaataaaacccaataacgactagcaaaaccctagagagatacctcccagatcggacgataacagtccgtttccaaccttccatgtgagcataatcttcctgaaaaacaactccactttcattttcctcttcctctggcccacgataaggagcagaaaacagcgtaaataccctacaaatcaagtaatagagaagcaagatgctcatcgagagaagaaaccgcaatggaacaagagtcaccaatgcaaccgccaatttaatattctccgtcatcgggaaaggacccaaacccatcgtcccatacaaatcggtcctcgcgtaaggtgcgaactttttgtctaactcttcaatggcagccgccaaatcggattctgattttagtaacggccggtcctctttgctcgacggaggattcgaattcgaattcaaatctttgagctctgattccattattgttttcacctaacctaaaaatctaatctttttttggtttttttttataaggaagagagagggtttcagatattgaatcacacaaggaagttcgtgttatgttgggatgaagaaatagatcgcggatctgaagaaagtgtcatccttttttcctcgtcgtctctagatttccccgtgaagatttcagctttcgcgcacacgtagattcgccgtaaaaggtaaacatgaaactaaaacaagtgttttaatcctgtggatcaaggtccatggtaactctaatatacgctcttctatcttaaccgtcagatagatcagtcggaacaaaagacggaccacacgattggaattttttattttccagataatatcaatgagattttccttatatttcgtccatcttatttttgtcttgtttttgttgttgtagatgttttttcttatccaaacggaaaattcctttgtttgattaggatataaattgcgttatacgtatatatttatcttcttctttttcatttttttttttttttcattcataattttgtattgaaaccaaaaggtaaaacattacaaagccaaaaaggccaacacagcacgcaggcccaaagtacacagcataagagaaaaacagaaaggccaaaaggagcaacagtacaaagccaaaaaggccaacacagttcgcaggcccaaatacacaaaaggaaattaaacggtcggctaagtggaactaacctgaagagaccaggaagcccaagaaagcacgcaggcccaagcaagcccagaaaataagtatttatcttcttggataatattttttcagactgatgagaaaatcactagtagaatatacagaaaataagatagaggcataattgttttctctcttagtgatacaaagaaaatgtaaaaactaaaaagtttgaagcataattttgtttttcataaaatttatacaaaacaatactattaaattatcataggtaaagataataaccaaatgtaacggttttacttataaccaggcatatatacccataataatatatatatattttttaaaaaaataataacccaaaatcacttgattcatttcgactacttatataagttaaattcaatataattc

SEQ ID NO: 63731 - DNA, 588 bp, Arabidopsis thaliana landsberg
  unsure (1)..(588): unsure at all n locations
gattcacttacattgacattttaatttgtaaccattaatattcgattactttgaagtaatttaattaacgcggtattgtagaccagtagtgtactttttgtccactagctgtaattagtaaatgataatcaaatttcaatattggaaattaatgggaaaaaatgacatcctacgagaaatcagtcgtattacagtaaattgttagtccatagatgtggacgtgtgatacataattgtaattgattttctttttagcagaaatagaaactgctccaattgtgagaaaaaaaaaaacacaattatacaaggtattatagtatcatcaagtaattattgttgtttattcaggcaaggtttggaattacttaaacaaacaagctttttgcatttcaatcaaacttagtcatcgacgcgtctagtgtcatggtttaggtgactttagaagaaacgtaagtatatatatttttcaacaagatatgaccaaataaatacacgaatggtcttagtttcatttgttaatcacatatttgaagtaaaatatattgaccttttcctcgttngctgggaatgagtcaatgactcaccaat

SEQ ID NO: 63732 - DNA, 510 bp, Arabidopsis thaliana landsberg
  unsure (1)..(510): unsure at all n locations
ggatcgtcatatatttctccatgccggagannnnnnnnnnnnnnnnnnnnnnnnnnnnnnnnnnnnnctaggccgtcggaccacccggatagaagcggcgcttttccggacggaagccgacgccgggaatgccgagcgccaggatctggctctgctgcttcggcgtcagctggcggcgcagccaggcgaaatgcgagctcttcaccgaaagcttgcgataggtgcccttgacgtcgagatccggcaatacggtcgccagcttttcgatcgcctcatcggcatcgacgatcttgttcggctcggcaaacagcgacaccgtgcggatgtcggtcgccagcacctcgccgttgcggtcgagaatatcagggcgcgaggccatcagccggtcgggcggcaggatcgaggaaacgacctcgggatccttcatcgcatattcgacgagacggccgccgatgacgccgtaaagcgccgtgaagccgatgaatagcaggccgacgcggcttttcggct

SEQ ID NO: 63733 - DNA, 441 bp, Arabidopsis thaliana landsberg
gtgattattttgttgagtgtcaaagcatatgtagtcataaatggacgtaacacaaaaacatcatgcgaaagtctctaaaaatatttgaaaatttacatttaagattcacaaaaaagccagttgcccatatgaaaagcccgttaatataaatcaaaacaatgtataattaatattgtggaccaaatggtccattaatgcccaaaagttctgtttcggcaagtctctctttaacgatggacaatgacaataattgataagtgatgacctcggtgtctccgtccctgcttccacatccaaaaggtaagcgacttctaaatcttctttttttctttaagtttcacagtttaagacatcgatcaaattcttttcagatcactggattcaatccaagccaccatttttgtcaggtaaggatctcgatttccctttgtcctatgggag

SEQ ID NO: 63734 - DNA, 2129 bp, Arabidopsis thaliana landsberg
atgtttaaacaaaagtagcactagttaatgttgtaatctgtaagacttggtcaaggttggaggaagtcaaagtcttggtgccaaaattagcgagtaggataattgagagcacactaatgtaataatataatggggccctaatgtagttgatcaatattaaatgatgcaagtggtggtttcatggaccgtgtttatataagtgtgcataaaaaacacaaaagagctcaattcacgatttgggagaaagaactaaaaacgccaagaaaataaaaaaagagaaagaggatggagaaagagttacatgaatccaaggtggctacttacaccgaaagaggcattggatcacacgactcatcgcctgaaaaggagaaggaaaaatctcataagcatagaggattattccacctccatcactcaaaagatgagaaagatggagacaaaaagaaagaaggatcaaagagagagaagatagctgcagcaatggttggtcttggagccacttttatgaagaagaagcacaaaggtggtggaaaaaaggaaaaaagaggaggaggaggaggaaaagaggaagaaggaggaggagaagaggagggagaagaagaagaggagtcgtcttcatcggaggaggaagaagaagaagaagaaggaggaggtggtggtggagatgaagaagagggaggaggcaagtttagtgctttcattacaatgatcgccgaagcctttgaagaatgaaaatttaatttgtgatcactttcttgtcattttttttttttttcaaatttgctatcaaattatagcatttgtaatgttttatatgggatgttgaattgaaaagttattttctgtataatcttttgatatgtatttttgaaaggaactcaatatttggagtttttcttgtggcaatagataaaagaaatatgttatataaaaatgcaacttcgtgacgacctgttcgaatcttcagcactaataagacagccgtttgttttatgttattggatcgcaatattagattttagctttctatgctaattaaaaatctacttttgtggagttgatcaataaattgggtgcaatagtctacttttgtaggtctctcgttaccttgtaggttgaagcctcaagtttctaatctaattttggttgacttaaagatctattttcaagtctggtttaatcgatcatatagacgtgtagttacataattgatttcatctggttgacattttaagtctacatgtaatatttttgtttttttgaaaaatgatgatggttattatatcatcaatattcacttatctttttcatatcaactattaagataattccacaattagtcgtgttggagatattgcgatatagaggtatgtgatttgttttgaagtcagtatcatacgagtgaaaaatatatatacatcaaccatgcgttctttgcggtgaactagatgaaactcgtgaccacctattcttttgcgtgccctttctccttcgcagtttggtcctcactagcaggaaagctgcttcgacatcgtttaactccggattggggtgacacagtaacgacaattcaatgtcgtacgtgtgataacctccgagatattttgcttcgtctttgcttccaagttgctatttacttgctgtggcgagagaggaattcacggacccatggcaacgactccactacatcggctcaactaatccggaatggcgagaaattcattcgcaacagaatttcatcacttgactactcctccacccctcgtttgcgtctgttattccaacggtgactcatggtccgaccatagctgcaggaaaaccaatacgtccactattctttgctcgtggtttttgttctgttttcttacactcttattctttacaaacctgtttttttgctaggtctttttattcttttgtaaatattcttttggtttgatatataaattacacatttaaacaaaaaaatatatatatagatcaaaaatctcgtagtaatatttagaacaaagacggtaaatctttcaactttttcagaattgtaccgaccgttaaacgaattccctgatcgaaaatgatactcaaaaaatattttatttcctataatttaggagtttgggtttatcaca

SEQ ID NO: 63735 - DNA, 560 bp, Arabidopsis thaliana landsberg
tgtaaagtggggcctaggactccaaaggaaacccatatatagacttaccttccatttacaaagggtccaaaagctcacatagaagtgggcttactcgtttcttgtcgaaattttgaacttaaccctacccttctttcaatattatatcaagttcacaaaattgacatccccaagaagaagaaattgtaactagcgatctgtgtcgactactgtagttgtactagtgtgtactttacaaattgctatttatatatagaaatatacccactttgttagtgatatgatcatgattcgcatttaaatcataatatttgattgttctgttttttaagaaaaatcataatcatatcacttacacactttacttttggctctctcattccgtcattcatttagtttttgtttattgtttaattgttcacttggttagttaaaaaattaaaaatgttcacttggtaagatatgttaaatgttatcctctaggactaacagaaataataatccttgatcgagaatggtatcaagtaccttaatacctttcatccattggataaaataga

SEQ ID NO: 63736 - DNA, 1260 bp, Arabidopsis thaliana landsberg
tatatccaagaccattcgttctctttctgcctgcaaacagtagttacaatatcagagccatggcacctcttcatgtgatattgatttgtttgaagccatgcaatagcaacaggattacaagcaacacttacagccctctccattgaactgaaattgtcttctttggtgttcttccctggcggtgagctacaattggaagatagtagaaaataagtaagggaatcataccgctgttccaagcaaatcaggatgtaccttggagggtgccttccattggattcaagagccccgcttgctgctgcaaggatctgctttcgcttttcttcttgttcctctgaccgaacactcgcaggaaacctgtcataggtatacctggtggctgacaaaaaagaatagagataaatcagaacatgatcccaaactcagtagacggacgattattccccagaaaaatataacagagtgaaagagtcttagtactttttctactattatgcatactacaccaacttgtaaattttgtctctttccaaatactggtggccagccaaaacccccatgagattatgaaaaatggtataccatcaattagatatattttcattctcgggagtttcttataaatgaacaaccccaatctcttatcattcagcttctgctatctaacaaattctaccaacaaatcaaaatatacctgattcttcaacttctggctcggctattgtgattatttcaggctccatagaagatttaggcagaatcgacattgcatcttgaccccttccaactgcatcttgtaacttctcaaggagattagtactcttctcatcagagcttagacgcctttcaaggtaatcgaggaatgcaaaagagcccaagaattgaaccaactgaaaacaatcggaagagtaccaataaaagtaattattcaacagataaaacgtaacttaaattattcaacatcttttggatgaataaaaatatgcagtaaaaactcgaaagtaatatgtgaaaagacggtttaccacactaattggaacaatggatagtaatgttgagttatgaaatgcagtaagtgtaggtatatgccttccatacatgaaacagttagcttaccataggctctggtggctgatttgtggaacgagaccgtctcttcagaaacgcatcagtgctaaaaactttgttttcctgacaaaagaaaccgtataagtaagaaaagatggacaaaaggggtgaataaataaaataaggaaagaa

SEQ ID NO: 63737 - DNA, 1428 bp, Arabidopsis thaliana landsberg
gaaaccgacttacgtgatccgatagcataatttaaaacgtttaagtaatatgttcatatttctcaacatattttctagaaacgatgaaacaatagtatagatatagacatatagtaatcagcaacaaagtcacataaagatcctcatcatggaacaaatgggatctttgcccatcttaaacataaatgtggaatctaaatcaactgtttaaaaacaaatacaaggtctatatcctaatcaatggacgttcaccatggtttaatttaataaaaagtgcatgtgtatttttattataaaatcaactaaacgtataaatgtaaaatggatgttttgtcatggtctgcctttctcttggatcatatgggtggtcgaaaacatgaacaatgaaatagacttttaaaatcagaataaactataagtatccataataaagtacaaagttaaataacaatttgattcccatattaatacaaaatggaatcttaatgacccacttgacgataactaaactaatatccatgttaatttcatcacccaaaaaataatgaaggcttcgattctctgtaaatgtattcactaacatttgtacagtccatcatcattttgatatttgcttctctcttatgagaatataaaattggcattttaggctgtaaagtttatcaatgaatatgcccggaatcattatatcgataccgtcatacataataataactccatttaaaattgaatttttgatagaattaagattaacctaataaaacgaaatatcttataagaaaaatgatgctaagttataagaaaaattcgcaaataacgtcaagccaccatctgtcaaccacgtgaggtgcacgtgcgttgacgggaccgtgagtaggagactctctcttggtcaagcacccacaaggcacaaggacaagccatcgctctaatttgtcacccttagtttaattaatttaatttaacagtcctaactataattagtaaccctcttgcattatcatatagtattaattaataactactcaaagtctctttctctcaaaccctctcctcaagattttttcctaagcatcagattagcttttgtagggtttttcttttccggtttcatgtaccctcctaattcctctaagtccaccgctcatgacggcggcggcgatgccgacaccaatcaatatgactcagccgctggagctacccgtgatttctcctctcttggccctcaaacccaccatcatccgccaccgcagcggcagcagcagcatcagcagaatcccaacctcgtcggccattatttaccgggcgagccatcttccatcggattcgattccaacgcttcttcttcgtcttctttgttccgacacagaagctctccggctggattctacgaccaacatcttcccactgatcccaccggtaactttt

SEQ ID NO: 63738 - DNA, 537 bp, Arabidopsis thaliana landsberg
aataaccactacaaataagtggtcaacatgtataaatatgccataaccattctcgatagttgtccaattcctaatgaaaatccgaatcatgtaacttatttgattctcgatattatattatttacgaatgtcgggtctaagaagcatttctattatattatttacagggatcaaaaacagataacggttctctataaccatataaccaagaaaagataagcatagatcacggggttaaaatatcgatattgatactacgcgtccgataaagaagagccggggcagattttgagagagagagagagaggagaaaaaatcggtggtaggttttagttttatgagagaattttgtggacagcaaagtgaggacgagtcatacgtgtgttgtgtaccacctttggtcattggcctctctttcatgtctgttcggtacttctcagcctcaagtcttttataacacttgtgctccatgtttggacccacactgcttcaaagaatggattcgagttccatttaatgccattcattaatatttct

SEQ ID NO: 63739 - DNA, 541 bp, Arabidopsis thaliana landsberg
  unsure (1)..(541): unsure at all n locations
agcacatccgtaacgtagatgtcgatcttggagacggcaggttggcaacaatcttttctaacccatggttagacgnacattctctgagctcgtgagaggaccatcccgcttactcccagggtctggatagatctgccagttcttatgcatcgggtggcagccgaagagaatggagcaaagggtagcaatatatgtggtggcaatcaaaccgtatgcgatatggattcggactcgcatgttgaccaagccagcactgagtcatcgttagcactttcatcaagcagaaggtctcaacgcctgctccgttcgaagaaaatgtgaaatgcaacagggaatctcacgtcaaacgggagtaaaagacggtcatacacgtcttcaaaagccatagcaataaagtatacagagaccagccggtcacctggaccttggaacctcccacacgcagacgatattcctcagattcaggcgacagctgtttgcgctgttcgtctgtcatggcattgtatgcgaggcctttgaaccatgccccccaatatatgca

SEQ ID NO: 63740 - DNA, 508 bp, Arabidopsis thaliana landsberg
  unsure (1)..(508): unsure at all n locations
gcagggcacgttgccggccacctcggccagcggctggaacttcgcgccgttttagaggatctcgtcgtagaggtcgtcgcacagcaacagcagccgatgccgcgcggcaatcgccaccagctgctcgagcagcgcgcgtgagtacaccgcgccggtgggattgttcgggttgatcagcaccagcgcgcgggtgcgcggcgtgaccagggcctcgatctcggccgggtccggctgatggccgttttccggcaggcagcggtaatagcgtggcttgccgccgttgaggatggtagcggcgctccacagcgggtagtccgggctgggcagcagcacttcgtcgcccggctgcagcagcgcgcgcaggctgatgtcgatcagctcgctgacgccgttgccgatgaaaatgcgctcggcatcgacaccttgcgcnnnnnnnnnnnnnnnnnnnnnnnnnntggctgcccgggccttttccaggccctgctcatggccgtaggcctcgctgtcg

SEQ ID NO: 63741 - DNA, 524 bp, Arabidopsis thaliana landsberg
  unsure (1)..(524): unsure at all n locations
tgagatggtccctacagtaacgcgcttggacttcgctcaacgtgacgttttaattatatgtcatacaatctctttttgctgtcttatttcaatttaactgggtacaacgcattacgcccggtaatgaaaagcgtatcggctgcaaccgtcactgtggacggtctgtccggcgatacgatcatattaattgccttaccggtaggatcgaattcatacacctgcccatgcgcagtataaacgttaccctggctgtccgccacatagctaaactcccctttttcagcaaataaatggggctccgacaaatgtccttgcgggcctacattgaaccgcacgggtcttattaaatactcgtcggcgccgtacaatactcttgcgggcgccccctccaccaacgcgttctaacgcgccagatcgtacaccacaagcactatnnnnnnnnnnnnnnnnnnnnnnnnnnnnnntctgaacagagtggtgcttaccttcaaaaaatcagccgaatcacggcggcgattggatgg

SEQ ID NO: 63742 - DNA, 535 bp, Arabidopsis thaliana landsberg
cgcggggcgatttcgatgacgccggcagtgatcgcccgctccaccttgtcgcccgggatcatgtcgtagagcgcgtcatagagcggacgcagataggggtcgaccttttccttcatgtcgccgggcaggaagccgaggcgctcgccggcttcgacggccgggcgggtcaggatgatcttctcgacggcgccgcgctccagaagctgggcggcttgcgcgacagcgaggtaggtcttgccggtaccagccgggccgacgccgaagacgagctcgttgcgctcgagcgcacgcatataagcgtcctgcgtcggcgtccgggcgatgatcgtcttcttgcgcgtcgaaatctgcgccatggtcagcttggctttcttttccatcgtcggcaggctcagctggtcgtcggcggcaacggccatgcggatcgcaccttcgacgtcagatcgttccacgctgccacctttctgaagcttttcatagagataatcgagcgtgcgccgcgcctgggtggtggcgatcacgtctccggtgatga

SEQ ID NO: 63743 - DNA, 779 bp, Arabidopsis thaliana landsberg
ctagagggtacctccttttttccaaatagaatcatataaacacattatgttagttaaatcactcatgccaatgctaagctacaacttattccaatataaattttattctatcaattatgtatgttaatatattttgtctcgaacttctctaacgactctaaaattatatcacatacatgagctttttttttatttctcggaaaatattcacatatatctctctactaatgatgcttaaaactatacttatatatatttaaattctcttataagtctactaaaacttcaaaaaattctcgtaaaaccttctatgaattgataaccctatctaaccaaaccaaccacgccaaattcaaattaaaaaatttctaacttctaacttctcttttctcgtagaaatgccttcacaatccaatgattacagttcatatcaatcagaaattgaaaaaaacaaaacaattaggacaaagcaaaacacttcattttaaattcgacattaacacatttgtgaaaaaaattcaaactcttacctccacacaatggttgtcgtttcacgcttcaactctttgttcaccatcgattcatgcttctccttgaatttagaccaatctttatatgagacattctttaaatctccttacttcacaaacatcatagacaatttagatttaagaaaaatagacaataaattagattaactactttactagaaacaattcttcaccgaaaaatcgcccatttgaagattttgttttttctcttgccatcgaaaaatacta

SEQ ID NO: 63744 - DNA, 610 bp, Arabidopsis thaliana landsberg
ccttagcttttgcggccaacgtggatgtgtataatcacattacgtttgtgatgagtgtagcaaacttgttttagatcaatctcaaagttccattttcatttacaatataacttttgtatatcaaactgagtttgatcttagaacttcttttttgtcttgttgtatagagataaactctgtttcactatattccgcgggtcaaaaaaattataatttactagaccgcgtccattaatcaattagattcaaacacataattttttttggtgagaagattcaaacacataattttttttggtgagaagattcaaacacataatattaaaatttctgattctcctgtatctattaatgtggcatatattttcttttttcctgacagatctcttattcggtttccaattaacgtttaaactaacttaattttgttttgttcacatatcttatttataattttgttaaatatataaaatttaactaatgacatgcattactaatatacttaaccagacatttgatttaataaataatctttcgacagccattgcgtggttaattaaaagaaggaaccccaacttttttttttttttattacgatattttcattttt

SEQ ID NO: 63745 - DNA, 1023 bp, Arabidopsis thaliana landsberg
aatgaaccacaatcacatggacgacaaaaccaatgttctatttgtatatttactattttaaagactaaaaaaatccatggaacagtggttggtcaacgttagactaggtcaatggataattagccagagttgctaaattaaggttttaagtaaaaatccaagcttcgtgaaattctctaaggaatcgaatcgacaattcaaagattatataatctattaacgaacacagagtgatgaatcaagtaaagcatcaaaaagctgcatgcacagagaaagcttttaccttcgccactctctaagagcgaaaccttcctctttctccatggccgatggtggcggcaagatcgaaccgtttgtatcatcgaaactatttatcgacggcggagattgagtttcgggtcgaggagatgaatcgccgcctggtaagtctgactctttctccggttgggagtcaaaattagagaaggaagagtcaaaccgctgcgactggaatcgagactcgtaagccgtgaagtttcctccgtcgccgctatctacttccgtcgaacgatttgaatcaccgagtcctgactcttcgttgctcaaggttgacgacatctctttagttgtgtgtttattttcttacaaaagtcttctttgctctgctttgtgtccacactggttttcgtaacgacgaattcttcttctcttaggatctacgcggcgttttataattggttggagcttaaatacacgagagcagtgaaaagggtacatcgtgtgtatcgtgaatctgcctctaatctgattgtacgcttacgtgtcatgttttgtattgagcaaaaaagcatccgtatggtggaccttgacgtatacgattactatcgtcagattccttgaatgttcctatcctgatgggcttttatgaacacaaagggtttataatttttgtggccttttaagatatatcaagaaaatataagatttaccccagaaattagattgacaatttttaaaccgaaggaaaccaaatttgcttcattg

SEQ ID NO: 63746 - DNA, 518 bp, Arabidopsis thaliana landsberg
cacccggctcgaccgttaaacatggaccgtatattatagcaaaagtggtggagaccgcattcctacttggccaatgaaccggacagtgatgatactctttcaaacttgaatttgaatactttttatattctctgtgatcgggattcgggaataattggtaccatattgtttatgccaaacaatactcaaaaaagatattctagaaggtatgaaatttaagttgaataaaaaaaaaatcaaaagagcttataatacataagctattctaggaaataattgctacttatctaagaaactataaaaattctactatggaattatttctaatgtacagatttaatactgaaatctaatttttctaagaaccaaaaaaaaaaaaactttttgtttagttgtttatgctagtgttgtcgatctgtcgatagtcattcgggttcaaatctatattttgtatagtgtgaaacaatgtaactttagaatgcaaagtaggtatttctgcattcagtaataactatctt

SEQ ID NO: 63747 - DNA, 437 bp, Arabidopsis thaliana landsberg
ggacagcactgggtcgcgcgcgaacagcgatgacagcttgcgcgttaaaccgctgaccgacaggcgctggcgccaggcgcgccgagggcgcgccgccggccgggcggcgaacaggtcgtccgggccgaaggcgacgctgggcagcgtcgatccgtgccatgccggcatgccgggctccgggcgcgccggcatgctcggctgcggcgccgagccgagatgcggcgcgggcgcgggatcgaccggaggcagcggctcgcggctggcgagcctgccccagaggctcggcaccgggctcaggtgggaaggcccacgcggagagatgctaacacccgcttgccaacgccagccgtaccgggtgcgatcatccgcggtcgccgtttcgggtggggcacatgaacaagcatcgccgcgaaggatcggcgccggggcacgtacgc

SEQ ID NO: 63748 - DNA, 543 bp, Arabidopsis thaliana landsberg
  unsure (1)..(543): unsure at all n locations
tcttcttagttaaaaagtttacaacactttgtctcttacttcctcttagacaattnagatatcttttctctctgcaggttattatggagattcctcttgaactgatgataaccattagacagaagcacccttggatgtttttccctgatattgtaccaattggtcatcctattttcgatatcattaactcgactgatcctgaggtagtaacacatttgtgctatttcgatatcatcaactcgaaagttcttatctttctcaaagtcctttcacatttgtgcttacagattgattgggatatcagattagcgtgtcttctgttattctcttttgatcgagatgatcacttctggcggctctatggcgatttcctgccggctgctgatgagtgcagcagcttgcttttagctacagaggtggattgaattgatatgattgccatttgaaactggtcacatttacttgtgtcttaaactaatgctngatgatatctattctgtgtgttttctataggaagacctgcggagcttcaagatcctgatc

SEQ ID NO: 63749 - DNA, 1135 bp, Arabidopsis thaliana landsberg
ataatcatacaagaatcacaattatcagcataaaccatcaatgatgtttatattttgttattacctggatgttgtcgggaagaggaagaccttcaaagacttgaggaggctctcgaagttgaaggatctgactcgggtcatttggcaaaggaacggtccatgaaggcggattagaaatccccattgatgcaaaaccgtgtcctgttctattttcccacatttgctgttgttgagttgaagatccatcacttatgatttgatgttgcaactatgaaagaaaacacaagaataagcctaagagcaatgctaaaaaagtcacaagtttccagtttcttacccttgggacattttcgactgtgtaagaaacaaatacgggctctgtgaagttgggaggctcaagaaccgcatatgcgccttcattttcatagtttcttgaaccctgatagcaaaaataacaagaaaaaccagttggaaaagtaacagaatatgtagcatttggactctgtttgttgtaaaagtgccaagggaaatgacctgtgagaacattgaagcactgaagactgtgcaaagctttccagattctacttcatgatctattgagtaaccgcttagcatgtttcccatgtcttctcgatctgctcgtgcatcggggccttcatgcgatctaataatcatctaagatggaaaacaaaccgattaagtttgtacataaacaactggaatatcagtcaatttggagagcagtttttacccaagttatacacttacctttaagtttgattgttgtagaaaagtctcggtgcaatcggctccccaaagaagtcccttgtaattgctttcgctcagaccatcagccatccatggacatgaccataaaacatggttaagagttatattctcgtcatcgttctcaccagcttgtctcctctcaatcttgtcaagttcctctaaagaacctaacaacaaagatggattcgggctctcttcgtggacccgagaactttgaaagagacctccatgagttgtgtagacgctatttgatatgactgatgccaaaggtaacattttaaaacaatcgatacacttggagtataacattggaccgtgctcaccgtatctatcacatatatctttc

SEQ ID NO: 63750 - DNA, 2911 bp, Arabidopsis thaliana landsberg
agatgctcggattatgtttttgttgttcaattattgtgtcaggtaacttctttaggatacgaagcgcatttaccctgggtgccaagaagttgaccaggttacttgaatgccctaaggagaatttgatccatgaggttaaccaattttttatgaacacatgggaaagacacggcagtggtcgacgtcctgatgctcctggaaatgacttatggctatcaagactgggagatcctgagccatatcatcaagctgaaaatgttagtaattctttaaacaacaaaagaaaccaaaatgccatccgtcttggtggggttcacggagctcggagtatgccctctcaacagaataactgtggaacagaaattacatctagagtaacatatcaaacgcaaaagagtcgaggcaactcttaccaacctgctcaggaagtcaattccaatcaaagtgctttaaatgataagcttcagcaaactgttaagccagaaactctggttaacaattttcatggtaggcatatttttgccaggacccgctctagccctgagcttactgagacacatggtgaagctcttttacaatctcgtcgtagtagagccgccccagatgctgggaaacgccaaactaattctaccagggttgatagtatcaggaaaaaaagtcttgagtctgaaactttgtcaagtggtgttagatattcagccgactcttcgtcagttaggcatactccatcccctcaaagtcctgatagtactgctgacatgagcagtgcagtgaacagttactatgatgaagtagggtccgtttccgtgaatgaagacttctctgttgcaggggaacaggaagagcaagatcttgttaactcgatgacatctgttactgggcaaggttttaatggacactttcctttcccttttaatttttcaacgggtcacttaccgtttccaattacaccttctatcttagcttcaatgggatatggtcagaggaatatgcctggtattgttccttctaaccttcctttcatcgaggcaccttggagtactaatctgcaatttccgcaaaactttgtttcttcaccatttacccattattttcccagtggagcccacccaatttcagaaaagccgagcaaaactggtagtgatgacatggggtcttcagaagtgaatgtcgatgagtctgacaatgatctctggcacgagccagaaaggggaactcatagttttggacttgaaaatggtggttatggaatgcatcaggcagatgataaacatcagtcatcttttgcagagcacagttttgtaccttcaagaaggaaaaatcggctgacaaggggggatgatttagaaaattcccactctccagtcagaggaagcagtcagattcagagtgaggagagaactgtaggctctagatctgtgtctggcgctagttccgttcgaagcaggacttcatctgaaagctcctgggatggatcaactacaagggggtcaaagccagctaaggatagacggaataggaaagttgtgtctggggccgcatctacactgtatggaaaaggaaagagtgttcctgagcactcaatccagattgatgatgataacagagaatggattcctgtatctagcaatgaaataatagatagagatctggggcctcgtcctactgtcccttcatttcaagttcagaggcatcaaatacatggtcatgaactagctcaggcaagtggatcagagtccacagtgtctcttgctccgtttatccttggccatggcatgcaacaaaacgaggttgataattctggatatacgttttatcccacaggaccacctgttccgattgttgcaatgcttccaatgtacaattaccaagctggtggtaatgcaacatcagatgctctggcaagccaccacagtgtggatgaaggagtagagaatcatgaaccctgtaaaagtttcgactcgtccaggggacttgatcagtctgagatagtagtttcttcgcactccactagaatgggctcttctgcagaacaggtggagcgtaagaatgatatactcaatggtgattttataagccattggcaaaatttgcagtatggccgctcttgccagaattctcaacatccgcctgtgttgtatcctgctcctgttgtagtgccacctgcttatctccaggggcgtttaccatgggatggtcctggaagacctctggcttacaccaatgctgtgaatcaactcatgacctacggacctcgtcttgtaccggttgctcctgtacaacctgtttcaaccaggccacccaacatttaccctcgttacgctaatgaaactcccagatatcgaagtggaacagggacctattttccaaatccagtaagaacttaataccttccttgagcttcctttatacttgcgtgcatgctttggttaatcgaggtacaactttcattttattgtctggtcttgtgaaacgaaccatagatattttcaaatgctaaatgaagtgcttttaccttgcttattaataataaaatggtctgtcagtcttgcagccctatatttctttaatgaatttacagcatgatctgtctgcttaccgtacttgcatccaaatctgcaacttgacaaatttggtcatgttgcaggctatatggttctggattttttccgttatacctttttttctttaccttttcgttttttcgttttttgttttccgttatacctttattgattctgtcctgtctttactcatgacggttttggtttgccacactgctctaaacttgtgctgaatttgttgcagaagatttctcctagggagcagcggcctacttctgaaatgaggcgtgaaaattatgggcatgacagaaccgaccatcatagcgatagagaagggaattggaatg

SEQ ID NO: 63751 - DNA, 781 bp, Arabidopsis thaliana landsberg
gtttgagagtttcaggtacataaagacaactacatagagcataacactttggagcaactcttttcccctacctgaccaaagcagaatactggaaccagagggctcccctgttccatggctatgcgcacaaatccttcttctccttgaaaggaagacattctgcaatgtgagatacagttcaataaggaaatcatcagactgttgcaggagaaacaaacccttttctcttcagtttacaagctacacatacatgagataccaaacggaaatcttgaagctttctaagtaatccaaatccctcataagaaaatgatttcatgaaagcaaaagtgaatgctactaattgagctacaataaagctacctcagcatcatgttgcatatgaaaagtctcctgcacaccaccaggtacaagaacacaactgtagccagaatccaaaagggaagtgaaattcttcctagaagcagcggtgagccctaaccatgtccatatatgccttagaaagggagtgtagaatatctaaaatcaaatttgcaaaacaatgagtttgcggacaagaaggttaagatactacacaaagagattaagcagcaatgaactcacagcactacttgcaagaactttaatgttaggaataggcataaaccctgtgagatcacaaagagcaacaactccaatcggtagcaccgaatgtggttcataaccaaagactgtaatcacaagttaaaaaagtcaacgatatcacacacccatcttaaagtttgatactttggagcaagaa

SEQ ID NO: 63752 - DNA, 798 bp, Arabidopsis thaliana landsberg
attaggctggaaagcttcgtaatcctcgacgtacagagagacggggaaataattacacgcgtgcttgcatatgtacctagcgagcttacgaccatatttgctacgatgatcgattgggataaagataaacagagagagcaagcccaagaccctgagaaaaacagaggatttcaaagagtttaaatttgagacttgtaacagcaaacagagagagatagagagatagagagagagatgtatatacatgagagatagagaaggaggaaggaaaatgagagaacagagaacaagagcgacgttgaagtgaatggcgccaagccagatggccatggcgatgatagagtggaattgatttgaatgttcctcagctcggaactctctggaaccacccatatcactagctccggtggattctttggtttgtccgcttctcacagatgaacgacgacaacgaataatgaatcgaagattctactcacatctatctatcttctctctcacttgagtgcagagcccaaataaccaatcttttaactacccaactttttatacaacaacccatctttaaagagcccgacaaggttcattctttgtcatttgacccgtaataattattgcctaactggagttttcaaaaggttaagcctttgttaaagctaatattgggccaaaggacattgatttatctgtatgtaagtgcttttaacagtttttgcttaccaattagatatcttccttccaaaggtatcacttctggctgctaaattgagcctagagctcgacttatattcaactgaa

SEQ ID NO: 63753 - DNA, 562 bp, Arabidopsis thaliana landsberg
cgtatatcctacaatactataatgaaagggttgtgtatgtgccgcggagtgtcgtatgctatggaattcttttatgatgctagaaaccatggcatttttccaactgtttacacctggaacatacttgttcgagctgtcgtgaatcgctaatgtgatgaatattaaaggaaaccttaatctgttgcatattgctgtataactctctagggttcagtttgaccctggatgatctctgggccagctcagctagctttgcgtgataaggtacaatgctctgaccctgaatctttgttttggaggttgaattgtatgtctcggtgcttggaagtgacaggaggtaaactgcagtaagtcgataagaatcaagttagctatatcatctgatgaactagtattatacatacatacatacatcaaaagcatttgggtgatacacattagtttgaatgattcgagtaaacatcatcgagatctgatatttgatgatgcaaaagaaaagctgtagcttgacgcatcaaacctaaagtgataagtatcacactttgggtctatgccatcaagt

SEQ ID NO: 63754 - DNA, 780 bp, Arabidopsis thaliana landsberg
gaaatataatggtttacagtggatgaggatggggtgacatgagttgaggccatatgagggtctgggccatcagaaaggaaatctgaggataatgaaggggtaggaacttttatggataagatggggataccttctgagatctaaatgttccaggttgttcatctccctgtgaaagaacttccagcttggcaaatactaacatgtgaattaggctggaggtcacaatgattaggaagactgataggtaggtacaaatgctgccacattgggagatgtagcattaagtctcaaaattctagtgtgttagtttgttctgcagatgtttagtaagtctggctgtggtggggattataccccttttgttcttattttctgacttgcttatacagatggtccccgacttaagatggttggactcagaattttttgactttaagacggtttaaaagcgatatgtgttcagtagaaaccatacttcaaatacccatataaccattgtggctttaaatttcagtacagtcttcaataaattacatgatatactcaatacttcattataaaataggctttgtattaaattattttgcccacctgtaggctaatgtaagtgttctgagcatgtttaaggaaggctacgctaagctgtgatgtttggtaggcaagttatattaaatgcttttcatttcttagtatattctcaacctatgatgggtttatcagtctgtaaccccatcataagtcaaagaacatctgtatctctcttgctagatgagtgtttgt

SEQ ID NO: 63755 - DNA, 441 bp, Arabidopsis thaliana landsberg
ggaaagaccaacatgtctagtcatgcggcgtcaagactcatgagtgatccattcaccttgtttgttacatgcttgccacattcgcatcatatgagcatatacatattgtagttgcctatcacaagtggattgatggaaattgtttcaacatcaacaaacacaaattatcatccttataagccttgtgagctaaaaagagacgattaaatcacaaaactatgaagttgtctcatggaaaagaacgaacaggatggattgataagagcacacagcgtcattacttacttggaagaacgactgattttgcaatttaataaccaaaggcaaatgtaagatatataaaatattcctatgtagctaaaaccacagatcttaatctgactttcgagatttataatctatgacatacatgtaatcagtaaataccaagaatgtggaatc

SEQ ID NO: 63756 - DNA, 1407 bp, Arabidopsis thaliana landsberg
agatttttgtttagccttgctactccggggaataagtatcgtcttgaaagattgataccagtcatggaggttaatgacatcagcgtgctcttgcgccagtttatacctatattatcaattatcacaaagcttttcagtgcaacacatattgaaacaaacaaaggagaaagaagacagtatgtgttcatgtgtatcgtgtatatgcgtgtttgaagatcgtttgcctcgccgattatctctcaaatcatatactcgacaagaaaaagtaataccggaagaattgtttcaacaaagacaacatgagaatgcaagtgtataaaagtaaatgaatgctcacaaaatcgatgtatcatgcatggaaggcagtagagttgtgcctctctggctgcagcacacacagtggaggatatcgtgagattccagtagatctaattggatcctgcctctcgggtctccaagtaaagcctaaaacagatataaatatcaaattaagaggaggaagagagagaaggccatatgtaaaattttaagcaccacatcaatcattctatgaattagttaaaaaaagaaaatgctcagactctctcagaactgatcttgtaaccggtttgctttaagatagttgatgagaatgataccacgggagcaacaattaacaattaattatatattataaatcttccaagtaatgtaaatataagtgaatccgagaggaagaaggatgctgacgacttacagattgaagtttatcgacattcttgaaacacaaaatttcgtggaaaggaacactctcaactggcttcatatattccctgttccatacaaaaggctgtgattaattctcaagacgtgtacataatctaacatggcaacgttttaaatgacggcagcaaatcaaaagccatatacaagcaatgtcaagttcaaaaacaagttgtctccttggagataaaaagactgacaaaatagagttcaccttagcatgaattctatgactgtggcaaccttatcagtcatggctttaagctctttttcaagctttgaattgcttcgagatgcatgctttctgtcacatcaaagtaccacttcatgagcaacagaaactaacgagtagatgaacttatgtatgtagtaatgattatatatcagctgaataagacactaagtttcctcatctatcttttcccatacacaagaacgatggggacaattgaaaatatatttcaagagactatcttgccaagaagatctgctggaggtaagccgaatattaaaaagaaaaacaagaaattatctgacatgttgtttggtttgaaaagacaacaatatctagagatttactttggggctgtaggaagtccttgtctctgaccagattgtttcacggctttcatgaccggatgcaat
